United States Patent Application Publication US 2011/0183924 A1 - sequence listing, part 11

SEQ ID NO: 26062 - DNA, 2783 bp, Homo sapiens
  misc_feature (2608)..(2608): n is a, c, g, or t
  misc_feature (2701)..(2701): n is a, c, g, or t
gtactctgattggtgacgggtgaggcggcccgaaatcgtaggacttccgaaagcagcggtggcgtttgcttcactgcttggaagtgtgagtgcgcgaagatgcgaaaggtggttttgatcaccggggctagcagtggcattggcctggccctctgcaagcggctgctggcggaagatgatgagcttcatctgtgtttggcgtgcaggaacatgagcaaggcagaagctgtctgtgctgctctgctggcctctcaccccactgctgaggtcaccattgtccaggtggatgtcagcaacctgcagtcggtcttccgggcctccaaggaacttaagcaaaggtttcagagattagactgtatatatctaaatgctgggatcatgcctaatccacaactaaatatcaaagcacttttctttggcctcttttcaagaaaagtgattcatatgttctccacagctgaaggcctgctgacccagggtgataagatcactgctgatggacttcaggaggtgtttgagaccaatgtctttggccattttatcctggtaaagaagctgtgggcttaataagctaatatttcgtgtgatagtttctgtaaagctctgggcacagggcattattatagttgagcagccagttaactgatttaatctcatgtttgagttttcttgattgcatttgccttgtttattgtgagcatggaatacttctggaagctttcctagtagatttttctttaataaatgtactaatagtttttgatttacagaattactgcaaagatagtacagagactttctgtatgccctacacccagtttccccattattaacatttcgcattggtatgatgcatttgtcaaaatagatgaatcaattctgctacattattattaactaaagtacacactttattcaggttctgtttttgcctaatgtcttttttcagttctaggatcccattcaagatactacattacatttagcagtcatgtctccttaggctcttcttggttgtgacagcttctcagactttccttgtttttgatgaccttgacagttttgaggagtactgcttaggtgttttgtagactctctcaatcgggatttgtctgatgtttttctcatggtgagactgaagaatgtggtttttgggaggaaggccacagaggtaaagtgacattctcatgacatcatatcaagggtgtatgctatcagtatgacttctcagtgttgatattaaccttgatcacctggcttgaggtcatgtttgtcaggtttttccattgttaagttactttttctttctcccttttcatactctactttttgaaagaaagttgggccgggcacggtggctcctgcctctaatcccagcactttgggaggccaaggcgggcagattacctgaggtcgggagtttgagatcagcctgaccaacatggagaaaccccatctctatcaaaaaacaaaattagccgagtgtggtgacgcatgcctgtaatcccagctgcttgggaggctgaggcagaagaatcgcttgaacccgggaagcggaagttgtgattcgggaactggagcctctcctctgtcacagtgacaatccatctcagctcatctggacatcatctcgcagtgcaaggaaatctaatttcagcctcgaggacttccagcacagcaaaggcaaggaaccctacagctcttccaaatatgccactgaccttttgagtgtggctttgaacaggaacttcaaccagcagggtctctattccaatgtggcctgtccaggtacagcattgaccaatttgacatatggaattctgcctccgtttatatggacgctgttgatgccggcaatattgctacttcgcttttttgcaaatgcattcactttgacaccatataatggaacagaagctctggtatggcttttccaccaaaagcctgaatctctcaatcctctgatcaaatatctgagtgccaccactggctttggaagaaattacattatgacccagaagatggacctagatgaagacactgctgaaaaattttatcaaaagttactggaactggaaaagcacattagggtcactattcaaaaaacagataatcaggccaggctcagtggctcatgcctataattccagcactttgggaggccaaggcagaaggatcacttgagaccaggagttcaagaccagcctgagaaacatagtgagcccttgtctctacaaaaagaaataaaaataatagctgggtgtggtggcatgcgcatgtagtcccagctactcagaaggatgaggtgggaggatctcttgaggctgggaggcagaggttgcagtgagctgagattgtgccactgcactccagcctgggtgacagcgagaccctgtctcaaaatatgtatatatttaatatatatataaaaccagagctgacaatgacactctggaacattgcataccttctgtacattctggggtacatggatttctactgagttggataatatgcatttgtaataaactatgaactatacactctgcgcgcccgctcttctgctgctgtttgtctacttcctcctgcttcccgccgccgccgccgncatcatgagggaaatcgtgcacttgcaggccgggcagtgcggcaaccaaatcggcgccaagtttttgggaggtgatcagcgatgaagcacggnatcgaccccacgggcacctaccacgggggacagcgacctgcaactggaacgcttcaacgtgtactacaatgaggccccggcg

SEQ ID NO: 26063 - DNA, 1807 bp, Homo sapiens
  misc_feature (1632)..(1632): n is a, c, g, or t
  misc_feature (1725)..(1725): n is a, c, g, or t
gtactctgattggtgacgggtgaggcggcccgaaatcgtaggacttccgaaagcagcggtggcgtttgcttcactgcttggaagtgtgagtgcgcgaagatgcgaaaggtggttttgatcaccggggctagcagtggcattggcctggccctctgcaagcggctgctggcggaagatgatgagcttcatctgtgtttggcgtgcaggaacatgagcaaggcagaagctgtctgtgctgctctgctggcctctcaccccactgctgaggtcaccattgtccaggtggatgtcagcaacctgcagtcggtcttccgggcctccaaggaacttaagcaaaggatgatcaagaaatggttgtatgtgatctgtgttgaagaccatgtttcagagattagactgtatatatctaaatgctgggatcatgcctaatccacaactaaatatcaaagcacttttctttggcctcttttcaagaaaagtgattcatatgttctccacagctgaaggcctgctgacccagggtgataagatcactgctgatggacttcaggaggtgtttgagaccaatgtctttggccattttatcctgattcgggaactggagcctctcctctgtcacagtgacaatccatctcagctcatctggacatcatctcgcagtgcaaggaaatctaatttcagcctcgaggacttccagcacagcaaaggcaaggaaccctacagctcttccaaatatgccactgaccttttgagtgtggctttgaacaggaacttcaaccagcagggtctctattccaatgtggcctgtccaggtacagcattgaccaatttgacatatggaattctgcctccgtttatatggacgctgttgatgccggcaatattgctacttcgcttttttgcaaatgcattcactttgacaccatataatggaacagaagctctggtatggcttttccaccaaaagcctgaatctctcaatcctctgatcaaatatctgagtgccaccactggctttggaagaaattacattatgacccagaagatggacctagatgaagacactgctgaaaaattttatcaaaagttactggaactggaaaagcacattagggtcactattcaaaaaacagataatcaggccaggctcagtggctcatgcctataattccagcactttgggaggccaaggcagaaggatcacttgagaccaggagttcaagaccagcctgagaaacatagtgagcccttgtctctacaaaaagaaataaaaataatagctgggtgtggtggcatgcgcatgtagtcccagctactcagaaggatgaggtgggaggatctcttgaggctgggaggcagaggttgcagtgagctgagattgtgccactgcactccagcctgggtgacagcgagaccctgtctcaaaatatgtatatatttaatatatatataaaaccagagctgacaatgacactctggaacattgcataccttctgtacattctggggtacatggatttctactgagttggataatatgcatttgtaataaactatgaactatacactctgcgcgcccgctcttctgctgctgtttgtctacttcctcctgcttcccgccgccgccgccgncatcatgagggaaatcgtgcacttgcaggccgggcagtgcggcaaccaaatcggcgccaagtttttgggaggtgatcagcgatgaagcacggnatcgaccccacgggcacctaccacgggggacagcgacctgcaactggaacgcttcaacgtgtactacaatgaggccccggcg

SEQ ID NO: 26064 - DNA, 1466 bp, Homo sapiens
  misc_feature (1291)..(1291): n is a, c, g, or t
  misc_feature (1384)..(1384): n is a, c, g, or t
tgagatgggtcagtgtcttctaaacctctctgctgatagactaagagatatatatgtacatactaactcatgtatgtatacatatctataaatatttttctgtgtaactaattcatgtctcttttagataactagttaatactgatgtctctgaccctaatctcttaccatacagtacagtggtttcaaaatttttatctgtattctgtcagtatattttaatactgttttttgtttctttcacccagattcgggaactggagcctctcctctgtcacagtgacaatccatctcagctcatctggacatcatctcgcagtgcaaggaaatctaatttcagcctcgaggacttccagcacagcaaaggcaaggaaccctacagctcttccaaatatgccactgaccttttgagtgtggctttgaacaggaacttcaaccagcagggtctctattccaatgtggcctgtccaggtacagcattgaccaatttgacatatggaattctgcctccgtttatatggacgctgttgatgccggcaatattgctacttcgcttttttgcaaatgcattcactttgacaccatataatggaacagaagctctggtatggcttttccaccaaaagcctgaatctctcaatcctctgatcaaatatctgagtgccaccactggctttggaagaaattacattatgacccagaagatggacctagatgaagacactgctgaaaaattttatcaaaagttactggaactggaaaagcacattagggtcactattcaaaaaacagataatcaggccaggctcagtggctcatgcctataattccagcactttgggaggccaaggcagaaggatcacttgagaccaggagttcaagaccagcctgagaaacatagtgagcccttgtctctacaaaaagaaataaaaataatagctgggtgtggtggcatgcgcatgtagtcccagctactcagaaggatgaggtgggaggatctcttgaggctgggaggcagaggttgcagtgagctgagattgtgccactgcactccagcctgggtgacagcgagaccctgtctcaaaatatgtatatatttaatatatatataaaaccagagctgacaatgacactctggaacattgcataccttctgtacattctggggtacatggatttctactgagttggataatatgcatttgtaataaactatgaactatacactctgcgcgcccgctcttctgctgctgtttgtctacttcctcctgcttcccgccgccgccgccgncatcatgagggaaatcgtgcacttgcaggccgggcagtgcggcaaccaaatcggcgccaagtttttgggaggtgatcagcgatgaagcacggnatcgaccccacgggcacctaccacgggggacagcgacctgcaactggaacgcttcaacgtgtactacaatgaggccccggcg

SEQ ID NO: 26065 - DNA, 1544 bp, Homo sapiens
  misc_feature (1369)..(1369): n is a, c, g, or t
  misc_feature (1462)..(1462): n is a, c, g, or t
catacagcctaatgccgggagcacccccctcaagctagaggtatgggtcttatgtacttgcagggaaacagacacatactttaggtttagctgtctatttattaggccagaaacttcttgaaggcaaggactgtactccatacatcttttaatcttaaatgctcattatgattaaaaagctgatcttcagttaagccaataataggaaaaactcagataaccaggccctgcttttctcccccagcgttaagattggttattttttatactgcaaggttcatgagaatagagactttgtcccactaatttttgcatcctgggtgcctctcacagtgggttctcttaatacatgattcttcaacataaacgttctacccaacttcagagacaactcagaacataaattctttattacctgacttctggctcatgtacatacctcttttattaactagcatgtagctggactgagtcaatatacactgagttaaagtctcattgctacacctctctgttcctagggtctctattccaatgtggcctgtccaggtacagcattgaccaatttgacatatggaattctgcctccgtttatatggacgctgttgatgccggcaatattgctacttcgcttttttgcaaatgcattcactttgacaccatataatggaacagaagctctggtatggcttttccaccaaaagcctgaatctctcaatcctctgatcaaatatctgagtgccaccactggctttggaagaaattacattatgacccagaagatggacctagatgaagacactgctgaaaaattttatcaaaagttactggaactggaaaagcacattagggtcactattcaaaaaacagataatcaggccaggctcagtggctcatgcctataattccagcactttgggaggccaaggcagaaggatcacttgagaccaggagttcaagaccagcctgagaaacatagtgagcccttgtctctacaaaaagaaataaaaataatagctgggtgtggtggcatgcgcatgtagtcccagctactcagaaggatgaggtgggaggatctcttgaggctgggaggcagaggttgcagtgagctgagattgtgccactgcactccagcctgggtgacagcgagaccctgtctcaaaatatgtatatatttaatatatatataaaaccagagctgacaatgacactctggaacattgcataccttctgtacattctggggtacatggatttctactgagttggataatatgcatttgtaataaactatgaactatacactctgcgcgcccgctcttctgctgctgtttgtctacttcctcctgcttcccgccgccgccgccgncatcatgagggaaatcgtgcacttgcaggccgggcagtgcggcaaccaaatcggcgccaagtttttgggaggtgatcagcgatgaagcacggnatcgaccccacgggcacctaccacgggggacagcgacctgcaactggaacgcttcaacgtgtactacaatgaggccccggcg

SEQ ID NO: 26066 - DNA, 616 bp, Homo sapiens
  misc_feature (441)..(441): n is a, c, g, or t
  misc_feature (534)..(534): n is a, c, g, or t
acatttccctaagtagtaattagtaacgatgttgagcaacttttcatgtgctcaatgcctatacaggtcctttgcctgtttttaaaattgtgttgttttagttgggttgtaagagctatttatatattttgcatactggactcatagtgtgtatcattttttttttttttgagtcagagttttgctattgtgccactgcactccagcctgggtgacagcgagaccctgtctcaaaatatgtatatatttaatatatatataaaaccagagctgacaatgacactctggaacattgcataccttctgtacattctggggtacatggatttctactgagttggataatatgcatttgtaataaactatgaactatacactctgcgcgcccgctcttctgctgctgtttgtctacttcctcctgcttcccgccgccgccgccgncatcatgagggaaatcgtgcacttgcaggccgggcagtgcggcaaccaaatcggcgccaagtttttgggaggtgatcagcgatgaagcacggnatcgaccccacgggcacctaccacgggggacagcgacctgcaactggaacgcttcaacgtgtactacaatgaggccccggcg

SEQ ID NO: 26067 - DNA, 1764 bp, Homo sapiens
  misc_feature (1589)..(1589): n is a, c, g, or t
  misc_feature (1682)..(1682): n is a, c, g, or t
gtactctgattggtgacgggtgaggcggcccgaaatcgtaggacttccgaaagcagcggtggcgtttgcttcactgcttggaagtgtgagtgcgcgaagatgcgaaaggtggttttgatcaccggggctagcagtggcattggcctggccctctgcaagcggctgctggcggaagatgatgagcttcatctgtgtttggcgtgcaggaacatgagcaaggcagaagctgtctgtgctgctctgctggcctctcaccccactgctgaggtcaccattgtccaggtggatgtcagcaacctgcagtcggtcttccgggcctccaaggaacttaagcaaaggtttcagagattagactgtatatatctaaatgctgggatcatgcctaatccacaactaaatatcaaagcacttttctttggcctcttttcaagaaaagtgattcatatgttctccacagctgaaggcctgctgacccagggtgataagatcactgctgatggacttcaggaggtgtttgagaccaatgtctttggccattttatcctgattcgggaactggagcctctcctctgtcacagtgacaatccatctcagctcatctggacatcatctcgcagtgcaaggaaatctaatttcagcctcgaggacttccagcacagcaaaggcaaggaaccctacagctcttccaaatatgccactgaccttttgagtgtggctttgaacaggaacttcaaccagcagggtctctattccaatgtggcctgtccaggtacagcattgaccaatttgacatatggaattctgcctccgtttatatggacgctgttgatgccggcaatattgctacttcgcttttttgcaaatgcattcactttgacaccatataatggaacagaagctctggtatggcttttccaccaaaagcctgaatctctcaatcctctgatcaaatatctgagtgccaccactggctttggaagaaattacattatgacccagaagatggacctagatgaagacactgctgaaaaattttatcaaaagttactggaactggaaaagcacattagggtcactattcaaaaaacagataatcaggccaggctcagtggctcatgcctataattccagcactttgggaggccaaggcagaaggatcacttgagaccaggagttcaagaccagcctgagaaacatagtgagcccttgtctctacaaaaagaaataaaaataatagctgggtgtggtggcatgcgcatgtagtcccagctactcagaaggatgaggtgggaggatctcttgaggctgggaggcagaggttgcagtgagctgagattgtgccactgcactccagcctgggtgacagcgagaccctgtctcaaaatatgtatatatttaatatatatataaaaccagagctgacaatgacactctggaacattgcataccttctgtacattctggggtacatggatttctactgagttggataatatgcatttgtaataaactatgaactatacactctgcgcgcccgctcttctgctgctgtttgtctacttcctcctgcttcccgccgccgccgccgncatcatgagggaaatcgtgcacttgcaggccgggcagtgcggcaaccaaatcggcgccaagtttttgggaggtgatcagcgatgaagcacggnatcgaccccacgggcacctaccacgggggacagcgacctgcaactggaacgcttcaacgtgtactacaatgaggccccggcg

SEQ ID NO: 26068 - DNA, 2757 bp, Homo sapiens
  misc_feature (2582)..(2582): n is a, c, g, or t
  misc_feature (2675)..(2675): n is a, c, g, or t
gtactctgattggtgacgggtgaggcggcccgaaatcgtaggacttccgaaagcagcggtggcgtttgcttcactgcttggaagtgtgagtgcgcgaagatgcgaaaggtggttttgatcaccggggctagcagtggcattggcctggccctctgcaagcggctgctggcggaagatgatgagcttcatctgtgtttggcgtgcaggaacatgagcaaggcagaagctgtctgtgctgctctgctggcctctcaccccactgctgaggtcaccattgtccaggtggatgtcagcaacctgcagtcggtcttccgggcctccaaggaacttaagcaaaggtttcagagattagactgtatatatctaaatgctgggatcatgcctaatccacaactaaatatcaaagcacttttctttggcctcttttcaagctgaaggcctgctgacccagggtgataagatcactgctgatggacttcaggaggtgtttgagaccaatgtctttggccattttatcctggtaaagaagctgtgggcttaataagctaatatttcgtgtgatagtttctgtaaagctctgggcacagggcattattatagttgagcagccagttaactgatttaatctcatgtttgagttttcttgattgcatttgccttgtttattgtgagcatggaatacttctggaagctttcctagtagatttttctttaataaatgtactaatagtttttgatttacagaattactgcaaagatagtacagagactttctgtatgccctacacccagtttccccattattaacatttcgcattggtatgatgcatttgtcaaaatagatgaatcaattctgctacattattattaactaaagtacacactttattcaggttctgtttttgcctaatgtcttttttcagttctaggatcccattcaagatactacattacatttagcagtcatgtctccttaggctcttcttggttgtgacagcttctcagactttccttgtttttgatgaccttgacagttttgaggagtactgcttaggtgttttgtagactctctcaatcgggatttgtctgatgtttttctcatggtgagactgaagaatgtggtttttgggaggaaggccacagaggtaaagtgacattctcatgacatcatatcaagggtgtatgctatcagtatgacttctcagtgttgatattaaccttgatcacctggcttgaggtcatgtttgtcaggtttttccattgttaagttactttttctttctcccttttcatactctactttttgaaagaaagttgggccgggcacggtggctcctgcctctaatcccagcactttgggaggccaaggcgggcagattacctgaggtcgggagtttgagatcagcctgaccaacatggagaaaccccatctctatcaaaaaacaaaattagccgagtgtggtgacgcatgcctgtaatcccagctgcttgggaggctgaggcagaagaatcgcttgaacccgggaagcggaagttgtgattcgggaactggagcctctcctctgtcacagtgacaatccatctcagctcatctggacatcatctcgcagtgcaaggaaatctaatttcagcctcgaggacttccagcacagcaaaggcaaggaaccctacagctcttccaaatatgccactgaccttttgagtgtggctttgaacaggaacttcaaccagcagggtctctattccaatgtggcctgtccaggtacagcattgaccaatttgacatatggaattctgcctccgtttatatggacgctgttgatgccggcaatattgctacttcgcttttttgcaaatgcattcactttgacaccatataatggaacagaagctctggtatggcttttccaccaaaagcctgaatctctcaatcctctgatcaaatatctgagtgccaccactggctttggaagaaattacattatgacccagaagatggacctagatgaagacactgctgaaaaattttatcaaaagttactggaactggaaaagcacattagggtcactattcaaaaaacagataatcaggccaggctcagtggctcatgcctataattccagcactttgggaggccaaggcagaaggatcacttgagaccaggagttcaagaccagcctgagaaacatagtgagcccttgtctctacaaaaagaaataaaaataatagctgggtgtggtggcatgcgcatgtagtcccagctactcagaaggatgaggtgggaggatctcttgaggctgggaggcagaggttgcagtgagctgagattgtgccactgcactccagcctgggtgacagcgagaccctgtctcaaaatatgtatatatttaatatatatataaaaccagagctgacaatgacactctggaacattgcataccttctgtacattctggggtacatggatttctactgagttggataatatgcatttgtaataaactatgaactatacactctgcgcgcccgctcttctgctgctgtttgtctacttcctcctgcttcccgccgccgccgccgncatcatgagggaaatcgtgcacttgcaggccgggcagtgcggcaaccaaatcggcgccaagtttttgggaggtgatcagcgatgaagcacggnatcgaccccacgggcacctaccacgggggacagcgacctgcaactggaacgcttcaacgtgtactacaatgaggccccggcg

SEQ ID NO: 26069 - DNA, 1540 bp, Homo sapiens
  misc_feature (1365)..(1365): n is a, c, g, or t
  misc_feature (1458)..(1458): n is a, c, g, or t
gtactctgattggtgacgggtgaggcggcccgaaatcgtaggacttccgaaagcagcggtggcgtttgcttcactgcttggaagtgtgagtgcgcgaagatgcgaaaggtggttttgatcaccggggctagcagtggcattggcctggccctctgcaagcggctgctggcggaagatgatgagcttcatctgtgtttggcgtgcaggaacatgagcaaggcagaagctgtctgtgctgctctgctggcctctcaccccactgctgaggtcaccattgtccaggtggatgtcagcaacctgcagtcggtcttccgggcctccaaggaacttaagcaaaggtttcagagattagactgtatatatctaaatgctgggatcatgcctaatccacaactaaatatcaaagcacttttctttggcctcttttcaagaaaagtgattcatatgttctccacagctgaaggcctgctgacccagggtgataagatcactgctgatggacttcaggaggtgtttgagaccaatgtctttggccattttatcctgattcgggaactggagcctctcctctgtcacagtgacaatccatctcagctcatctggacatcatctcgcagtgcaaggaaatctaatttcagcctcgaggacttccagcacagcaaaggcaaggaaccctacagctcttccaaatatgccactgaccttttgagtgtggctttgaacaggaacttcaaccagcagggtctctattccaatgtggcctgtccaggtacagcattgaccaatttgacatatggaattctgcctccgtttatatggacgctgttgatgccggcaatattgctacttcgcttttttgcaaatgcattcactttgacaccatataatggaacagaagctctggtatggcttttccaccaaaagcctgaatctctcaatcctctgatcaaatatctgagtgccaccactggctttggaagaaattacattatgacccagaagatggacctagatgaagacactgctgaaaaattttatcaaaagttactggaactggaaaagcacattagggtcactattcaaaaaacagataatcaggccaggctcagtggctcatgcctataattccacctgggtgacagcgagaccctgtctcaaaatatgtatatatttaatatatatataaaaccagagctgacaatgacactctggaacattgcataccttctgtacattctggggtacatggatttctactgagttggataatatgcatttgtaataaactatgaactatacactctgcgcgcccgctcttctgctgctgtttgtctacttcctcctgcttcccgccgccgccgccgncatcatgagggaaatcgtgcacttgcaggccgggcagtgcggcaaccaaatcggcgccaagtttttgggaggtgatcagcgatgaagcacggnatcgaccccacgggcacctaccacgggggacagcgacctgcaactggaacgcttcaacgtgtactacaatgaggccccggcg

SEQ ID NO: 26070 - DNA, 3556 bp, Homo sapiens
ctttttttggccgggccgcatgaatccggccagcccagcctgcttgaaggacctacaggtttgtctcttccagatcagaactgaggaacaaaaacccccatcctgggaaaaatggggaagctgatttcgccgggttgcttttgtcttgcgggctcctgtcgggttcggtgtttccgctctgaagactgcgacgcgggctccgatgcagctcgctccctgccggatgggtcatgggattctaaacatgaggcagatagctgatcagcttccttgggttttgctgatgacacaagagagctttgcctgaagatggaaacactggagtcagaactgacctgccctatttgtctggagctctttgaggaccctcttctactgccctgcgcacacagcctctgcttcaactgcgcccaccgcatcctagtatcacactgtgccaccaacgagtctgtggagtccatcaccgccttccagtgccccacctgccggcatgtcatcaccctcagccagcgaggtctagacgggctcaagcgcaacgtcaccctacagaacatcatcgacaggttccagaaagcatcagtgagcgggcccaactctcccagcgagacccgtcgggagcgggcctttgacgccaacaccatgacctccgccgagaaggtcctctgccagttttgtgaccaggatcctgcccaggacgctgtgaagacctgtgtcacttgtgaagtatcctactgtgacgagtgcctgaaagccactcacccgaataagaagccctttacaggccatcgtctgattgagccaattccggactctcacatccgggggctgatgtgcttggagcatgaggatgagaaggtgaatatgtactgtgtgaccgatgaccagttaatctgtgccttgtgtaaactggttgggcggcaccgcgatcatcaggtggcagctttgagtgagcgctatgacaaattgaagcaaaacttagagagtaacctcaccaaccttattaagaggaacacagaactggagacccttttggctaaactcatccaaacctgtcaacatgttgaagtcaatgcatcacgtcaagaagccaaattgacagaggagtgtgatcttctcattgagatcattcagcaaagacgacagattattggaaccaagatcaaagaagggaaggtgatgaggcttcgcaaactggctcagcagattgcaaactgcaaacagtgcattgagcggtcagcatcactcatctcccaagcggaacactctctgaaggagaatgatcatgcgcgtttcctacagactgctaagaatatcaccgagagagtctccatggcaactgcatcctcccaggttctaattcctgaaatcaacctcaatgacacatttgacacctttgccttagatttttcccgagagaagaaactgctagaatgtctggattaccttacagctcccaaccctcccacaattagagaagagctctgcacagcttcatatgacaccatcactgtgcattggacctccgatgatgagttcagcgtggtctcctacgagctccagtacaccatattcaccggacaagccaacgtcgttagtctgtgtaattcggctgatagctggatgatagtacccaacatcaagcagaaccactacacggtgcacggtctgcagagcggcaccaagtacatcttcatggtcaaggccatcaaccaggcgggcagccgcagcagtgagcctgggaagttgaagacaaacagccaaccatttaaactggatcccaaatctgctcatcgaaaactgaaggtgtcccatgataacttgacagtagaacgtgatgagtcatcatccaagaagagtcacacacctgaacgcttcaccagccaggggagctatggagtagctggaaatgtgtttattgatagtggccggcattattgggaagtggtcataagtggaagcacatggtatgccattggtcttgcttacaaatcagccccgaagcatgaatggattgggaagaactctgcttcctgggcgctctgccgctgcaacaataactgggtggtgagacacaatagcaaggaaatccccattgagcctgccccccacctccggcgcgtgggcatcctgctggactatgataacggctctatcgccttttatgatgctttgaactccatccacctctacaccttcgacgtcgcatttgcgcagcctgtttgccccaccttcaccgtgtggaacaagtgtctgacgattatcactgggctccctatcccagaccatttggactgcacagagcagctgccgtgagcgtctggccacatggagctgctttctggggaacagtaaggttcaggccactatttaggggactgagaaagcacaggcttcatgagtgtaatgaaatctcaccagaagtgtcccgaaatcggctcagatagggctcaaaacaagagattcctctccttttactgtgtcttgtattaagtacgggctttaataatttctttaatttttttgtatttagaggaaaatctatagattatttataagagaaacataatcaggattacaacttttaggaattacttggttttgcacattaagaggcccataagtttatcagctatttacaaccttcatttcatcacaatctgtgggcttacaaaaaaacaaaaacttttgtagttttgtatgttactcatcttcttacctgatatcccatgatgatcccatggtaggtcttctcacctcgatggtgcataacaggatgtgtttgaacctagtaggggaggaaacaggctttcttactctggtttaatttgaagtgttttaattgtgatgtcaaaaagttgtatcagatcaactaaaatggagagcaagacagagaatgaaaagagttgattttggacctcggaccttgccgtggctaaatctttaccttctcatagctgatgggataatgttggaaagaaaggttctgaatcctttggccacattttgccctgcttctctcagggttaagggttctggaagaacattaagaatgagattgcaattgaaaatagtcattttgaatcctattgattattcaaaaattcaggctgatttgtcttttatcagaggtaggattctgttttatagtatagaatctactttatccttccttttaatagttcctttagacctgtgaaatttcttcactacatttaatagttctcctatttcccgctcccccatatcaattttccttttgtctccggggctgagtaaataaacatgttctgtcacaaatagcagcaccactttggattgattttgctctccaggacatcagcacatggccctgatcagcactaccacatccaaacataagtcactgaaaaacacttaatatttatgagttggtaatgacaagggacattgtataaagtactatttgctagattcatgcctcaaaagttattataaacagacctttattaaacacatcttgaaagatgtagaagtccctctatagtctagtatagtttacaatagagttgtaagacca

SEQ ID NO: 26071 - DNA, 3334 bp, Homo sapiens
cttcgaaaaagaactagtgtgcagtccattgatagctgatcagcttccttgggttttgctgatgacacaagagagctttgcctgaagatggaaacactggagtcagaactgacctgccctatttgtctggagctctttgaggaccctcttctactgccctgcgcacacagcctctgcttcaactgcgcccaccgcatcctagtatcacactgtgccaccaacgagtctgtggagtccatcaccgccttccagtgccccacctgccggcatgtcatcaccctcagccagcgaggtctagacgggctcaagcgcaacgtcaccctacagaacatcatcgacaggttccagaaagcatcagtgagcgggcccaactctcccagcgagacccgtcgggagcgggcctttgacgccaacaccatgacctccgccgagaaggtcctctgccagttttgtgaccaggatcctgcccaggacgctgtgaagacctgtgtcacttgtgaagtatcctactgtgacgagtgcctgaaagccactcacccgaataagaagccctttacaggccatcgtctgattgagccaattccggactctcacatccgggggctgatgtgcttggagcatgaggatgagaaggtgaatatgtactgtgtgaccgatgaccagttaatctgtgccttgtgtaaactggttgggcggcaccgcgatcatcaggtggcagctttgagtgagcgctatgacaaattgaagcaaaacttagagagtaacctcaccaaccttattaagaggaacacagaactggagacccttttggctaaactcatccaaacctgtcaacatgttgaagtcaatgcatcacgtcaagaagccaaattgacagaggagtgtgatcttctcattgagatcattcagcaaagacgacagattattggaaccaagatcaaagaagggaaggtgatgaggcttcgcaaactggctcagcagattgcaaactgcaaacagtgcattgagcggtcagcatcactcatctcccaagcggaacactctctgaaggagaatgatcatgcgcgtttcctacagactgctaagaatatcaccgagagagtctccatggcaactgcatcctcccaggttctaattcctgaaatcaacctcaatgacacatttgacacctttgccttagatttttcccgagagaagaaactgctagaatgtctggattaccttacagctcccaaccctcccacaattagagaagagctctgcacagcttcatatgacaccatcactgtgcattggacctccgatgatgagttcagcgtggtctcctacgagctccagtacaccatattcaccggacaagccaacgtcgttagtctgtgtaattcggctgatagctggatgatagtacccaacatcaagcagaaccactacacggtgcacggtctgcagagcggcaccaagtacatcttcatggtcaaggccatcaaccaggcgggcagccgcagcagtgagcctgggaagttgaagacaaacagccaaccatttaaactggatcccaaatctgctcatcgaaaactgaaggtgtcccatgataacttgacagtagaacgtgatgagtcatcatccaagaagagtcacacacctgaacgcttcaccagccaggggagctatggagtagctggaaatgtgtttattgatagtggccggcattattgggaagtggtcataagtggaagcacatggtatgccattggtcttgcttacaaatcagccccgaagcatgaatggattgggaagaactctgcttcctgggcgctctgccgctgcaacaataactgggtggtgagacacaatagcaaggaaatccccattgagcctgccccccacctccggcgcgtgggcatcctgctggactatgataacggctctatcgccttttatgatgctttgaactccatccacctctacaccttcgacgtcgcatttgcgcagcctgtttgccccaccttcaccgtgtggaacaagtgtctgacgattatcactgggctccctatcccagaccatttggactgcacagagcagctgccgtgagcgtctggccacatggagctgctttctggggaacagtaaggttcaggccactatttaggggactgagaaagcacaggcttcatgagtgtaatgaaatctcaccagaagtgtcccgaaatcggctcagatagggctcaaaacaagagattcctctccttttactgtgtcttgtattaagtacgggctttaataatttctttaatttttttgtatttagaggaaaatctatagattatttataagagaaacataatcaggattacaacttttaggaattacttggttttgcacattaagaggcccataagtttatcagctatttacaaccttcatttcatcacaatctgtgggcttacaaaaaaacaaaaacttttgtagttttgtatgttactcatcttcttacctgatatcccatgatgatcccatggtaggtcttctcacctcgatggtgcataacaggatgtgtttgaacctagtaggggaggaaacaggctttcttactctggtttaatttgaagtgttttaattgtgatgtcaaaaagttgtatcagatcaactaaaatggagagcaagacagagaatgaaaagagttgattttggacctcggaccttgccgtggctaaatctttaccttctcatagctgatgggataatgttggaaagaaaggttctgaatcctttggccacattttgccctgcttctctcagggttaagggttctggaagaacattaagaatgagattgcaattgaaaatagtcattttgaatcctattgattattcaaaaattcaggctgatttgtcttttatcagaggtaggattctgttttatagtatagaatctactttatccttccttttaatagttcctttagacctgtgaaatttcttcactacatttaatagttctcctatttcccgctcccccatatcaattttccttttgtctccggggctgagtaaataaacatgttctgtcacaaatagcagcaccactttggattgattttgctctccaggacatcagcacatggccctgatcagcactaccacatccaaacataagtcactgaaaaacacttaatatttatgagttggtaatgacaagggacattgtataaagtactatttgctagattcatgcctcaaaagttattataaacagacctttattaaacacatcttgaaagatgtagaagtccctctatagtctagtatagtttacaatagagttgtaagacca

SEQ ID NO: 26072 - DNA, 5966 bp, Homo sapiens
tcgtagaactagggctgcaggaattgcgccgcgtcgacaaacccccatcctgggaaaaatggggaagctgatagctgatcagcttccttgggttttgctgatgacacaagagagctttgcctgaagatggaaacactggagtcagaactgacctgccctatttgtctggagctctttgaggaccctcttctactgccctgcgcacacagcctctgcttcaactgcgcccaccgcatcctagtatcacactgtgccaccaacgagtctgtggagtccatcaccgccttccagtgccccacctgccggcatgtcatcaccctcagccagcgaggtctagacgggctcaagcgcaacgtcaccctacagaacatcatcgacaggttccagaaagcatcagtgagcgggcccaactctcccagcgagacccgtcgggagcgggcctttgacgccaacaccatgacctccgccgagaaggtcctctgccagttttgtgaccaggatcctgcccaggacgctgtgaagacctgtgtcacttgtgaagtatcctactgtgacgagtgcctgaaagccactcacccgaataagaagccctttacaggccatcgtctgattgagccaattccggactctcacatccgggggctgatgtgcttggagcatgaggatgagaaggtgaatatgtactgtgtgaccgatgaccagttaatctgtgccttgtgtaaactggttgggcggcaccgcgatcatcaggtggcagctttgagtgagcgctatgacaaattgaagcaaaacttagagagtaacctcaccaaccttattaagaggaacacagaactggagacccttttggctaaactcatccaaacctgtcaacatgttgaagtcaatgcatcacgtcaagaagccaaattgacagaggagtgtgatcttctcattgagatcattcagcaaagacgacagattattggaaccaagatcaaagaagggaaggtgatgaggcttcgcaaactggctcagcagattgcaaactgcaaacagtgcattgagcggtcagcatcactcatctcccaagcggaacactctctgaaggagaatgatcatgcgcgtttcctacagactgctaagaatatcaccgagagagtctccatggcaactgcatcctcccaggttctaattcctgaaatcaacctcaatgacacatttgacacctttgccttagatttttcccgagagaagaaactgctagaatgtctggattaccttacagctcccaaccctcccacaattagagaagagctctgcacagcttcatatgacaccatcactgtgcattggacctccgatgatgagttcagcgtggtctcctacgagctccagtacaccatattcaccggacaagccaacgtcgttagtctgtgtaattcggctgatagctggatgatagtacccaacatcaagcagaaccactacacggtgcacggtctgcagagcggcaccaagtacatcttcatggtcaaggccatcaaccaggcgggcagccgcagcagtgagcctgggaagttgaagacaaacagccaaccatttaaactggatcccaaatctgctcatcgaaaactgaaggtgtcccatgataacttgacagtagaacgtgatgagtcatcatccaagaagagtcacacacctgaacgcttcaccagccaggggagctatggagtagctggaaatgtgtttattgatagtggccggcattattgggaagtggtcataagtggaagcacatggtatgccattggtcttgcttacaaatcagccccgaagcatgaatggattgggaagaactctgcttcctgggcgctctgccgctgcaacaataactgggtggtgagacacaatagcaaggaaatccccattgagcctgccccccacctccggcgcgtgggcatcctgctggactatgataacggctctatcgccttttatgatgctttgaactccatccacctctacaccttcgacgtcgcatttgcgcagcctgtttgccccaccttcaccgtgtggaacaagtgtctgacgattatcactgggctccctatcccagaccatttggactgcacagagcagctgccgtgagcgtctggccacatggagctgctttctggggaacagtaaggttcaggccactatttaggggactgagaaagcacaggcttcatgagtgtaatgaaatctcaccagaagtgtcccgaaatcggctcagatagggctcaaaacaagagattcctctccttttactgtgtcttgtattaagtacgggctttaataatttctttaatttttttgtatttagaggaaaatctatagattatttataagagaaacataatcaggattacaacttttaggaattacttggttttgcacattaagaggcccataagtttatcagctatttacaaccttcatttcatcacaatctgtgggcttacaaaaaaacaaaaacttttgtagttttgtatgttactcatcttcttacctgatatcccatgatgatcccatggtaggtcttctcacctcgatggtgcataacaggatgtgtttgaacctagtaggggaggaaacaggctttcttactctggtttaatttgaagtgttttaattgtgatgtcaaaaagttgtatcagatcaactaaaatggagagcaagacagagaatgaaaagagttgattttggacctcggaccttgccgtggctaaatctttaccttctcatagctgatgggataatgttggaaagaaaggttctgaatcctttggccacattttgccctgcttctctcagggttaagggttctggaagaacattaagaatgagattgcaattgaaaatagtcattttgaatcctattgattattcaaaaattcaggctgatttgtcttttatcagaggtaggattctgttttatagtatagaatctactttatccttccttttaatagttcctttagacctgtgaaatttcttcactacatttaatagttctcctatttcccgctcccccatatcaattttccttttgtctccggggctgagtaaataaacatgttctgtcacaaatagcagcaccactttggattgattttgctctccaggacatcagcacatggccctgatcagcactaccacatccaaacataagtcactgaaaaacacttaatatttatgagttggtaatgacaagggacattgtataaagtactatttgctagattcatgcctcaaaagttattataaacagacctttattaaacacatcttgaaagatgtagaagtccctctatagtctagtatagtttacaatagagttgtaagaccaaaaaaaaaaaaaaaaaaattcaaactcgttattcaggaacctgcttataaaatgtcagctgggattctttgcatgccaatctgatgcgttggaatggtccatgaattaaggctttcttgagcagttcttggcccagaactctggcattggttctagtttgatgaagggcatgacctctataaatggtttcaattgctaaaatatttacctgggatactgggtcagccattttgactgagcagactagtggatttagacattgtttttagttattttgtttttaaccaaatcaaccaactgcctccctgaaataagtcaatgaactcattgtttcagcatcacgtggccaaaggtcatgtgattgcaaatctggatttcaagggaggccaagccagcttcctgggtccttccatcctcttccctagcagacactctcctttttcttaacagatagattctatatatttactatattatttatacccagatgaatattttgatagatacctaagacaatttcacatctaaaagatggacgcctcaatggaaaaaaaacaatctttctctggaaaccttataggtttttctttttattacaatataaaagcaatgtgtgtttgccttctctgagtaaactgaaagggttgtctcagtaatttttacatacattttgggtaactggataatggatattttaatgcactttgtacactaacaggttctaaataaaagggtctaaaactcagcttctgagtttttaaaatcacggtctccaggtaccaataaatgctacagtttgccttatgatgttaacataaaacacttagtagaaggacaatatttccatgaaaataatgtttttcaatattaagaagttactactcaaattttcacagtaagccatttagggtatgtttggctatttttataaggacatgagagattatgtcataattttgttgtggaagtctcactcttggctaacttaaaagcattgtggatagtagcagttactagttccaggttgtcatatttacaggaaaatatgtatatggtgaaaggccaccgtgtttaattactataatgatgtagaaaagattcccgtgtgaattttttttttgaaagtctaaaaaatgtatgctgtaaaaatttgctgcagtgtaattttgcattctctttaaactgattgaggtcacagtattttattatttggggtcctcaccacaggaaacactgcgatacaggggcaaaagagatggcagtgccaatttaaattaatacaacaaaatcaatgcagcaccaaccaagactgccaggtctggtgtcatgggtatgcccagagcccaggagttcagaagggccctaagcctgatttaatgctctgctgttgatgtcttgaaattcttaacaatttttgaacaaggggcctgcgttttcacttcgcactgggccttgcaaattacatagcgagtgctcataaaagaactcagaaacgtggtacctctcttcctggtggatacaaataaagaaatctggatccaaagttgaaagttgctggcgatatcattcaagtaggactctaaatagtggattaagatgagggtgggcctgggtgaagattctttccagctttaaaagaaagtgacttcaaaaactgactgcaaatattgacgatggtttctgctggaggaaaagaaacagcttgaatacagacaggcttttttattacggtactgatatattgaccttaaacttgctgaggaactgaactaacgtcctccagtgaccgtggaattccatctcagctccaggaacatgcagatacctgcaaagagacacgcatatatgctggcatacatgtgcatttggtgttgggaagttgaccatctggtctatcttaataaaatggtaaaaagcacaccaagacaatgatgggggcaggaggatgtttttgaaaacagcgcttctcaaccagtgctcgattttgccccccaggagacatttggcaatgcaatggcaacttttggttgtcgcagccggggaagggaagctaccagcatctagtgcgtagaggtcatggacgccgttaaacatcctacagtgcaagcgcagcccccgaccacgaagagttgtcttgctcaaatatcaacagtgctgcagtgtagaaacttgatcgttggttttcttttaatgcaaaactctcataaaaacctttcacttttcctgtcattgattatatgcttgatacacccaaaaagaaaaggggaggggcaccaattcacctacactccagtggctccatcacctttaaaaatatttataaaatagttccaaaaatctgatatctgaaaagcaatccaagcctgtgtaaatgggaatcactgataagtatcatcatctgtatcagcttggcttggacatgaaaaattgattctctttatgtcactccttgcacctggacaaattcaatccccggtacttaagtcacactgccaagccctcggccctgactattgtcttgattgctgttcctttctggttcaaaataaaatcatttttgtggcaccaagaaaaaaaaaaaaaaaaaaaaaca

SEQ ID NO: 26073 - DNA, 3599 bp, Homo sapiens
gagaactgatttgaaataagagccaggcggtcctcgcttccctgcgaccgacttttcataggctgggggagaaaaggttgagaaacttgacattgtctcgagcagagtgcgtgtagcaacagatcaaagaaaaagaggacgaaaacgtgctctttgctgcccgtagatttcgccgggttgcttttgtcttgcgggctcctgtcgggttcggtgtttccgctctgaagactgcgacgcgggctccgatgcagctcgctccctgccggatgggtcatgggattctaaacatgaggcagatagctgatcagcttccttgggttttgctgatgacacaagagagctttgcctgaagatggaaacactggagtcagaactgacctgccctatttgtctggagctctttgaggaccctcttctactgccctgcgcacacagcctctgcttcaactgcgcccaccgcatcctagtatcacactgtgccaccaacgagtctgtggagtccatcaccgccttccagtgccccacctgccggcatgtcatcaccctcagccagcgaggtctagacgggctcaagcgcaacgtcaccctacagaacatcatcgacaggttccagaaagcatcagtgagcgggcccaactctcccagcgagacccgtcgggagcgggcctttgacgccaacaccatgacctccgccgagaaggtcctctgccagttttgtgaccaggatcctgcccaggacgctgtgaagacctgtgtcacttgtgaagtatcctactgtgacgagtgcctgaaagccactcacccgaataagaagccctttacaggccatcgtctgattgagccaattccggactctcacatccgggggctgatgtgcttggagcatgaggatgagaaggtgaatatgtactgtgtgaccgatgaccagttaatctgtgccttgtgtaaactggttgggcggcaccgcgatcatcaggtggcagctttgagtgagcgctatgacaaattgaagcaaaacttagagagtaacctcaccaaccttattaagaggaacacagaactggagacccttttggctaaactcatccaaacctgtcaacatgttgaagtcaatgcatcacgtcaagaagccaaattgacagaggagtgtgatcttctcattgagatcattcagcaaagacgacagattattggaaccaagatcaaagaagggaaggtgatgaggcttcgcaaactggctcagcagattgcaaactgcaaacagtgcattgagcggtcagcatcactcatctcccaagcggaacactctctgaaggagaatgatcatgcgcgtttcctacagactgctaagaatatcaccgagagagtctccatggcaactgcatcctcccaggttctaattcctgaaatcaacctcaatgacacatttgacacctttgccttagatttttcccgagagaagaaactgctagaatgtctggattaccttacagctcccaaccctcccacaattagagaagagctctgcacagcttcatatgacaccatcactgtgcattggacctccgatgatgagttcagcgtggtctcctacgagctccagtacaccatattcaccggacaagccaacgtcgttagtctgtgtaattcggctgatagctggatgatagtacccaacatcaagcagaaccactacacggtgcacggtctgcagagcggcaccaagtacatcttcatggtcaaggccatcaaccaggcgggcagccgcagcagtgagcctgggaagttgaagacaaacagccaaccatttaaactggatcccaaatctgctcatcgaaaactgaaggtgtcccatgataacttgacagtagaacgtgatgagtcatcatccaagaagagtcacacacctgaacgcttcaccagccaggggagctatggagtagctggaaatgtgtttattgatagtggccggcattattgggaagtggtcataagtggaagcacatggtatgccattggtcttgcttacaaatcagccccgaagcatgaatggattgggaagaactctgcttcctgggcgctctgccgctgcaacaataactgggtggtgagacacaatagcaaggaaatccccattgagcctgccccccacctccggcgcgtgggcatcctgctggactatgataacggctctatcgccttttatgatgctttgaactccatccacctctacaccttcgacgtcgcatttgcgcagcctgtttgccccaccttcaccgtgtggaacaagtgtctgacgattatcactgggctccctatcccagaccatttggactgcacagagcagctgccgtgagcgtctggccacatggagctgctttctggggaacagtaaggttcaggccactatttaggggactgagaaagcacaggcttcatgagtgtaatgaaatctcaccagaagtgtcccgaaatcggctcagatagggctcaaaacaagagattcctctccttttactgtgtcttgtattaagtacgggctttaataatttctttaatttttttgtatttagaggaaaatctatagattatttataagagaaacataatcaggattacaacttttaggaattacttggttttgcacattaagaggcccataagtttatcagctatttacaaccttcatttcatcacaatctgtgggcttacaaaaaaacaaaaacttttgtagttttgtatgttactcatcttcttacctgatatcccatgatgatcccatggtaggtcttctcacctcgatggtgcataacaggatgtgtttgaacctagtaggggaggaaacaggctttcttactctggtttaatttgaagtgttttaattgtgatgtcaaaaagttgtatcagatcaactaaaatggagagcaagacagagaatgaaaagagttgattttggacctcggaccttgccgtggctaaatctttaccttctcatagctgatgggataatgttggaaagaaaggttctgaatcctttggccacattttgccctgcttctctcagggttaagggttctggaagaacattaagaatgagattgcaattgaaaatagtcattttgaatcctattgattattcaaaaattcaggctgatttgtcttttatcagaggtaggattctgttttatagtatagaatctactttatccttccttttaatagttcctttagacctgtgaaatttcttcactacatttaatagttctcctatttcccgctcccccatatcaattttccttttgtctccggggctgagtaaataaacatgttctgtcacaaatagcagcaccactttggattgattttgctctccaggacatcagcacatggccctgatcagcactaccacatccaaacataagtcactgaaaaacacttaatatttatgagttggtaatgacaagggacattgtataaagtactatttgctagattcatgcctcaaaagttattataaacagacctttattaaacacatcttgaaagatgtagaagtccctctatagtctagtatagtttacaatagagttgtaagacca

SEQ ID NO: 26074 - DNA, 6019 bp, Homo sapiens
ctttttttggccgggccgcatgaatccggccagcccagcctgcttgaaggacctacaggtttgtctcttccagatcagaactgaggaacaaaaacccccatcctgggaaaaatggggaagctgatagctgatcagcttccttgggttttgctgatgacacaagagagctttgcctgaagatggaaacactggagtcagaactgacctgccctatttgtctggagctctttgaggaccctcttctactgccctgcgcacacagcctctgcttcaactgcgcccaccgcatcctagtatcacactgtgccaccaacgagtctgtggagtccatcaccgccttccagtgccccacctgccggcatgtcatcaccctcagccagcgaggtctagacgggctcaagcgcaacgtcaccctacagaacatcatcgacaggttccagaaagcatcagtgagcgggcccaactctcccagcgagacccgtcgggagcgggcctttgacgccaacaccatgacctccgccgagaaggtcctctgccagttttgtgaccaggatcctgcccaggacgctgtgaagacctgtgtcacttgtgaagtatcctactgtgacgagtgcctgaaagccactcacccgaataagaagccctttacaggccatcgtctgattgagccaattccggactctcacatccgggggctgatgtgcttggagcatgaggatgagaaggtgaatatgtactgtgtgaccgatgaccagttaatctgtgccttgtgtaaactggttgggcggcaccgcgatcatcaggtggcagctttgagtgagcgctatgacaaattgaagcaaaacttagagagtaacctcaccaaccttattaagaggaacacagaactggagacccttttggctaaactcatccaaacctgtcaacatgttgaagtcaatgcatcacgtcaagaagccaaattgacagaggagtgtgatcttctcattgagatcattcagcaaagacgacagattattggaaccaagatcaaagaagggaaggtgatgaggcttcgcaaactggctcagcagattgcaaactgcaaacagtgcattgagcggtcagcatcactcatctcccaagcggaacactctctgaaggagaatgatcatgcgcgtttcctacagactgctaagaatatcaccgagagagtctccatggcaactgcatcctcccaggttctaattcctgaaatcaacctcaatgacacatttgacacctttgccttagatttttcccgagagaagaaactgctagaatgtctggattaccttacagctcccaaccctcccacaattagagaagagctctgcacagcttcatatgacaccatcactgtgcattggacctccgatgatgagttcagcgtggtctcctacgagctccagtacaccatattcaccggacaagccaacgtcgttagtctgtgtaattcggctgatagctggatgatagtacccaacatcaagcagaaccactacacggtgcacggtctgcagagcggcaccaagtacatcttcatggtcaaggccatcaaccaggcgggcagccgcagcagtgagcctgggaagttgaagacaaacagccaaccatttaaactggatcccaaatctgctcatcgaaaactgaaggtgtcccatgataacttgacagtagaacgtgatgagtcatcatccaagaagagtcacacacctgaacgcttcaccagccaggggagctatggagtagctggaaatgtgtttattgatagtggccggcattattgggaagtggtcataagtggaagcacatggtatgccattggtcttgcttacaaatcagccccgaagcatgaatggattgggaagaactctgcttcctgggcgctctgccgctgcaacaataactgggtggtgagacacaatagcaaggaaatccccattgagcctgccccccacctccggcgcgtgggcatcctgctggactatgataacggctctatcgccttttatgatgctttgaactccatccacctctacaccttcgacgtcgcatttgcgcagcctgtttgccccaccttcaccgtgtggaacaagtgtctgacgattatcactgggctccctatcccagaccatttggactgcacagagcagctgccgtgagcgtctggccacatggagctgctttctggggaacagtaaggttcaggccactatttaggggactgagaaagcacaggcttcatgagtgtaatgaaatctcaccagaagtgtcccgaaatcggctcagatagggctcaaaacaagagattcctctccttttactgtgtcttgtattaagtacgggctttaataatttctttaatttttttgtatttagaggaaaatctatagattatttataagagaaacataatcaggattacaacttttaggaattacttggttttgcacattaagaggcccataagtttatcagctatttacaaccttcatttcatcacaatctgtgggcttacaaaaaaacaaaaacttttgtagttttgtatgttactcatcttcttacctgatatcccatgatgatcccatggtaggtcttctcacctcgatggtgcataacaggatgtgtttgaacctagtaggggaggaaacaggctttcttactctggtttaatttgaagtgttttaattgtgatgtcaaaaagttgtatcagatcaactaaaatggagagcaagacagagaatgaaaagagttgattttggacctcggaccttgccgtggctaaatctttaccttctcatagctgatgggataatgttggaaagaaaggttctgaatcctttggccacattttgccctgcttctctcagggttaagggttctggaagaacattaagaatgagattgcaattgaaaatagtcattttgaatcctattgattattcaaaaattcaggctgatttgtcttttatcagaggtaggattctgttttatagtatagaatctactttatccttccttttaatagttcctttagacctgtgaaatttcttcactacatttaatagttctcctatttcccgctcccccatatcaattttccttttgtctccggggctgagtaaataaacatgttctgtcacaaatagcagcaccactttggattgattttgctctccaggacatcagcacatggccctgatcagcactaccacatccaaacataagtcactgaaaaacacttaatatttatgagttggtaatgacaagggacattgtataaagtactatttgctagattcatgcctcaaaagttattataaacagacctttattaaacacatcttgaaagatgtagaagtccctctatagtctagtatagtttacaatagagttgtaagaccaaaaaaaaaaaaaaaaaaattcaaactcgttattcaggaacctgcttataaaatgtcagctgggattctttgcatgccaatctgatgcgttggaatggtccatgaattaaggctttcttgagcagttcttggcccagaactctggcattggttctagtttgatgaagggcatgacctctataaatggtttcaattgctaaaatatttacctgggatactgggtcagccattttgactgagcagactagtggatttagacattgtttttagttattttgtttttaaccaaatcaaccaactgcctccctgaaataagtcaatgaactcattgtttcagcatcacgtggccaaaggtcatgtgattgcaaatctggatttcaagggaggccaagccagcttcctgggtccttccatcctcttccctagcagacactctcctttttcttaacagatagattctatatatttactatattatttatacccagatgaatattttgatagatacctaagacaatttcacatctaaaagatggacgcctcaatggaaaaaaaacaatctttctctggaaaccttataggtttttctttttattacaatataaaagcaatgtgtgtttgccttctctgagtaaactgaaagggttgtctcagtaatttttacatacattttgggtaactggataatggatattttaatgcactttgtacactaacaggttctaaataaaagggtctaaaactcagcttctgagtttttaaaatcacggtctccaggtaccaataaatgctacagtttgccttatgatgttaacataaaacacttagtagaaggacaatatttccatgaaaataatgtttttcaatattaagaagttactactcaaattttcacagtaagccatttagggtatgtttggctatttttataaggacatgagagattatgtcataattttgttgtggaagtctcactcttggctaacttaaaagcattgtggatagtagcagttactagttccaggttgtcatatttacaggaaaatatgtatatggtgaaaggccaccgtgtttaattactataatgatgtagaaaagattcccgtgtgaattttttttttgaaagtctaaaaaatgtatgctgtaaaaatttgctgcagtgtaattttgcattctctttaaactgattgaggtcacagtattttattatttggggtcctcaccacaggaaacactgcgatacaggggcaaaagagatggcagtgccaatttaaattaatacaacaaaatcaatgcagcaccaaccaagactgccaggtctggtgtcatgggtatgcccagagcccaggagttcagaagggccctaagcctgatttaatgctctgctgttgatgtcttgaaattcttaacaatttttgaacaaggggcctgcgttttcacttcgcactgggccttgcaaattacatagcgagtgctcataaaagaactcagaaacgtggtacctctcttcctggtggatacaaataaagaaatctggatccaaagttgaaagttgctggcgatatcattcaagtaggactctaaatagtggattaagatgagggtgggcctgggtgaagattctttccagctttaaaagaaagtgacttcaaaaactgactgcaaatattgacgatggtttctgctggaggaaaagaaacagcttgaatacagacaggcttttttattacggtactgatatattgaccttaaacttgctgaggaactgaactaacgtcctccagtgaccgtggaattccatctcagctccaggaacatgcagatacctgcaaagagacacgcatatatgctggcatacatgtgcatttggtgttgggaagttgaccatctggtctatcttaataaaatggtaaaaagcacaccaagacaatgatgggggcaggaggatgtttttgaaaacagcgcttctcaaccagtgctcgattttgccccccaggagacatttggcaatgcaatggcaacttttggttgtcgcagccggggaagggaagctaccagcatctagtgcgtagaggtcatggacgccgttaaacatcctacagtgcaagcgcagcccccgaccacgaagagttgtcttgctcaaatatcaacagtgctgcagtgtagaaacttgatcgttggttttcttttaatgcaaaactctcataaaaacctttcacttttcctgtcattgattatatgcttgatacacccaaaaagaaaaggggaggggcaccaattcacctacactccagtggctccatcacctttaaaaatatttataaaatagttccaaaaatctgatatctgaaaagcaatccaagcctgtgtaaatgggaatcactgataagtatcatcatctgtatcagcttggcttggacatgaaaaattgattctctttatgtcactccttgcacctggacaaattcaatccccggtacttaagtcacactgccaagccctcggccctgactattgtcttgattgctgttcctttctggttcaaaataaaatcatttttgtggcaccaagaaaaaaaaaaaaaaaaaaaaaca

SEQ ID NO: 26075 - DNA, 6132 bp, Homo sapiens
gagaactgatttgaaataagagccaggcggtcctcgcttccctgcgaccgacttttcataggctgggggagaaaaggttgagaaacttgacattgtctcgagcagagtgcgtgtagcaacagatcaaagaaagggctcctgtcgggttcggtgtttccgctctgaagactgcgacgcgggctccgatgcagctcgctccctgccggatgggtcatgggattctaaacatgaggcagatagctgatcagcttccttgggttttgctgatgacacaagagagctttgcctgaagatggaaacactggagtcagaactgacctgccctatttgtctggagctctttgaggaccctcttctactgccctgcgcacacagcctctgcttcaactgcgcccaccgcatcctagtatcacactgtgccaccaacgagtctgtggagtccatcaccgccttccagtgccccacctgccggcatgtcatcaccctcagccagcgaggtctagacgggctcaagcgcaacgtcaccctacagaacatcatcgacaggttccagaaagcatcagtgagcgggcccaactctcccagcgagacccgtcgggagcgggcctttgacgccaacaccatgacctccgccgagaaggtcctctgccagttttgtgaccaggatcctgcccaggacgctgtgaagacctgtgtcacttgtgaagtatcctactgtgacgagtgcctgaaagccactcacccgaataagaagccctttacaggccatcgtctgattgagccaattccggactctcacatccgggggctgatgtgcttggagcatgaggatgagaaggtgaatatgtactgtgtgaccgatgaccagttaatctgtgccttgtgtaaactggttgggcggcaccgcgatcatcaggtggcagctttgagtgagcgctatgacaaattgaagcaaaacttagagagtaacctcaccaaccttattaagaggaacacagaactggagacccttttggctaaactcatccaaacctgtcaacatgttgaagtcaatgcatcacgtcaagaagccaaattgacagaggagtgtgatcttctcattgagatcattcagcaaagacgacagattattggaaccaagatcaaagaagggaaggtgatgaggcttcgcaaactggctcagcagattgcaaactgcaaacagtgcattgagcggtcagcatcactcatctcccaagcggaacactctctgaaggagaatgatcatgcgcgtttcctacagactgctaagaatatcaccgagagagtctccatggcaactgcatcctcccaggttctaattcctgaaatcaacctcaatgacacatttgacacctttgccttagatttttcccgagagaagaaactgctagaatgtctggattaccttacagctcccaaccctcccacaattagagaagagctctgcacagcttcatatgacaccatcactgtgcattggacctccgatgatgagttcagcgtggtctcctacgagctccagtacaccatattcaccggacaagccaacgtcgttagtctgtgtaattcggctgatagctggatgatagtacccaacatcaagcagaaccactacacggtgcacggtctgcagagcggcaccaagtacatcttcatggtcaaggccatcaaccaggcgggcagccgcagcagtgagcctgggaagttgaagacaaacagccaaccatttaaactggatcccaaatctgctcatcgaaaactgaaggtgtcccatgataacttgacagtagaacgtgatgagtcatcatccaagaagagtcacacacctgaacgcttcaccagccaggggagctatggagtagctggaaatgtgtttattgatagtggccggcattattgggaagtggtcataagtggaagcacatggtatgccattggtcttgcttacaaatcagccccgaagcatgaatggattgggaagaactctgcttcctgggcgctctgccgctgcaacaataactgggtggtgagacacaatagcaaggaaatccccattgagcctgccccccacctccggcgcgtgggcatcctgctggactatgataacggctctatcgccttttatgatgctttgaactccatccacctctacaccttcgacgtcgcatttgcgcagcctgtttgccccaccttcaccgtgtggaacaagtgtctgacgattatcactgggctccctatcccagaccatttggactgcacagagcagctgccgtgagcgtctggccacatggagctgctttctggggaacagtaaggttcaggccactatttaggggactgagaaagcacaggcttcatgagtgtaatgaaatctcaccagaagtgtcccgaaatcggctcagatagggctcaaaacaagagattcctctccttttactgtgtcttgtattaagtacgggctttaataatttctttaatttttttgtatttagaggaaaatctatagattatttataagagaaacataatcaggattacaacttttaggaattacttggttttgcacattaagaggcccataagtttatcagctatttacaaccttcatttcatcacaatctgtgggcttacaaaaaaacaaaaacttttgtagttttgtatgttactcatcttcttacctgatatcccatgatgatcccatggtaggtcttctcacctcgatggtgcataacaggatgtgtttgaacctagtaggggaggaaacaggctttcttactctggtttaatttgaagtgttttaattgtgatgtcaaaaagttgtatcagatcaactaaaatggagagcaagacagagaatgaaaagagttgattttggacctcggaccttgccgtggctaaatctttaccttctcatagctgatgggataatgttggaaagaaaggttctgaatcctttggccacattttgccctgcttctctcagggttaagggttctggaagaacattaagaatgagattgcaattgaaaatagtcattttgaatcctattgattattcaaaaattcaggctgatttgtcttttatcagaggtaggattctgttttatagtatagaatctactttatccttccttttaatagttcctttagacctgtgaaatttcttcactacatttaatagttctcctatttcccgctcccccatatcaattttccttttgtctccggggctgagtaaataaacatgttctgtcacaaatagcagcaccactttggattgattttgctctccaggacatcagcacatggccctgatcagcactaccacatccaaacataagtcactgaaaaacacttaatatttatgagttggtaatgacaagggacattgtataaagtactatttgctagattcatgcctcaaaagttattataaacagacctttattaaacacatcttgaaagatgtagaagtccctctatagtctagtatagtttacaatagagttgtaagaccaaaaaaaaaaaaaaaaaaattcaaactcgttattcaggaacctgcttataaaatgtcagctgggattctttgcatgccaatctgatgcgttggaatggtccatgaattaaggctttcttgagcagttcttggcccagaactctggcattggttctagtttgatgaagggcatgacctctataaatggtttcaattgctaaaatatttacctgggatactgggtcagccattttgactgagcagactagtggatttagacattgtttttagttattttgtttttaaccaaatcaaccaactgcctccctgaaataagtcaatgaactcattgtttcagcatcacgtggccaaaggtcatgtgattgcaaatctggatttcaagggaggccaagccagcttcctgggtccttccatcctcttccctagcagacactctcctttttcttaacagatagattctatatatttactatattatttatacccagatgaatattttgatagatacctaagacaatttcacatctaaaagatggacgcctcaatggaaaaaaaacaatctttctctggaaaccttataggtttttctttttattacaatataaaagcaatgtgtgtttgccttctctgagtaaactgaaagggttgtctcagtaatttttacatacattttgggtaactggataatggatattttaatgcactttgtacactaacaggttctaaataaaagggtctaaaactcagcttctgagtttttaaaatcacggtctccaggtaccaataaatgctacagtttgccttatgatgttaacataaaacacttagtagaaggacaatatttccatgaaaataatgtttttcaatattaagaagttactactcaaattttcacagtaagccatttagggtatgtttggctatttttataaggacatgagagattatgtcataattttgttgtggaagtctcactcttggctaacttaaaagcattgtggatagtagcagttactagttccaggttgtcatatttacaggaaaatatgtatatggtgaaaggccaccgtgtttaattactataatgatgtagaaaagattcccgtgtgaattttttttttgaaagtctaaaaaatgtatgctgtaaaaatttgctgcagtgtaattttgcattctctttaaactgattgaggtcacagtattttattatttggggtcctcaccacaggaaacactgcgatacaggggcaaaagagatggcagtgccaatttaaattaatacaacaaaatcaatgcagcaccaaccaagactgccaggtctggtgtcatgggtatgcccagagcccaggagttcagaagggccctaagcctgatttaatgctctgctgttgatgtcttgaaattcttaacaatttttgaacaaggggcctgcgttttcacttcgcactgggccttgcaaattacatagcgagtgctcataaaagaactcagaaacgtggtacctctcttcctggtggatacaaataaagaaatctggatccaaagttgaaagttgctggcgatatcattcaagtaggactctaaatagtggattaagatgagggtgggcctgggtgaagattctttccagctttaaaagaaagtgacttcaaaaactgactgcaaatattgacgatggtttctgctggaggaaaagaaacagcttgaatacagacaggcttttttattacggtactgatatattgaccttaaacttgctgaggaactgaactaacgtcctccagtgaccgtggaattccatctcagctccaggaacatgcagatacctgcaaagagacacgcatatatgctggcatacatgtgcatttggtgttgggaagttgaccatctggtctatcttaataaaatggtaaaaagcacaccaagacaatgatgggggcaggaggatgtttttgaaaacagcgcttctcaaccagtgctcgattttgccccccaggagacatttggcaatgcaatggcaacttttggttgtcgcagccggggaagggaagctaccagcatctagtgcgtagaggtcatggacgccgttaaacatcctacagtgcaagcgcagcccccgaccacgaagagttgtcttgctcaaatatcaacagtgctgcagtgtagaaacttgatcgttggttttcttttaatgcaaaactctcataaaaacctttcacttttcctgtcattgattatatgcttgatacacccaaaaagaaaaggggaggggcaccaattcacctacactccagtggctccatcacctttaaaaatatttataaaatagttccaaaaatctgatatctgaaaagcaatccaagcctgtgtaaatgggaatcactgataagtatcatcatctgtatcagcttggcttggacatgaaaaattgattctctttatgtcactccttgcacctggacaaattcaatccccggtacttaagtcacactgccaagccctcggccctgactattgtcttgattgctgttcctttctggttcaaaataaaatcatttttgtggcaccaagaaaaaaaaaaaaaaaaaaaaaca

SEQ ID NO: 26076 - DNA, 6066 bp, Homo sapiens
  misc_feature (1)..(2): n is a, c, g, or t
nnctgaagtgttagtatgtagtggagctggtggtgtgaagctgattcattttgtttcaaagccccaaatggcatgctgccgaacacaggcacaagcacagcagcgtctccttagaaataatgactccaaggcaaacagccctcattgcaaaatgtagaagactgccatctgcttgtctccactgtggtttattcgtttcagggttttaaatgacgtaataaaaagatagctgatcagcttccttgggttttgctgatgacacaagagagctttgcctgaagatggaaacactggagtcagaactgacctgccctatttgtctggagctctttgaggaccctcttctactgccctgcgcacacagcctctgcttcaactgcgcccaccgcatcctagtatcacactgtgccaccaacgagtctgtggagtccatcaccgccttccagtgccccacctgccggcatgtcatcaccctcagccagcgaggtctagacgggctcaagcgcaacgtcaccctacagaacatcatcgacaggttccagaaagcatcagtgagcgggcccaactctcccagcgagacccgtcgggagcgggcctttgacgccaacaccatgacctccgccgagaaggtcctctgccagttttgtgaccaggatcctgcccaggacgctgtgaagacctgtgtcacttgtgaagtatcctactgtgacgagtgcctgaaagccactcacccgaataagaagccctttacaggccatcgtctgattgagccaattccggactctcacatccgggggctgatgtgcttggagcatgaggatgagaaggtgaatatgtactgtgtgaccgatgaccagttaatctgtgccttgtgtaaactggttgggcggcaccgcgatcatcaggtggcagctttgagtgagcgctatgacaaattgaagcaaaacttagagagtaacctcaccaaccttattaagaggaacacagaactggagacccttttggctaaactcatccaaacctgtcaacatgttgaagtcaatgcatcacgtcaagaagccaaattgacagaggagtgtgatcttctcattgagatcattcagcaaagacgacagattattggaaccaagatcaaagaagggaaggtgatgaggcttcgcaaactggctcagcagattgcaaactgcaaacagtgcattgagcggtcagcatcactcatctcccaagcggaacactctctgaaggagaatgatcatgcgcgtttcctacagactgctaagaatatcaccgagagagtctccatggcaactgcatcctcccaggttctaattcctgaaatcaacctcaatgacacatttgacacctttgccttagatttttcccgagagaagaaactgctagaatgtctggattaccttacagctcccaaccctcccacaattagagaagagctctgcacagcttcatatgacaccatcactgtgcattggacctccgatgatgagttcagcgtggtctcctacgagctccagtacaccatattcaccggacaagccaacgtcgttagtctgtgtaattcggctgatagctggatgatagtacccaacatcaagcagaaccactacacggtgcacggtctgcagagcggcaccaagtacatcttcatggtcaaggccatcaaccaggcgggcagccgcagcagtgagcctgggaagttgaagacaaacagccaaccatttaaactggatcccaaatctgctcatcgaaaactgaaggtgtcccatgataacttgacagtagaacgtgatgagtcatcatccaagaagagtcacacacctgaacgcttcaccagccaggggagctatggagtagctggaaatgtgtttattgatagtggccggcattattgggaagtggtcataagtggaagcacatggtatgccattggtcttgcttacaaatcagccccgaagcatgaatggattgggaagaactctgcttcctgggcgctctgccgctgcaacaataactgggtggtgagacacaatagcaaggaaatccccattgagcctgccccccacctccggcgcgtgggcatcctgctggactatgataacggctctatcgccttttatgatgctttgaactccatccacctctacaccttcgacgtcgcatttgcgcagcctgtttgccccaccttcaccgtgtggaacaagtgtctgacgattatcactgggctccctatcccagaccatttggactgcacagagcagctgccgtgagcgtctggccacatggagctgctttctggggaacagtaaggttcaggccactatttaggggactgagaaagcacaggcttcatgagtgtaatgaaatctcaccagaagtgtcccgaaatcggctcagatagggctcaaaacaagagattcctctccttttactgtgtcttgtattaagtacgggctttaataatttctttaatttttttgtatttagaggaaaatctatagattatttataagagaaacataatcaggattacaacttttaggaattacttggttttgcacattaagaggcccataagtttatcagctatttacaaccttcatttcatcacaatctgtgggcttacacatgatgatcccatggtaggtcttctcacctcgatggtgcataacaggatgtgtttgaacctagtaggggaggaaacaggctttcttactctggtttaatttgaagtgttttaattgtgatgtcaaaaagttgtatcagatcaactaaaatggagagcaagacagagaatgaaaagagttgattttggacctcggaccttgccgtggctaaatctttaccttctcatagctgatgggataatgttggaaagaaaggttctgaatcctttggccacattttgccctgcttctctcagggttaagggttctggaagaacattaagaatgagattgcaattgaaaatagtcattttgaatcctattgattattcaaaaattcaggctgatttgtcttttatcagaggtaggattctgttttatagtatagaatctactttatccttccttttaatagttcctttagacctgtgaaatttcttcactacatttaatagttctcctatttcccgctcccccatatcaattttccttttgtctccggggctgagtaaataaacatgttctgtcacaaatagcagcaccactttggattgattttgctctccaggacatcagcacatggccctgatcagcactaccacatccaaacataagtcactgaaaaacacttaatatttatgagttggtaatgacaagggacattgtataaagtactatttgctagattcatgcctcaaaagttattataaacagacctttattaaacacatcttgaaagatgtagaagtccctctatagtctagtatagtttacaatagagttgtaagaccaaaaaaaaaaaaaaaaaaattcaaactcgttattcaggaacctgcttataaaatgtcagctgggattctttgcatgccaatctgatgcgttggaatggtccatgaattaaggctttcttgagcagttcttggcccagaactctggcattggttctagtttgatgaagggcatgacctctataaatggtttcaattgctaaaatatttacctgggatactgggtcagccattttgactgagcagactagtggatttagacattgtttttagttattttgtttttaaccaaatcaaccaactgcctccctgaaataagtcaatgaactcattgtttcagcatcacgtggccaaaggtcatgtgattgcaaatctggatttcaagggaggccaagccagcttcctgggtccttccatcctcttccctagcagacactctcctttttcttaacagatagattctatatatttactatattatttatacccagatgaatattttgatagatacctaagacaatttcacatctaaaagatggacgcctcaatggaaaaaaaacaatctttctctggaaaccttataggtttttctttttattacaatataaaagcaatgtgtgtttgccttctctgagtaaactgaaagggttgtctcagtaatttttacatacattttgggtaactggataatggatattttaatgcactttgtacactaacaggttctaaataaaagggtctaaaactcagcttctgagtttttaaaatcacggtctccaggtaccaataaatgctacagtttgccttatgatgttaacataaaacacttagtagaaggacaatatttccatgaaaataatgtttttcaatattaagaagttactactcaaattttcacagtaagccatttagggtatgtttggctatttttataaggacatgagagattatgtcataattttgttgtggaagtctcactcttggctaacttaaaagcattgtggatagtagcagttactagttccaggttgtcatatttacaggaaaatatgtatatggtgaaaggccaccgtgtttaattactataatgatgtagaaaagattcccgtgtgaattttttttttgaaagtctaaaaaatgtatgctgtaaaaatttgctgcagtgtaattttgcattctctttaaactgattgaggtcacagtattttattatttggggtcctcaccacaggaaacactgcgatacaggggcaaaagagatggcagtgccaatttaaattaatacaacaaaatcaatgcagcaccaaccaagactgccaggtctggtgtcatgggtatgcccagagcccaggagttcagaagggccctaagcctgatttaatgctctgctgttgatgtcttgaaattcttaacaatttttgaacaaggggcctgcgttttcacttcgcactgggccttgcaaattacatagcgagtgctcataaaagaactcagaaacgtggtacctctcttcctggtggatacaaataaagaaatctggatccaaagttgaaagttgctggcgatatcattcaagtaggactctaaatagtggattaagatgagggtgggcctgggtgaagattctttccagctttaaaagaaagtgacttcaaaaactgactgcaaatattgacgatggtttctgctggaggaaaagaaacagcttgaatacagacaggcttttttattacggtactgatatattgaccttaaacttgctgaggaactgaactaacgtcctccagtgaccgtggaattccatctcagctccaggaacatgcagatacctgcaaagagacacgcatatatgctggcatacatgtgcatttggtgttgggaagttgaccatctggtctatcttaataaaatggtaaaaagcacaccaagacaatgatgggggcaggaggatgtttttgaaaacagcgcttctcaaccagtgctcgattttgccccccaggagacatttggcaatgcaatggcaacttttggttgtcgcagccggggaagggaagctaccagcatctagtgcgtagaggtcatggacgccgttaaacatcctacagtgcaagcgcagcccccgaccacgaagagttgtcttgctcaaatatcaacagtgctgcagtgtagaaacttgatcgttggttttcttttaatgcaaaactctcataaaaacctttcacttttcctgtcattgattatatgcttgatacacccaaaaagaaaaggggaggggcaccaattcacctacactccagtggctccatcacctttaaaaatatttataaaatagttccaaaaatctgatatctgaaaagcaatccaagcctgtgtaaatgggaatcactgataagtatcatcatctgtatcagcttggcttggacatgaaaaattgattctctttatgtcactccttgcacctggacaaattcaatccccggtacttaagtcacactgccaagccctcggccctgactattgtcttgattgctgttcctttctggttcaaaataaaatcatttttgtggcaccaagaaaaaaaaaaaaaaaaaaaaaca

SEQ ID NO: 26077 - DNA, 6078 bp, Homo sapiens
gagaactgatttgaaataagagccaggcggtcctcgcttccctgcgaccgacttttcataggctgggggagaaaaggttgagaaacttgacattgtctcgagcagagtgcgtgtagcaacagatcaaagaaaaagaggacgaaaacgtgctctttgctgcccgtagatttcgccgggttgcttttgtcttgcgggctcctgtcgggttcggtgtttccgctctgaagactgcgacgcgggctccgatgcagctcgctccctgccggatgggtcatgggattctaaacatgaggcagatagctgatcagcttccttgggttttgctgatgacacaagagagctttgcctgaagatggaaacactggagtcagaactgacctgccctatttgtctggagctctttgaggaccctcttctactgccctgcgcacacagcctctgcttcaactgcgcccaccgcatcctagtatcacactgtgccaccaacgagtctgtggagtccatcaccgccttccagtgccccacctgccggcatgtcatcaccctcagccagcgaggtctagacgggctcaagcgcaacgtcaccctacagaacatcatcgacaggttccagaaagcatcagtgagcgggcccaactctcccagcgagacccgtcgggagcgggcctttgacgccaacaccatgacctccgccgagaaggtcctctgccagttttgtgaccaggatcctgcccaggacgctgtgaagacctgtgtcacttgtgaagtatcctactgtgacgagtgcctgaaagccactcacccgaataagaagccctttacaggccatcgtctgattgagccaattccggactctcacatccgggggctgatgtgcttggagcatgaggatgagaagcaaaacttagagagtaacctcaccaaccttattaagaggaacacagaactggagacccttttggctaaactcatccaaacctgtcaacatgttgaagtcaatgcatcacgtcaagaagccaaattgacagaggagtgtgatcttctcattgagatcattcagcaaagacgacagattattggaaccaagatcaaagaagggaaggtgatgaggcttcgcaaactggctcagcagattgcaaactgcaaacagtgcattgagcggtcagcatcactcatctcccaagcggaacactctctgaaggagaatgatcatgcgcgtttcctacagactgctaagaatatcaccgagagagtctccatggcaactgcatcctcccaggttctaattcctgaaatcaacctcaatgacacatttgacacctttgccttagatttttcccgagagaagaaactgctagaatgtctggattaccttacagctcccaaccctcccacaattagagaagagctctgcacagcttcatatgacaccatcactgtgcattggacctccgatgatgagttcagcgtggtctcctacgagctccagtacaccatattcaccggacaagccaacgtcgttagtctgtgtaattcggctgatagctggatgatagtacccaacatcaagcagaaccactacacggtgcacggtctgcagagcggcaccaagtacatcttcatggtcaaggccatcaaccaggcgggcagccgcagcagtgagcctgggaagttgaagacaaacagccaaccatttaaactggatcccaaatctgctcatcgaaaactgaaggtgtcccatgataacttgacagtagaacgtgatgagtcatcatccaagaagagtcacacacctgaacgcttcaccagccaggggagctatggagtagctggaaatgtgtttattgatagtggccggcattattgggaagtggtcataagtggaagcacatggtatgccattggtcttgcttacaaatcagccccgaagcatgaatggattgggaagaactctgcttcctgggcgctctgccgctgcaacaataactgggtggtgagacacaatagcaaggaaatccccattgagcctgccccccacctccggcgcgtgggcatcctgctggactatgataacggctctatcgccttttatgatgctttgaactccatccacctctacaccttcgacgtcgcatttgcgcagcctgtttgccccaccttcaccgtgtggaacaagtgtctgacgattatcactgggctccctatcccagaccatttggactgcacagagcagctgccgtgagcgtctggccacatggagctgctttctggggaacagtaaggttcaggccactatttaggggactgagaaagcacaggcttcatgagtgtaatgaaatctcaccagaagtgtcccgaaatcggctcagatagggctcaaaacaagagattcctctccttttactgtgtcttgtattaagtacgggctttaataatttctttaatttttttgtatttagaggaaaatctatagattatttataagagaaacataatcaggattacaacttttaggaattacttggttttgcacattaagaggcccataagtttatcagctatttacaaccttcatttcatcacaatctgtgggcttacaaaaaaacaaaaacttttgtagttttgtatgttactcatcttcttacctgatatcccatgatgatcccatggtaggtcttctcacctcgatggtgcataacaggatgtgtttgaacctagtaggggaggaaacaggctttcttactctggtttaatttgaagtgttttaattgtgatgtcaaaaagttgtatcagatcaactaaaatggagagcaagacagagaatgaaaagagttgattttggacctcggaccttgccgtggctaaatctttaccttctcatagctgatgggataatgttggaaagaaaggttctgaatcctttggccacattttgccctgcttctctcagggttaagggttctggaagaacattaagaatgagattgcaattgaaaatagtcattttgaatcctattgattattcaaaaattcaggctgatttgtcttttatcagaggtaggattctgttttatagtatagaatctactttatccttccttttaatagttcctttagacctgtgaaatttcttcactacatttaatagttctcctatttcccgctcccccatatcaattttccttttgtctccggggctgagtaaataaacatgttctgtcacaaatagcagcaccactttggattgattttgctctccaggacatcagcacatggccctgatcagcactaccacatccaaacataagtcactgaaaaacacttaatatttatgagttggtaatgacaagggacattgtataaagtactatttgctagattcatgcctcaaaagttattataaacagacctttattaaacacatcttgaaagatgtagaagtccctctatagtctagtatagtttacaatagagttgtaagaccaaaaaaaaaaaaaaaaaaattcaaactcgttattcaggaacctgcttataaaatgtcagctgggattctttgcatgccaatctgatgcgttggaatggtccatgaattaaggctttcttgagcagttcttggcccagaactctggcattggttctagtttgatgaagggcatgacctctataaatggtttcaattgctaaaatatttacctgggatactgggtcagccattttgactgagcagactagtggatttagacattgtttttagttattttgtttttaaccaaatcaaccaactgcctccctgaaataagtcaatgaactcattgtttcagcatcacgtggccaaaggtcatgtgattgcaaatctggatttcaagggaggccaagccagcttcctgggtccttccatcctcttccctagcagacactctcctttttcttaacagatagattctatatatttactatattatttatacccagatgaatattttgatagatacctaagacaatttcacatctaaaagatggacgcctcaatggaaaaaaaacaatctttctctggaaaccttataggtttttctttttattacaatataaaagcaatgtgtgtttgccttctctgagtaaactgaaagggttgtctcagtaatttttacatacattttgggtaactggataatggatattttaatgcactttgtacactaacaggttctaaataaaagggtctaaaactcagcttctgagtttttaaaatcacggtctccaggtaccaataaatgctacagtttgccttatgatgttaacataaaacacttagtagaaggacaatatttccatgaaaataatgtttttcaatattaagaagttactactcaaattttcacagtaagccatttagggtatgtttggctatttttataaggacatgagagattatgtcataattttgttgtggaagtctcactcttggctaacttaaaagcattgtggatagtagcagttactagttccaggttgtcatatttacaggaaaatatgtatatggtgaaaggccaccgtgtttaattactataatgatgtagaaaagattcccgtgtgaattttttttttgaaagtctaaaaaatgtatgctgtaaaaatttgctgcagtgtaattttgcattctctttaaactgattgaggtcacagtattttattatttggggtcctcaccacaggaaacactgcgatacaggggcaaaagagatggcagtgccaatttaaattaatacaacaaaatcaatgcagcaccaaccaagactgccaggtctggtgtcatgggtatgcccagagcccaggagttcagaagggccctaagcctgatttaatgctctgctgttgatgtcttgaaattcttaacaatttttgaacaaggggcctgcgttttcacttcgcactgggccttgcaaattacatagcgagtgctcataaaagaactcagaaacgtggtacctctcttcctggtggatacaaataaagaaatctggatccaaagttgaaagttgctggcgatatcattcaagtaggactctaaatagtggattaagatgagggtgggcctgggtgaagattctttccagctttaaaagaaagtgacttcaaaaactgactgcaaatattgacgatggtttctgctggaggaaaagaaacagcttgaatacagacaggcttttttattacggtactgatatattgaccttaaacttgctgaggaactgaactaacgtcctccagtgaccgtggaattccatctcagctccaggaacatgcagatacctgcaaagagacacgcatatatgctggcatacatgtgcatttggtgttgggaagttgaccatctggtctatcttaataaaatggtaaaaagcacaccaagacaatgatgggggcaggaggatgtttttgaaaacagcgcttctcaaccagtgctcgattttgccccccaggagacatttggcaatgcaatggcaacttttggttgtcgcagccggggaagggaagctaccagcatctagtgcgtagaggtcatggacgccgttaaacatcctacagtgcaagcgcagcccccgaccacgaagagttgtcttgctcaaatatcaacagtgctgcagtgtagaaacttgatcgttggttttcttttaatgcaaaactctcataaaaacctttcacttttcctgtcattgattatatgcttgatacacccaaaaagaaaaggggaggggcaccaattcacctacactccagtggctccatcacctttaaaaatatttataaaatagttccaaaaatctgatatctgaaaagcaatccaagcctgtgtaaatgggaatcactgataagtatcatcatctgtatcagcttggcttggacatgaaaaattgattctctttatgtcactccttgcacctggacaaattcaatccccggtacttaagtcacactgccaagccctcggccctgactattgtcttgattgctgttcctttctggttcaaaataaaatcatttttgtggcaccaagaaaaaaaaaaaaaaaaaaaaaca

SEQ ID NO: 26078 - DNA, 475 bp, Homo sapiens
gagctccagtacaccatattcaccggacaagccaacgtcgttagtgagtatctcatggcctatttatttctgtctttggtggctttcttcagattgattgcattcctgaatttaaacttcaaaggaagacaaggaaggaaagaacacacaatatttattgacttgtctttcttgaacaaaaaagtgatagcactcacttgtactacattagtaaaaacagctggctaaatattgatgaaaattaatgacctctagcaaaccacatggatgttaagggaaagaagccagaaacaaatatatagagagaaacaaatatatagagagatacatagagagagaaacaaatatatatatatagtattaatccacatataggttcataacttaaagatcaaaataaactattttgcttaaagaaacattcataggtgttaaaactataaaccctgggcaacctggtgaaaccccatctcta

SEQ ID NO: 26079 - DNA, 3423 bp, Homo sapiens
tcgtagaactagggctgcaggaattgcgccgcgtcgacaaacccccatcctgggaaaaatggggaagctgatagctgatcagcttccttgggttttgctgatgacacaagagagctttgcctgaagatggaaacactggagtcagaactgacctgccctatttgtctggagctctttgaggaccctcttctactgccctgcgcacacagcctctgcttcaactgcgcccaccgcatcctagtatcacactgtgccaccaacgagtctgtggagtccatcaccgccttccagtgccccacctgccggcatgtcatcaccctcagccagcgaggtctagacgggctcaagcgcaacgtcaccctacagaacatcatcgacaggttccagaaagcatcagtgagcgggcccaactctcccagcgagacccgtcgggagcgggcctttgacgccaacaccatgacctccgccgagaaggtcctctgccagttttgtgaccaggatcctgcccaggacgctgtgaagacctgtgtcacttgtgaagtatcctactgtgacgagtgcctgaaagccactcacccgaataagaagccctttacaggccatcgtctgattgagccaattccggactctcacatccgggggctgatgtgcttggagcatgaggatgagaaggtgaatatgtactgtgtgaccgatgaccagttaatctgtgccttgtgtaaactggttgggcggcaccgcgatcatcaggtggcagctttgagtgagcgctatgacaaattgaagcaaaacttagagagtaacctcaccaaccttattaagaggaacacagaactggagacccttttggctaaactcatccaaacctgtcaacatgttgaagtcaatgcatcacgtcaagaagccaaattgacagaggagtgtgatcttctcattgagatcattcagcaaagacgacagattattggaaccaagatcaaagaagggaaggtgatgaggcttcgcaaactggctcagcagattgcaaactgcaaacagtgcattgagcggtcagcatcactcatctcccaagcggaacactctctgaaggagaatgatcatgcgcgtttcctacagactgctaagaatatcaccgagagagtctccatggcaactgcatcctcccaggttctaattcctgaaatcaacctcaatgacacatttgacacctttgccttagatttttcccgagagaagaaactgctagaatgtctggattaccttacagctcccaaccctcccacaattagagaagagctctgcacagcttcatatgacaccatcactgtgcattggacctccgatgatgagttcagcgtggtctcctacgagctccagtacaccatattcaccggacaagccaacgtcgttagtctgtgtaattcggctgatagctggatgatagtacccaacatcaagcagaaccactacacggtgcacggtctgcagagcggcaccaagtacatcttcatggtcaaggccatcaaccaggcgggcagccgcagcagtgagcctgggaagttgaagacaaacagccaaccatttaaactggatcccaaatctgctcatcgaaaactgaaggtgtcccatgataacttgacagtagaacgtgatgagtcatcatccaagaagagtcacacacctgaacgcttcaccagccaggggagctatggagtagctggaaatgtgtttattgatagtggccggcattattgggaagtggtcataagtggaagcacatggtatgccattggtcttgcttacaaatcagccccgaagcatgaatggattgggaagaactctgcttcctgggcgctctgccgctgcaacaataactgggtggtgagacacaatagcaaggaaatccccattgagcctgccccccacctccggcgcgtgggcatcctgctggactatgataacggctctatcgccttttatgatgctttgaactccatccacctctacaccttcgacgtcgcatttgcgcagcctgtttgccccaccttcaccgtgtggaacaagtgtctgacgattatcactgggctccctatcccagaccatttggactgcacagagcagctgccgtgagcgtctggccacatggagctgctttctggggaacagtaaggttcaggccactatttaggggactgagaaagcacaggcttcatgagtgtaatgaaatctcaccagaagtgtcccgaaatcggctcagatagggctcaaaacaagagattcctctccttttactgtgtcttgtattaagtacgggctttaataatttctttaatttttttgtatttagaggaaaatctatagattatttataagagaaacataatcaggattacaacttttaggaattacttggttttgcacattaagaggcccataagtttatcagctatttacaaccttcatttcatcacaatctgtgggcttacaaaaaaacaaaaacttttgtagttttgtatgttactcatcttcttacctgatatcccatgatgatcccatggtaggtcttctcacctcgatggtgcataacaggatgtgtttgaacctagtaggggaggaaacaggctttcttactctggtttaatttgaagtgttttaattgtgatgtcaaaaagttgtatcagatcaactaaaatggagagcaagacagagaatgaaaagagttgattttggacctcggaccttgccgtggctaaatctttaccttctcatagctgatgggataatgttggaaagaaaggttctgaatcctttggccacattttgccctgcttctctcagggttaagggttctggaagaacattaagaatgagattgcaattgaaaatagtcattttgaatcctattgattattcaaaaattcaggctgatttgtcttttatcagaggtaggattctgttttatagtatagaatctactttatccttccttttaatagttcctttagacctgtgaaatttcttcactacatttaatagttctcctatttcccgctcccccatatcaattttccttttgtctccggggctgagtaaataaacatgttctgtcacaaaaaaaggtatgtctgaccacccattcccatcatggcctgagctagtgtttcaggtttactttagaatgctcttggccaagtggaagggtcgattcagttggttgtgtgcttagaattttatttttgacttacatagactatcagctgcttcatgtcacatctcatgcttctcttatgttgcccagttttctcagtgcttccgactgcatgtttttgtactatatgaaaagccttctttctagaagactaccaattaaatatttctttagaaaaatgtaaaaaaaaaagtcgacgcggccgcgaattcgat

SEQ ID NO: 26080 - DNA, 5944 bp, Homo sapiens
tcgtagaactagggctgcaggaattgcgccgcgtcgacaaacccccatcctgggaaaaatggggaagctgatagctgatcagcttccttgggttttgctgatgacacaagagagctttgcctgaagatggaaacactggagtcagaactgacctgccctatttgtctggagctctttgaggaccctcttctactgccctgcgcacacagcctctgcttcaactgcgcccaccgcatcctagtatcacactgtgccaccaacgagtctgtggagtccatcaccgccttccagtgccccacctgccggcatgtcatcaccctcagccagcgaggtctagacgggctcaagcgcaacgtcaccctacagaacatcatcgacaggttccagaaagcatcagtgagcgggcccaactctcccagcgagacccgtcgggagcgggcctttgacgccaacaccatgacctccgccgagaaggtcctctgccagttttgtgaccaggatcctgcccaggacgctgtgaagacctgtgtcacttgtgaagtatcctactgtgacgagtgcctgaaagccactcacccgaataagaagccctttacaggccatcgtctgattgagccaattccggactctcacatccgggggctgatgtgcttggagcatgaggatgagaaggtgaatatgtactgtgtgaccgatgaccagttaatctgtgccttgtgtaaactggttgggcggcaccgcgatcatcaggtggcagctttgagtgagcgctatgacaaattgaagcaaaacttagagagtaacctcaccaaccttattaagaggaacacagaactggagacccttttggctaaactcatccaaacctgtcaacatgttgaagtcaatgcatcacgtcaagaagccaaattgacagaggagtgtgatcttctcattgagatcattcagcaaagacgacagattattggaaccaagatcaaagaagggaaggtgatgaggcttcgcaaactggctcagcagattgcaaactgcaaacagtgcattgagcggtcagcatcactcatctcccaagcggaacactctctgaaggagaatgatcatgcgcgtttcctacagactgctaagaatatcaccgagagagtctccatggcaactgcatcctcccaggttctaattcctgaaatcaacctcaatgacacatttgacacctttgccttagatttttcccgagagaagaaactgctagaatgtctggattaccttacagctcccaaccctcccacaattagagaagagctctgcacagcttcatatgacaccatcactgtgcattggacctccgatgatgagttcagcgtggtctcctacgagctccagtacaccatattcaccggacaagccaacgtcgttagtctgtgtaattcggctgatagctggatgatagtacccaacatcaagcagaaccactacacggtgcacggtctgcagagcggcaccaagtacatcttcatggtcaaggccatcaaccaggcgggcagccgcagcagtgagcctgggaagttgaagacaaacagccaaccatttaaactggatcccaaatctgctcatcgaaaactgaaggtgtcccatgataacttgacagtagaacgtgatgagtcatcatccaagaagagtcacacacctgaacgcttcaccagccaggggagctatggagtagctggaaatgtgtttattgatagtggccggcattattgggaagtggtcataagtggaagcacatggtatgccattggtcttgcttacaaatcagccccgaagcatgaatggattgggaagaactctgcttcctgggcgctctgccgctgcaacaataactgggtggtgagacacaatagcaaggaaatccccattgagcctgccccccacctccggcgcgtgggcatcctgctggactatgataacggctctatcgccttttatgatgctttgaactccatccacctctacaccttcgacgtcgcatttgcgcagcctgtttgccccaccttcaccgtgtggaacaagtgtctgacgattatcactgggctccctatcccagaccatttggactgcacagagcagctgccgtgagcgtctggccacatggagctgctttctggggaacagtaaggttcaggccactatttaggggactgagaaagcacaggcttcatgagtgtaatgaaatctcaccagaagtgtcccgaaatcggctcagatagggctcaaaacaagagattcctctccttttactgtgtcttgtattaagtacgggctttaataatttctttaatttttttgtatttagaggaaaatctatagattatttataagagaaacataatcaggattacaacttttaggaattacttggttttgcacattaagaggcccataagtttatcagctatttacaaccttcatttcatcacaatctgtgggcttacaaaaaaacaaaaacttttgtagttttgtatgttactcatcttcttacctgatatcccatgatgatcccatggtaggtcttctcacctcgatggtgcataacaggatgtgtttgaacctagtaggggaggaaacaggctttcttactctggtttaatttgaagtgttttaattgtgatgtcaaaaagttgtatcagatcaactaaaatggagagcaagacagagaatgaaaagagttgattttggacctcggaccttgccgtggctaaatctttaccttctcatagctgatgggataatgttggaaagaaaggttctgaatcctttggccacattttgccctgcttctctcagggttaagggttctggaagaacattaagaatgagattgcaattgaaaatagtcattttgaatcctattgattattcaaaaattcaggctgatttgtcttttatcagaggtaggattctgttttatagtatagaatctactttatccttccttttaatagttcctttagacctgtgaaatttcttcactacatttaatagttctcctatttcccgctcccccatatcaattttccttttgtctccggggctgagtaaataaacatgttctgtcacaaatagcagcaccactttggattgattttgctctccaggacatcagcacatggccctgatcagcactaccacatccaaacataagtcactgaaaaacacttaatatttatgagttggtaatgacaagggacattgtataaagtactatttgctagattcatgcctcaaaagttattataaacagacctttattaaacacatcttgaaagatgtagaagtccctctatagtctagtatagtttacaatagagttgtaagaccaaaaaaaaaaaaaaaaaaattcaaactcgttattcaggaacctgcttataaaatgtcagctgggattctttgcatgccaatctgatgcgttggaatggtccatgaattaaggctttcttgagcagttcttggcccagaactctggcattggttctagtttgatgaagggcatgacctctataaatggtttcaattgctaaaatatttacctgggatactgggtcagccattttgactgagcagactagtggatttagacattgtttttagttattttgtttttaaccaaatcaaccaactgcctccctgaaataagtcaatgaactcattgtttcagcatcacgtggccaaaggtcatgtgattgcaaatctggatttcaagggaggccaagccagcttcctgggtccttccatcctcttccctagcagacactctcctttttcttaacagatagattctatatatttactatattatttatacccagatgaatattttgatagatacctaagacaatttcacatctaaaagatggacgcctcaatggaaaaaaaacaatctttctctggaaaccttataggtttttctttttattacaatataaaagcaatgtgtgtttgccttctctgagtaaactgaaagggttgtctcagtaatttttacatacattttgggtaactggataatggatattttaatgcactttgtacactaacaggttctaaataaaagggtctaaaactcagcttctgagtttttaaaatcacggtctccaggtaccaataaatgctacagtttgccttatgatgttaacataaaacacttagtagaaggacaatatttccatgaaaataatgtttttcaatattaagaagttactactcaaattttcacagtaagccatttagggtatgtttggctatttttataaggacatgagagattatgtcataattttgttgtggaagtctcactcttggctaacttaaaagcattgtggatagtagcagttactagttccaggttgtcatatttacaggaaaatatgtatatggtgaaaggccaccgtgtttaattactataatgatgtagaaaagattcccgtgtgaattttttttttgaaagtctaaaaaatgtatgctgtaaaaatttgctgcagtgtaattttgcattctctttaaactgattgaggtcacagtattttattatttggggtcctcaccacaggaaacactgcgatacaggggcaaaagagatggcagtgccaatttaaattaatacaacaaaatcaatgcagcaccaaccaagactgccaggtctggtgtcatgggtatgcccagagcccaggagttcagaagggccctaagcctgatttaatgctctgctgttgatgtcttgaaattcttaacaatttttgaacaaggggcctgcgttttcacttcgcactgggccttgcaaattacatagcgagtgctcataaaagaactcagaaacgtggtacctctcttcctggtggatacaaataaagaaatctggatccaaagttgaaagttgctggcgatatcattcaagtaggactctaaatagtggattaagatgagggtgggcctgggtgaagattctttccagctttaaaagaaagtgacttcaaaaactgactgcaaatattgacgatggtttctgctggaggaaaagaaacagcttgaatacagacaggcttttttattacggtactgatatattgaccttaaacttgctgaggaactgaactaacgtcctccagtgaccgtggaattccatctcagctccaggaacatgcagatacctgcaaagagacacgcatatatgctggcatacatgtgcatttggtgttgggaagttgaccatctggtctatcttaataaaatggtaaaaagcacaccaagacaatgatgggggcaggaggatgtttttgaaaacagcgcttctcaaccagtgctcgattttgccccccaggagacatttggcaatgcaatggcaacttttggttgtcgcagccggggaagggaagctaccagcatctagtgcgtagaggtcatggacgccgttaaacatcctacagtgcaagcgcagcccccgaccacgaagagttgtcttgctcaaatatcaacagtgctgcagtgtagaaacttgatcgttggttttcttttaatgcaaaactctcataaaaacctttcacttttcctgtcattgattatatgcttgatacacccaaaaagaaaaggggaggggcaccaattcacctacactccagtggctccatcacctttaaaaatatttataaaatagttccaaaaatctgatatctgaaaagcaatccaagcctgtgtaaatgggaatcactgataagtatcatcatctgtatcagcttggcttggacatgaaaaattgattctctttatgtcactccttgcacctggacaaattcaatccccggtacttaagtcacactgccaagccctcggccctgactattgtcttgattgctgttcctttctggttcaaaataaaatcatttttgtggcaccaaga

SEQ ID NO: 26081 - DNA, 6121 bp, Homo sapiens
  misc_feature (1)..(2): n is a, c, g, or t
nnctgaagtgttagtatgtagtggagctggtggtgtgaagctgattcattttgtttcaaagccccaaatggcatgctgccgaacacaggcacaagcacagcagcgtctccttagaaataatgactccaaggcaaacagccctcattgcaaaatgtagaagactgccatctgcttgtctccactgtggtttattcgtttcagggttttaaatgacgtaataaaaagatagctgatcagcttccttgggttttgctgatgacacaagagagctttgcctgaagatggaaacactggagtcagaactgacctgccctatttgtctggagctctttgaggaccctcttctactgccctgcgcacacagcctctgcttcaactgcgcccaccgcatcctagtatcacactgtgccaccaacgagtctgtggagtccatcaccgccttccagtgccccacctgccggcatgtcatcaccctcagccagcgaggtctagacgggctcaagcgcaacgtcaccctacagaacatcatcgacaggttccagaaagcatcagtgagcgggcccaactctcccagcgagacccgtcgggagcgggcctttgacgccaacaccatgacctccgccgagaaggtcctctgccagttttgtgaccaggatcctgcccaggacgctgtgaagacctgtgtcacttgtgaagtatcctactgtgacgagtgcctgaaagccactcacccgaataagaagccctttacaggccatcgtctgattgagccaattccggactctcacatccgggggctgatgtgcttggagcatgaggatgagaaggtgaatatgtactgtgtgaccgatgaccagttaatctgtgccttgtgtaaactggttgggcggcaccgcgatcatcaggtggcagctttgagtgagcgctatgacaaattgaagcaaaacttagagagtaacctcaccaaccttattaagaggaacacagaactggagacccttttggctaaactcatccaaacctgtcaacatgttgaagtcaatgcatcacgtcaagaagccaaattgacagaggagtgtgatcttctcattgagatcattcagcaaagacgacagattattggaaccaagatcaaagaagggaaggtgatgaggcttcgcaaactggctcagcagattgcaaactgcaaacagtgcattgagcggtcagcatcactcatctcccaagcggaacactctctgaaggagaatgatcatgcgcgtttcctacagactgctaagaatatcaccgagagagtctccatggcaactgcatcctcccaggttctaattcctgaaatcaacctcaatgacacatttgacacctttgccttagatttttcccgagagaagaaactgctagaatgtctggattaccttacagctcccaaccctcccacaattagagaagagctctgcacagcttcatatgacaccatcactgtgcattggacctccgatgatgagttcagcgtggtctcctacgagctccagtacaccatattcaccggacaagccaacgtcgttagtctgtgtaattcggctgatagctggatgatagtacccaacatcaagcagaaccactacacggtgcacggtctgcagagcggcaccaagtacatcttcatggtcaaggccatcaaccaggcgggcagccgcagcagtgagcctgggaagttgaagacaaacagccaaccatttaaactggatcccaaatctgctcatcgaaaactgaaggtgtcccatgataacttgacagtagaacgtgatgagtcatcatccaagaagagtcacacacctgaacgcttcaccagccaggggagctatggagtagctggaaatgtgtttattgatagtggccggcattattgggaagtggtcataagtggaagcacatggtatgccattggtcttgcttacaaatcagccccgaagcatgaatggattgggaagaactctgcttcctgggcgctctgccgctgcaacaataactgggtggtgagacacaatagcaaggaaatccccattgagcctgccccccacctccggcgcgtgggcatcctgctggactatgataacggctctatcgccttttatgatgctttgaactccatccacctctacaccttcgacgtcgcatttgcgcagcctgtttgccccaccttcaccgtgtggaacaagtgtctgacgattatcactgggctccctatcccagaccatttggactgcacagagcagctgccgtgagcgtctggccacatggagctgctttctggggaacagtaaggttcaggccactatttaggggactgagaaagcacaggcttcatgagtgtaatgaaatctcaccagaagtgtcccgaaatcggctcagatagggctcaaaacaagagattcctctccttttactgtgtcttgtattaagtacgggctttaataatttctttaatttttttgtatttagaggaaaatctatagattatttataagagaaacataatcaggattacaacttttaggaattacttggttttgcacattaagaggcccataagtttatcagctatttacaaccttcatttcatcacaatctgtgggcttacaaaaaaacaaaaacttttgtagttttgtatgttactcatcttcttacctgatatcccatgatgatcccatggtaggtcttctcacctcgatggtgcataacaggatgtgtttgaacctagtaggggaggaaacaggctttcttactctggtttaatttgaagtgttttaattgtgatgtcaaaaagttgtatcagatcaactaaaatggagagcaagacagagaatgaaaagagttgattttggacctcggaccttgccgtggctaaatctttaccttctcatagctgatgggataatgttggaaagaaaggttctgaatcctttggccacattttgccctgcttctctcagggttaagggttctggaagaacattaagaatgagattgcaattgaaaatagtcattttgaatcctattgattattcaaaaattcaggctgatttgtcttttatcagaggtaggattctgttttatagtatagaatctactttatccttccttttaatagttcctttagacctgtgaaatttcttcactacatttaatagttctcctatttcccgctcccccatatcaattttccttttgtctccggggctgagtaaataaacatgttctgtcacaaatagcagcaccactttggattgattttgctctccaggacatcagcacatggccctgatcagcactaccacatccaaacataagtcactgaaaaacacttaatatttatgagttggtaatgacaagggacattgtataaagtactatttgctagattcatgcctcaaaagttattataaacagacctttattaaacacatcttgaaagatgtagaagtccctctatagtctagtatagtttacaatagagttgtaagaccaaaaaaaaaaaaaaaaaaattcaaactcgttattcaggaacctgcttataaaatgtcagctgggattctttgcatgccaatctgatgcgttggaatggtccatgaattaaggctttcttgagcagttcttggcccagaactctggcattggttctagtttgatgaagggcatgacctctataaatggtttcaattgctaaaatatttacctgggatactgggtcagccattttgactgagcagactagtggatttagacattgtttttagttattttgtttttaaccaaatcaaccaactgcctccctgaaataagtcaatgaactcattgtttcagcatcacgtggccaaaggtcatgtgattgcaaatctggatttcaagggaggccaagccagcttcctgggtccttccatcctcttccctagcagacactctcctttttcttaacagatagattctatatatttactatattatttatacccagatgaatattttgatagatacctaagacaatttcacatctaaaagatggacgcctcaatggaaaaaaaacaatctttctctggaaaccttataggtttttctttttattacaatataaaagcaatgtgtgtttgccttctctgagtaaactgaaagggttgtctcagtaatttttacatacattttgggtaactggataatggatattttaatgcactttgtacactaacaggttctaaataaaagggtctaaaactcagcttctgagtttttaaaatcacggtctccaggtaccaataaatgctacagtttgccttatgatgttaacataaaacacttagtagaaggacaatatttccatgaaaataatgtttttcaatattaagaagttactactcaaattttcacagtaagccatttagggtatgtttggctatttttataaggacatgagagattatgtcataattttgttgtggaagtctcactcttggctaacttaaaagcattgtggatagtagcagttactagttccaggttgtcatatttacaggaaaatatgtatatggtgaaaggccaccgtgtttaattactataatgatgtagaaaagattcccgtgtgaattttttttttgaaagtctaaaaaatgtatgctgtaaaaatttgctgcagtgtaattttgcattctctttaaactgattgaggtcacagtattttattatttggggtcctcaccacaggaaacactgcgatacaggggcaaaagagatggcagtgccaatttaaattaatacaacaaaatcaatgcagcaccaaccaagactgccaggtctggtgtcatgggtatgcccagagcccaggagttcagaagggccctaagcctgatttaatgctctgctgttgatgtcttgaaattcttaacaatttttgaacaaggggcctgcgttttcacttcgcactgggccttgcaaattacatagcgagtgctcataaaagaactcagaaacgtggtacctctcttcctggtggatacaaataaagaaatctggatccaaagttgaaagttgctggcgatatcattcaagtaggactctaaatagtggattaagatgagggtgggcctgggtgaagattctttccagctttaaaagaaagtgacttcaaaaactgactgcaaatattgacgatggtttctgctggaggaaaagaaacagcttgaatacagacaggcttttttattacggtactgatatattgaccttaaacttgctgaggaactgaactaacgtcctccagtgaccgtggaattccatctcagctccaggaacatgcagatacctgcaaagagacacgcatatatgctggcatacatgtgcatttggtgttgggaagttgaccatctggtctatcttaataaaatggtaaaaagcacaccaagacaatgatgggggcaggaggatgtttttgaaaacagcgcttctcaaccagtgctcgattttgccccccaggagacatttggcaatgcaatggcaacttttggttgtcgcagccggggaagggaagctaccagcatctagtgcgtagaggtcatggacgccgttaaacatcctacagtgcaagcgcagcccccgaccacgaagagttgtcttgctcaaatatcaacagtgctgcagtgtagaaacttgatcgttggttttcttttaatgcaaaactctcataaaaacctttcacttttcctgtcattgattatatgcttgatacacccaaaaagaaaaggggaggggcaccaattcacctacactccagtggctccatcacctttaaaaatatttataaaatagttccaaaaatctgatatctgaaaagcaatccaagcctgtgtaaatgggaatcactgataagtatcatcatctgtatcagcttggcttggacatgaaaaattgattctctttatgtcactccttgcacctggacaaattcaatccccggtacttaagtcacactgccaagccctcggccctgactattgtcttgattgctgttcctttctggttcaaaataaaatcatttttgtggcaccaagaaaaaaaaaaaaaaaaaaaaaca

SEQ ID NO: 26082 - DNA, 3499 bp, Homo sapiens
gagaactgatttgaaataagagccaggcggtcctcgcttccctgcgaccgacttttcataggctgggggagaaaaggttgagaaacttgacattgtctcgagcagagtgcgtgtagcaacagatcaaagaaaaagaggacgaaaacgtgctctttgctgcccgtagatttcgccgggttgcttttgtcttgcgggctcctgtcgggttcggtgtttccgctctgaagactgcgacgcgggctccgatgcagctcgctccctgccggatgggtcatgggattctaaacatgaggcagatagctgatcagcttccttgggttttgctgatgacacaagagagctttgcctgaagatggaaacactggagtcagaactgacctgccctatttgtctggagctctttgaggaccctcttctactgccctgcgcacacagcctctgcttcaactgcgcccaccgcatcctagtatcacactgtgccaccaacgagtctgtggagtccatcaccgccttccagtgccccacctgccggcatgtcatcaccctcagccagcgaggtctagacgggctcaagcgcaacgtcaccctacagaacatcatcgacaggttccagaaagcatcagtgagcgggcccaactctcccagcgagacccgtcgggagcgggcctttgacgccaacaccatgacctccgccgagaaggtcctctgccagttttgtgaccaggatcctgcccaggacgctgtgaagacctgtgtcacttgtgaagtatcctactgtgacgagtgcctgaaagccactcacccgaataagaagccctttacaggccatcgtctgattgagccaattccggactctcacatccgggggctgatgtgcttggagcatgaggatgagaaggtgaatatgtactgtgtgaccgatgaccagttaatctgtgccttgtgtaaactggttgggcggcaccgcgatcatcaggtggcagctttgagtgagcgctatgacaaattgaagcaaaacttagagagtaacctcaccaaccttattaagaggaacacagaactggagacccttttggctaaactcatccaaacctgtcaacatgttgaagtcaatgcatcacgtcaagaagccaaattgacagaggagtgtgatcttctcattgagatcattcagcaaagacgacagattattggaaccaagatcaaagaagggaaggtgatgaggcttcgcaaactggctcagcagattgcaaactgcaaacagtgcattgagcggtcagcatcactcatctcccaagcggaacactctctgaaggagaatgatcatgcgcgtttcctacagactgctaagaatatcaccgagagagtctccatggcaactgcatcctcccaggttctaattcctgaaatcaacctcaatgacacatttgacacctttgccttagatttttcccgagagaagaaactgctagaatgtctggattaccttacagctcccaaccctcccacaattagagaagagctctgcacagcttcatatgacaccatcactgtgcattggacctccgatgatgagttcagcgtggtctcctacgagctccagtacaccatattcaccggacaagccaacgtcgttagtctgtgtaattcggctgatagctggatgatagtacccaacatcaagcagaaccactacacggtgcacggtctgcagagcggcaccaagtacatcttcatggtcaaggccatcaaccaggcgggcagccgcagcagtgagcctgggaagttgaagacaaacagccaaccatttaaactggatcccaaatctgctcatcgaaaactgaaggtgtcccatgataacttgacagtagaacgtgatgagtcatcatccaagaagagtcacacacctgaacgcttcaccagccaggggagctatggagtagctggaaatgtgtttattgatagtggccggcattattgggaagtggtcataagtggaagcacatggtgagacacaatagcaaggaaatccccattgagcctgccccccacctccggcgcgtgggcatcctgctggactatgataacggctctatcgccttttatgatgctttgaactccatccacctctacaccttcgacgtcgcatttgcgcagcctgtttgccccaccttcaccgtgtggaacaagtgtctgacgattatcactgggctccctatcccagaccatttggactgcacagagcagctgccgtgagcgtctggccacatggagctgctttctggggaacagtaaggttcaggccactatttaggggactgagaaagcacaggcttcatgagtgtaatgaaatctcaccagaagtgtcccgaaatcggctcagatagggctcaaaacaagagattcctctccttttactgtgtcttgtattaagtacgggctttaataatttctttaatttttttgtatttagaggaaaatctatagattatttataagagaaacataatcaggattacaacttttaggaattacttggttttgcacattaagaggcccataagtttatcagctatttacaaccttcatttcatcacaatctgtgggcttacaaaaaaacaaaaacttttgtagttttgtatgttactcatcttcttacctgatatcccatgatgatcccatggtaggtcttctcacctcgatggtgcataacaggatgtgtttgaacctagtaggggaggaaacaggctttcttactctggtttaatttgaagtgttttaattgtgatgtcaaaaagttgtatcagatcaactaaaatggagagcaagacagagaatgaaaagagttgattttggacctcggaccttgccgtggctaaatctttaccttctcatagctgatgggataatgttggaaagaaaggttctgaatcctttggccacattttgccctgcttctctcagggttaagggttctggaagaacattaagaatgagattgcaattgaaaatagtcattttgaatcctattgattattcaaaaattcaggctgatttgtcttttatcagaggtaggattctgttttatagtatagaatctactttatccttccttttaatagttcctttagacctgtgaaatttcttcactacatttaatagttctcctatttcccgctcccccatatcaattttccttttgtctccggggctgagtaaataaacatgttctgtcacaaatagcagcaccactttggattgattttgctctccaggacatcagcacatggccctgatcagcactaccacatccaaacataagtcactgaaaaacacttaatatttatgagttggtaatgacaagggacattgtataaagtactatttgctagattcatgcctcaaaagttattataaacagacctttattaaacacatcttgaaagatgtagaagtccctctatagtctagtatagtttacaatagagttgtaagacca

SEQ ID NO: 26083 - DNA, 4222 bp, Homo sapiens
tcgtagaactagggctgcaggaattgcgccgcgtcgacaaacccccatcctgggaaaaatggggaagctgatagctgatcagcttccttgggttttgctgatgacacaagagagctttgcctgaagatggaaacactggagtcagaactgacctgccctatttgtctggagctctttgaggaccctcttctactgccctgcgcacacagcctctgcttcaactgcgcccaccgcatcctagtatcacactgtgccaccaacgagtctgtggagtccatcaccgccttccagtgccccacctgccggcatgtcatcaccctcagccagcgaggtctagacgggctcaagcgcaacgtcaccctacagaacatcatcgacaggttccagaaagcatcagtgagcgggcccaactctcccagcgagacccgtcgggagcgggcctttgacgccaacaccatgacctccgccgagaaggtcctctgccagttttgtgaccaggatcctgcccaggacgctgtgaagacctgtgtcacttgtgaagtatcctactgtgacgagtgcctgaaagccactcacccgaataagaagccctttacaggccatcgtctgattgagccaattccggactctcacatccgggggctgatgtgcttggagcatgaggatgagaaggtgaatatgtactgtgtgaccgatgaccagttaatctgtgccttgtgtaaactggttgggcggcaccgcgatcatcaggtggcagctttgagtgagcgctatgacaaattgaagcaaaacttagagagtaacctcaccaaccttattaagaggaacacagaactggagacccttttggctaaactcatccaaacctgtcaacatgttgaagtcaatgcatcacgtcaagaagccaaattgacagaggagtgtgatcttctcattgagatcattcagcaaagacgacagattattggaaccaagatcaaagaagggaaggtgatgaggcttcgcaaactggctcagcagattgcaaactgcaaacagtgcattgagcggtcagcatcactcatctcccaagcggaacactctctgaaggagaatgatcatgcgcgtttcctacagactgctaagaatatcaccgagagagtctccatggcaactgcatcctcccaggttctaattcctgaaatcaacctcaatgacacatttgacacctttgccttagatttttcccgagagaagaaactgctagaatgtctggattaccttacagctcccaaccctcccacaattagagaagagctctgcacagcttcatatgacaccatcactgtgcattggacctccgatgatgagttcagcgtggtctcctacgagctccagtacaccatattcaccggacaagccaacgtcgttagtctgtgtaattcggctgatagctggatgatagtacccaacatcaagcagaaccactacacggtgcacggtctgcagagcggcaccaagtacatcttcatggtcaaggccatcaaccaggcgggcagccgcagcagtgagcctgggaagttgaagacaaacagccaaccatttaaactggatcccaaatctgctcatcgaaaactgaaggtgtcccatgataacttgacagtagaacgtgatgagtcatcatccaagaagagtcacacacctgaacgcttcaccagccaggggagctatggagtagctggaaatgtgtttattgatagtggccggcattattgggaagtggtcataagtggaagcacatggtatgccattggtcttgcttacaaatcagccccgaagcatgaatggattgggaagaactctgcttcctgggcgctctgccgctgcaacaataactgggtggtgagacacaatagcaaggaaatccccattgagcctgccccccacctccggcgcgtgggcatcctgctggactatgataacggctctatcgccttttatgatgctttgaactccatccacctctacaccttcgacgtcgcatttgcgcagcctgtttgccccaccttcaccgtgtggaacaagtgtctgacgattatcactgggctccctatcccagaccatttggactgcacagagcagctgccgtgagcgtctggccacatggagctgctttctggggaacagtaaggttcaggccactatttaggggactgagaaagcacaggcttcatgagtgtaatgaaatctcaccagaagtgtcccgaaatcggctcagatagggctcaaaacaagagattcctctccttttactgtgtcttgtattaagtacgggctttaataatttctttaatttttttgtatttagaggaaaatctatagattatttataagagaaacataatcaggattacaacttttaggaattacttggttttgcacattaagaggcccataagtttatcagctatttacaaccttcatttcatcacaatctgtgggcttacaaaaaaacaaaaacttttgtagttttgtatgttactcatcttcttacctgatatcccatgatgatcccatggtaggtcttctcacctcgatggtgcataacaggatgtgtttgaacctagtaggggaggaaacaggctttcttactctggtttaatttgaagtgttttaattgtgatgtcaaaaagttgtatcagatcaactaaaatggagagcaagacagagaatgaaaagagttgattttggacctcggaccttgccgtggctaaatctttaccttctcatagctgatgggataatgttggaaagaaaggttctgaatcctttggccacattttgccctgcttctctcagggttaagggttctggaagaacattaagaatgagattgcaattgaaaatagtcattttgaatcctattgattattcaaaaattcaggctgatttgtcttttatcagaggtaggattctgttttatagtatagaatctactttatccttccttttaatagttcctttagacctgtgaaatttcttcactacatttaatagttctcctatttcccgctcccccatatcaattttccttttgtctccggggctgagtaaataaacatgttctgtcacaaatagcagcaccactttggattgattttgctctccaggacatcagcacatggccctgatcagcactaccacatccaaacataagtcactgaaaaacacttaatatttatgagttggtaatgacaagggacattgtataaagtactatttgctagattcatgcctcaaaagttattataaacagacctttattaaacacatcttgaaagatgtagaagtccctctatagtctagtatagtttacaatagagttgtaagaccaaaaaaaaaaaaaaaaaaattcaaactcgttattcaggaacctgcttataaaatgtcagctgggattctttgcatgccaatctgatgcgttggaatggtccatgaattaaggctttcttgagcagttcttggcccagaactctggcattggttctagtttgatgaagggcatgacctctataaatggtttcaattgctaaaatatttacctgggatactgggtcagccattttgactgagcagactagtggatttagacattgtttttagttattttgtttttaaccaaatcaaccaactgcctccctgaaataagtcaatgaactcattgtttcagcatcacgtggccaaaggtcatgtgattgcaaatctggatttcaagggaggccaagccagcttcctgggtccttccatcctcttccctagcagacactctcctttttcttaacagatagattctatatatttactatattatttatacccagatgaatattttgatagatacctaagacaatttcacatctaaaagatggacgcctcaatggaaaaaaaacaatctttctctggaaaccttataggtttttctttttattacaatataaaagcaatgtgtgtttgccttctctgagtaaactgaaagggttgtctcagtaatttttacatacattttgggtaactggataatggatattttaatgcactttgtacactaacaggttctaaataaaagggtctaaaactcaaaaaaaaaaaaaaaaaaaaaaaaaaaaaaaaaaaaaaaaaaaaaaaaaaaaaaaaaaaaaaaaaaaaaaaaaaaaaaaaaaaaaaaaaaaaaaaaaaaaaaaca

SEQ ID NO: 26084 - DNA, 4268 bp, Homo sapiens
attcggcacaggggaagttgaagacaaacagccaaccatttaaactggatcccaaatctgctcatcgaaaactgaaggtgtcccatgataacttgacagtagaacgtgatgagtcatcatccaagaagagtcacacacctgaacgcttcaccagccaggggagctatggagtagctggaaatgtgtttattgatagtggccggcattattgggaagtggtcataagtggaagcacatggtgagacacaatagcaaggaaatccccattgagcctgccccccacctccggcgcgtgggcatcctgctggactatgataacggctctatcgccttttatgatgctttgaactccatccacctctacaccttcgacgtcgcatttgcgcagcctgtttgccccaccttcaccgtgtggaacaagtgtctgacgattatcactgggctccctatcccagaccatttggactgcacagagcagctgccgtgagcgtctggccacatggagctgctttctggggaacagtaaggttcaggccactatttaggggactgagaaagcacaggcttcatgagtgtaatgaaatctcaccagaagtgtcccgaaatcggctcagatagggctcaaaacaagagattcctctccttttactgtgtcttgtattaagtacgggctttaataatttctttaatttttttgtatttagaggaaaatctatagattatttataagagaaacataatcaggattacaacttttaggaattacttggttttgcacattaagaggcccataagtttatcagctatttacaaccttcatttcatcacaatctgtgggcttacacatgatgatcccatggtaggtcttctcacctcgatggtgcataacaggatgtgtttgaacctagtaggggaggaaacaggctttcttactctggtttaatttgaagtgttttaattgtgatgtcaaaaagttgtatcagatcaactaaaatggagagcaagacagagaatgaaaagagttgattttggacctcggaccttgccgtggctaaatctttaccttctcatagctgatgggataatgttggaaagaaaggttctgaatcctttggccacattttgccctgcttctctcagggttaagggttctggaagaacattaagaatgagattgcaattgaaaatagtcattttgaatcctattgattattcaaaaattcaggctgatttgtcttttatcagaggtaggattctgttttatagtatagaatctactttatccttccttttaatagttcctttagacctgtgaaatttcttcactacatttaatagttctcctatttcccgctcccccatatcaattttccttttgtctccggggctgagtaaataaacatgttctgtcacaaatagcagcaccactttggattgattttgctctccaggacatcagcacatggccctgatcagcactaccacatccaaacataagtcactgaaaaacacttaatatttatgagttggtaatgacaagggacattgtataaagtactatttgctagattcatgcctcaaaagttattataaacagacctttattaaacacatcttgaaagatgtagaagtccctctatagtctagtatagtttacaatagagttgtaagaccaaaaaaaaaaaaaaaaaaattcaaactcgttattcaggaacctgcttataaaatgtcagctgggattctttgcatgccaatctgatgcgttggaatggtccatgaattaaggctttcttgagcagttcttggcccagaactctggcattggttctagtttgatgaagggcatgacctctataaatggtttcaattgctaaaatatttacctgggatactgggtcagccattttgactgagcagactagtggatttagacattgtttttagttattttgtttttaaccaaatcaaccaactgcctccctgaaataagtcaatgaactcattgtttcagcatcacgtggccaaaggtcatgtgattgcaaatctggatttcaagggaggccaagccagcttcctgggtccttccatcctcttccctagcagacactctcctttttcttaacagatagattctatatatttactatattatttatacccagatgaatattttgatagatacctaagacaatttcacatctaaaagatggacgcctcaatggaaaaaaaacaatctttctctggaaaccttataggtttttctttttattacaatataaaagcaatgtgtgtttgccttctctgagtaaactgaaagggttgtctcagtaatttttacatacattttgggtaactggataatggatattttaatgcactttgtacactaacaggttctaaataaaagggtctaaaactcagcttctgagtttttaaaatcacggtctccaggtaccaataaatgctacagtttgccttatgatgttaacataaaacacttagtagaaggacaatatttccatgaaaataatgtttttcaatattaagaagttactactcaaattttcacagtaagccatttagggtatgtttggctatttttataaggacatgagagattatgtcataattttgttgtggaagtctcactcttggctaacttaaaagcattgtggatagtagcagttactagttccaggttgtcatatttacaggaaaatatgtatatggtgaaaggccaccgtgtttaattactataatgatgtagaaaagattcccgtgtgaattttttttttgaaagtctaaaaaatgtatgctgtaaaaatttgctgcagtgtaattttgcattctctttaaactgattgaggtcacagtattttattatttggggtcctcaccacaggaaacactgcgatacaggggcaaaagagatggcagtgccaatttaaattaatacaacaaaatcaatgcagcaccaaccaagactgccaggtctggtgtcatgggtatgcccagagcccaggagttcagaagggccctaagcctgatttaatgctctgctgttgatgtcttgaaattcttaacaatttttgaacaaggggcctgcgttttcacttcgcactgggccttgcaaattacatagcgagtgctcataaaagaactcagaaacgtggtacctctcttcctggtggatacaaataaagaaatctggatccaaagttgaaagttgctggcgatatcattcaagtaggactctaaatagtggattaagatgagggtgggcctgggtgaagattctttccagctttaaaagaaagtgacttcaaaaactgactgcaaatattgacgatggtttctgctggaggaaaagaaacagcttgaatacagacaggcttttttattacggtactgatatattgaccttaaacttgctgaggaactgaactaacgtcctccagtgaccgtggaattccatctcagctccaggaacatgcagatacctgcaaagagacacgcatatatgctggcatacatgtgcatttggtgttgggaagttgaccatctggtctatcttaataaaatggtaaaaagcacaccaagacaatgatgggggcaggaggatgtttttgaaaacagcgcttctcaaccagtgctcgattttgccccccaggagacatttggcaatgcaatggcaacttttggttgtcgcagccggggaagggaagctaccagcatctagtgcgtagaggtcatggacgccgttaaacatcctacagtgcaagcgcagcccccgaccacgaagagttgtcttgctcaaatatcaacagtgctgcagtgtagaaacttgatcgttggttttcttttaatgcaaaactctcataaaaacctttcacttttcctgtcattgattatatgcttgatacacccaaaaagaaaaggggaggggcaccaattcacctacactccagtggctccatcacctttaaaaatatttataaaatagttccaaaaatctgatatctgaaaagcaatccaagcctgtgtaaatgggaatcactgataagtatcatcatctgtatcagcttggcttggacatgaaaaattgattctctttatgtcactccttgcacctggacaaattcaatccccggtacttaagtcacactgccaagccctcggccctgactattgtcttgattgctgttcctttctggttcaaaataaaatcatttttgtggcaccaagaaaaaaaaaaaaaaaaaaaaaca

SEQ ID NO: 26085 - DNA, 377 bp, Homo sapiens
  misc_feature (312)..(312): n is a, c, g, or t
  misc_feature (355)..(355): n is a, c, g, or t
  misc_feature (370)..(370): n is a, c, g, or t
attgtgggtgacaggagcagtgttttcctgctggacccgcaagccaccagctatttcctggtgacacaagctcttctcaggcggggctgcctgcaggctcccgttttctgagcccacgctgcccacagctgaccccagcgcagccccgggcacgcggcactttacatgggggcagcttgggcccagactcctccgctgtgtagcagatgaggaaaatcaggccagaggacaacaggctggcgttttgttgggaactgaagaggaatctgttgaacacagcgaccagatgaccttccatttcaccggcggcanagttttcagcgtgcagttcccaaaccccaaagctgaaccctgngccccatttgaatanggccaga

SEQ ID NO: 26086 - DNA, 360 bp, Homo sapiens
aattgtcagtgtccactatttggaaattctatgagcagtcagctgtctacagatacttgagtgccttttttttttttgctttacagatgcccgcctttattttttaaaatagctttagtgatgtaattcacataccttacagttcacccatttaaaatgtgtaattaggcctgggcagcatagggagacggccctcccatgtttctacaaaaaaaattttttttaagtgaaatcagcgtgtgcctgtagtcccaggtacttggaggcagaggtgagaggatcacttgagcccaggagttccaggctgcagtgagccgtgattgtgccactgtactcccgtctgggtgacagagaccggtc

SEQ ID NO: 26087 - DNA, 848 bp, Homo sapiens
tgtctagattgtcctccttcctccttcctattcatctatcccccacgatgttcatctttctgaagcatgtgtctgatcatacctctcctctgctcagaggttctcatcggttcccatctgtctagaaaataaaatgtgaacacttgaccttgatcaaaatcctttgtaatctgctgattacctacttctctacccttctcatttctctcttttacctaccctcatgcttgaatttcctgcctacttaacattgatcgctcttcacctttacacccctcacttaaaaccccagccctcactccccacacaaacgtggctcccagtgccctggtcaaaatctcactttccttcaagatccagccaagtccactgctgtcatgaagccttctctgattttccttttccacacctcttgcaggaaacaattcttcccttctctggactcctctagtattttacaatttcctccctgaaagcatttaatccccctcttgttctgagattattcacgcactcacctgagctcccaccacagtgattcagcatgtcatgagcagagccagtgagtgcttaacgtgtgctcaccagaagcacttagcgcagtgccttgcactgctcagcagctccatatttgtggaataaagcgtttgtttacttctccaaagtgtttattattccgaaaaggttaaatggctgtttttttttaaaaggtgttaacaaatttaagtatttatctctgaccaattttgaggaagaataaacctgttcatgtgttctaactcatcagagaatagaaatatgtttttgtgaaacttgtttttaacccaaggatttattgacaaaaaaaa

SEQ ID NO: 26088 - DNA, 328 bp, Homo sapiens
gatttgtgggtatagggagtatgcagcccacaaatttccccaggatccgttttcttgcctttaaaaaccaatgcgccaggcacagtggctcacgcctggaatccaagcactttgggaggctgaggtggttgaatcactcgaggtcaggggttcaagaccagtctgaccaacatggtgaaaccccgtctctacaaaaatacaaaagattaactgggcgtggtggcacgtgcctgtaatcccagctactctggaggctgaggcagaagaatcgcttgaaccttggggcggatgttgcagtgagccaagatcatgccattgcactctagac

SEQ ID NO: 26089 - DNA, 371 bp, Homo sapiens
agaaaacaaaacaataatggccattaaacaaaaatacatgatgtagcttgctaaataatttatgggctttttggaagtgttttgggcagatttcaacctaacattactcttatttcctattcttttccttatagaatggagtatcatgataactaggtactaagtcaagtcaacagtgggccaagttgcctctgtggaatttaagctttacatgaagagagacttaagtatatttagtccttggtggtagaactctttagtgtgaagtcaagtagttgcttttgtagctttgattcaaagaagccaaaatcaaatgctatggggcctggaacatggtgaaagtggactatctggcactgaaacttggaaac

SEQ ID NO: 26090 - DNA, 338 bp, Homo sapiens
aggagaactttcttcaaaaagtttaacttttctcacagggttcgcttatgcaacaaattccccaagaatatttgaaaggcctcatgtgctcaaatgtgacaaacgggtctcactctgtcatccaggctggagtgcagtgatgtgatcattgttcactgtaccctcaattttccaagctcaagtcatcctcccgcctcagcctcccaagcagctgagactacaagtacgcaccaccacgtccagctaaattttttaaaatttattattttttttgatatggagttttgctcttgttgcccaggctggagtgcaatggcacgatctcagctcactgtaac

SEQ ID NO: 26091 - DNA, 230 bp, Homo sapiens
taaaaaactgtcatgtttaattgttccagaactagtcactagtagtgtcatcttcttgctagtgcatggcctttcagattttatatctatctatatctatctatctatctatatatatgttgacatatatgattttcaaattacacacatatatacacacatacacacccctttatatgtatgtcctggatcatgattgcaaaatggaattctgactggggttacagtaa

SEQ ID NO: 26092 - DNA, 732 bp, Homo sapiens
  misc_feature (2)..(2): n is a, c, g, or t
cngtccggaattcccgggatcgtccagccgccgagcagggtgcttgagtgtctctgcagaaaagactccaggaccccgccaccatgttcccggagcccccaaccccggggcctccatcgcccgacacgcctcccgactccagtcgcatcagccacggcccagtgcccccctgggccctggccaccatcgtgctggtctcaggcctcctcatcttcagctgctgtttctgtctctaccggaagagctgtcggaggcggacaggcaagaagagccaggcccaagcccaggtccaccttcaggaagtgaaggggctgggccagagttacatagacaaggtgcagccagaagtagaggagctggagccagcaccatccgggccagggcagcaggtggcagacaagcatgagctaggacgactgcagtactccctggattatgacttccagagtggccagctgctggtgggcattctgcaagcaatgggattggcagccttggatcttggtggctcctcggacccctatgtgcgggtctacctgctgccggacaaacggaggcggtacgagaccaaggtgcatcggcagacgctgaaccctcactttggggagaccttcgccttcaaggtcccctacggtggagctggggggcagggctgcctgctctggccgcgtgtccgacttcccgccgctccctccccccctgacgcccctcccgcgccgctccgcgctcccg

SEQ ID NO: 26093 - DNA, 1730 bp, Homo sapiens
tgctccgctccgcggctcccccgccccggagagctccgcgatcagcacccgggacagcgccaccgcccacgtgcagggggtggggtcctgggcggggctggcgcctcggcgtctcccgggagtgtcccgtccagccgccgagcagggtgcttgagtgtctctgcagaaaagactccaggaccccgccaccatgttcccggagcccccaaccccggggcctccatcgcccgacacgcctcccgactccagtcgcatcagccacggcccagtgcccccctgggccctggccaccatcgtgctggtctcaggcctcctcatcttcagctgctgtttctgtctctaccggaagagctgtcggaggcggacaggcaagaagagccaggcccaagcccaggtccaccttcaggaagtgaaggggctgggccagagttacatagacaaggtgcagccagaagtagaggagctggagccagcaccatccgggccagggcagcaggtggcagacaagcatgagctaggacgactgcagtactccctggattatgacttccagagtggccagctgctggtgggcattctgcaagcaatgggattggcagccttggatcttggtggctcctcggacccctatgtgcgggtctacctgctgccggacaaacggaggcggtacgagaccaaggtgcatcggcagacgctgaaccctcactttggggagaccttcgccttcaaggtcccctacgtggagctggggggcagggtgctggtcatggcggtgtacgacttcgaccgcttctctcgcaatgacgccatcggggaggtgcgggtccctatgagctccgtggacctggggcggccagtgcaggcctggcgggagctgcaggcggctccgcgggaggagcaggagaagcttggggacatctgcttctccctccgctatgtccccacggccgggaagctcaccgtcatcgtcctggaggctaaaaacctgaagaagatggacgtaggaggactgtcagatccatacgtcaaggtccacctgctgcagggcggcaaaaaggtgcggaagaagaaaaccaccatcaagaagaacactctgaacccctattacaacgaagctttcagcttcgaggtgccctgtgaccaagtccagaaggtgcaggtggagctgaccgtgctggactacgacaagctgggcaagaacgaggccatcgggagggtggccgtgggggcggccgccggcggggctggcctgcggcactgggcggacatgctggccaacccgcggcggcccattgcccagtggcactcgctgcggcccccggaccgagtgaggctgctgcctgcgccctgactcccaccccaagcccccggccaagcctggactctagcccctgaccccagactcccgagaccggccaaagccaagccagccccacccttaagcttcctctgacggttaccctccccccaccttccaccccaaccatctgaaccattcctgtcttctcacccccaacgatgccaatcacgacaactttccagcacactcccccgaccctcgcggacacacccagatgccccagggaccccgggaagggaaggcagcctggtttctcctgcccccgggtcctgccccctgctttgacaatcagccatcctcgtctgctctcctctctcttccaacacagcccatccctgcactgctcctggggccaaataaatattcagca

SEQ ID NO: 26094 - DNA, 2652 bp, Homo sapiens
tgctccgctccgcggctcccccgccccggagagctccgcgatcagcacccgggacagcgccaccgcccacgtgcagggggtggggtcctgggcggggctggcgcctcggcgtctcccgggagtgtcccgtccagccgccgagcaggtaggagctgctgggacccccgccctcagcccatccgcatccgcatccctagaggaaaggggtgtgcgagtgggggctggggcactggggagacaaccagagggagggcagcagcctgaagcggagagacagggatctggggacgcgagacaggtatggagaagacaaagagccgagggcggggagtggggcgcaggcggaggggagagggagagaccctggagacagaggccaggcgatagggaagagagacaggcgggttggggaggcagacacagggaagacgcctatgtggggtcaagaggcagcgtggagaccgaggcggtcacgagagcagcacggatgcgtggagagaccaacaggccaagaaggatgagggggctcagcacaggcaccgggcagcccccgacccgccctccagcaaaattggggagagggaagagggaacctgcgtctcagctcccaggaccaggtgcggagggagcagtcggctgtgggcgctcggaccacaggctgcccgctccccacctcgcgggacctcaggatcccagtcgggctattggggggttcccaggcaccggtgggccccggagcgagcctgccccgccgggactccgcgtctgtgcgtcagccccgcccgttgtcctggcaacaacccgttgcccgggcaaccagctttgctctcaccccgcttgagaggagcccggctgttgctctgggcaacgcggtctgctggttcccacgtctgccttcgcccgcttccggttcagaccctgcggaggggcgaggacgaggcagaagtcagcgggatgcctgtggggccgtggaggaagagggtatccctttaggatggaactaggtcctggacaccccctctcaagtgcggggaggctgatactacaactcccagcatgactcgcggtggctgtccggtttctgcgcggctgttcgcgcaaaggcctcatgggagttggagttctttgttgtgcgtggggctcaaaggacgtctggggtgggaatgggggactagggtgcttgagtgtctctgcagaaaagactccaggaccccgccaccatgttcccggagcccccaaccccggggcctccatcgcccgacacgcctcccgactccagtcgcatcagccacggcccagtgcccccctgggccctggccaccatcgtgctggtctcaggcctcctcatcttcagctgctgtttctgtctctaccggaagagctgtcggaggcggacaggcaagaagagccaggcccaagcccaggtccaccttcaggaagtgaaggggctgggccagagttacatagacaaggtgcagccagaagtagaggagctggagccagcaccatccgggccagggcagcaggtggcagacaagcatgagctaggacgactgcagtactccctggattatgacttccagagtggccagctgctggtgggcattctgcaagcaatgggattggcagccttggatcttggtggctcctcggacccctatgtgcgggtctacctgctgccggacaaacggaggcggtacgacttcgaccgcttctctcgcaatgacgccatcggggaggtgcgggtccctatgagctccgtggacctggggcggccagtgcaggcctggcgggagctgcaggcggctccgcgggaggagcaggagaagcttggggacatctgcttctccctccgctatgtccccacggccgggaagctcaccgtcatcgtcctggaggctaaaaacctgaagaagatggacgtaggaggactgtcagatccatacgtcaaggtccacctgctgcagggcggcaaaaaggtgcggaagaagaaaaccaccatcaagaagaacactctgaacccctattacaacgaagctttcagcttcgaggtgccctgtgaccaagtccagaaggtgcaggtggagctgaccgtgctggactacgacaagctgggcaagaacgaggccatcgggagggtggccgtgggggcggccgccggcggggctggcctgcggcactgggcggacatgctggccaacccgcggcggcccattgcccagtggcactcgctgcggcccccggaccgagtgaggctgctgcctgcgccctgactcccaccccaagcccccggccaagcctggactctagcccctgaccccagactcccgagaccggccaaagccaagccagccccacccttaagcttcctctgacggttaccctccccccaccttccaccccaaccatctgaaccattcctgtcttctcacccccaacgatgccaatcacgacaactttccagcacactcccccgaccctcgcggacacacccagatgccccagggaccccgggaagggaaggcagcctggtttctcctgcccccgggtcctgccccctgctttgacaatcagccatcctcgtctgctctcctctctcttccaacacagcccatccctgcactgctcctggggccaaataaatattcagca

SEQ ID NO: 26095 - DNA, 814 bp, Homo sapiens
tgagggttcatttccttagaaacctggctgcgcaggaagaaaggcgccagagcctcctcctcgccgcaggctccgtccctctcgtctcccaccccctcccccgtcccgagctccggggccccgagccctcgggtggcagcgagaggtaccctcagccgtgaaaacggacaccgccccttccggggcctcctcccctcacgctcctctctcctcttcctcccgcgcccaccccagaaggtgcaggtggagctgaccgtgctggactacgacaagctgggcaagaacgaggccatcgggagggtggccgtgggggcggccgccggcggggctggcctgcggcactgggcggacatgctggccaacccgcggcggcccattgcccagtggcactcgctgcggcccccggaccgagtgaggctgctgcctgcgccctgactcccaccccaagcccccggccaagcctggactctagcccctgaccccagactcccgagaccggccaaagccaagccagccccacccttaagcttcctctgacggttaccctccccccaccttccaccccaaccatctgaaccattcctgtcttctcacccccaacgatgccaatcacgacaactttccagcacactcccccgaccctcgcggacacacccagatgccccagggaccccgggaagggaaggcagcctggtttctcctgcccccgggtcctgccccctgctttgacaatcagccatcctcgtctgctctcctctctcttccaacacagcccatccctgcactgctcctggggccaaataaatattcagca

SEQ ID NO: 26096 - DNA, 2760 bp, Homo sapiens
tgctccgctccgcggctcccccgccccggagagctccgcgatcagcacccgggacagcgccaccgcccacgtgcagggggtggggtcctgggcggggctggcgcctcggcgtctcccgggagtgtcccgtccagccgccgagcaggtaggagctgctgggacccccgccctcagcccatccgcatccgcatccctagaggaaaggggtgtgcgagtgggggctggggcactggggagacaaccagagggagggcagcagcctgaagcggagagacagggatctggggacgcgagacaggtatggagaagacaaagagccgagggcggggagtggggcgcaggcggaggggagagggagagaccctggagacagaggccaggcgatagggaagagagacaggcgggttggggaggcagacacagggaagacgcctatgtggggtcaagaggcagcgtggagaccgaggcggtcacgagagcagcacggatgcgtggagagaccaacaggccaagaaggatgagggggctcagcacaggcaccgggcagcccccgacccgccctccagcaaaattggggagagggaagagggaacctgcgtctcagctcccaggaccaggtgcggagggagcagtcggctgtgggcgctcggaccacaggctgcccgctccccacctcgcgggacctcaggatcccagtcgggctattggggggttcccaggcaccggtgggccccggagcgagcctgccccgccgggactccgcgtctgtgcgtcagccccgcccgttgtcctggcaacaacccgttgcccgggcaaccagctttgctctcaccccgcttgagaggagcccggctgttgctctgggcaacgcggtctgctggttcccacgtctgccttcgcccgcttccggttcagaccctgcggaggggcgaggacgaggcagaagtcagcgggatgcctgtggggccgtggaggaagagggtatccctttaggatggaactaggtcctggacaccccctctcaagtgcggggaggctgatactacaactcccagcatgactcgcggtggctgtccggtttctgcgcggctgttcgcgcaaaggcctcatgggagttggagttctttgttgtgcgtggggctcaaaggacgtctggggtgggaatgggggactagggtgcttgagtgtctctgcagaaaagactccaggaccccgccaccatgttcccggagcccccaaccccggggcctccatcgcccgacacgcctcccgactccagtcgcatcagccacggcccagtgcccccctgggccctggccaccatcgtgctggtctcaggcctcctcatcttcagctgctgtttctgtctctaccggaagagctgtcggaggcggacaggcaagaagagccaggcccaagcccaggtccaccttcaggaagtgaaggggctgggccagagttacatagacaaggtgcagccagaagtagaggagctggagccagcaccatccgggccagggcagcaggtggcagacaagcatgagctaggacgactgcagtactccctggattatgacttccagagtggccagctgctggtgggcattctgcaagcaatgggattggcagccttggatcttggtggctcctcggacccctatgtgcgggtctacctgctgccggacaaacggaggcggtacgagaccaaggtgcatcggcagacgctgaaccctcactttggggagaccttcgccttcaaggtcccctacgtggagctggggggcagggtgctggtcatggcggtgtacgacttcgaccgcttctctcgcaatgacgccatcggggaggtgcgggtccctatgagctccgtggacctggggcggccagtgcaggcctggcgggagctgcaggcggctccgcgggaggagcaggagaagcttggggacatctgcttctccctccgctatgtccccacggccgggaagctcaccgtcatcgtcctggaggctaaaaacctgaagaagatggacgtaggaggactgtcagatccatacgtcaaggtccacctgctgcagggcggcaaaaaggtgcggaagaagaaaaccaccatcaagaagaacactctgaacccctattacaacgaagctttcagcttcgaggtgccctgtgaccaagtccagaaggtgcaggtggagctgaccgtgctggactacgacaagctgggcaagaacgaggccatcgggagggtggccgtgggggcggccgccggcggggctggcctgcggcactgggcggacatgctggccaacccgcggcggcccattgcccagtggcactcgctgcggcccccggaccgagtgaggctgctgcctgcgccctgactcccaccccaagcccccggccaagcctggactctagcccctgaccccagactcccgagaccggccaaagccaagccagccccacccttaagcttcctctgacggttaccctccccccaccttccaccccaaccatctgaaccattcctgtcttctcacccccaacgatgccaatcacgacaactttccagcacactcccccgaccctcgcggacacacccagatgccccagggaccccgggaagggaaggcagcctggtttctcctgcccccgggtcctgccccctgctttgacaatcagccatcctcgtctgctctcctctctcttccaacacagcccatccctgcactgctcctggggccaaataaatattcagca

SEQ ID NO: 26097 - DNA, 2587 bp, Homo sapiens
tgctccgctccgcggctcccccgccccggagagctccgcgatcagcacccgggacagcgccaccgcccacgtgcagggggtggggtcctgggcggggctggcgcctcggcgtctcccgggagtgtcccgtccagccgccgagcaggtaggagctgctgggacccccgccctcagcccatccgcatccgcatccctagaggaaaggggtgtgcgagtgggggctggggcactggggagacaaccagagggagggcagcagcctgaagcggagagacagggatctggggacgcgagacaggtatggagaagacaaagagccgagggcggggagtggggcgcaggcggaggggagagggagagaccctggagacagaggccaggcgatagggaagagagacaggcgggttggggaggcagacacagggaagacgcctatgtggggtcaagaggcagcgtggagaccgaggcggtcacgagagcagcacggatgcgtggagagaccaacaggccaagaaggatgagggggctcagcacaggcaccgggcagcccccgacccgccctccagcaaaattggggagagggaagagggaacctgcgtctcagctcccaggaccaggtgcggagggagcagtcggctgtgggcgctcggaccacaggctgcccgctccccacctcgcgggacctcaggatcccagtcgggctattggggggttcccaggcaccggtgggccccggagcgagcctgccccgccgggactccgcgtctgtgcgtcagccccgcccgttgtcctggcaacaacccgttgcccgggcaaccagctttgctctcaccccgcttgagaggagcccggctgttgctctgggcaacgcggtctgctggttcccacgtctgccttcgcccgcttccggttcagaccctgcggaggggcgaggacgaggcagaagtcagcgggatgcctgtggggccgtggaggaagagggtatccctttaggatggaactaggtcctggacaccccctctcaagtgcggggaggctgatactacaactcccagcatgactcgcggtggctgtccggtttctgcgcggctgttcgcgcaaaggcctcatgggagttggagttctttgttgtgcgtggggctcaaaggacgtctggggtgggaatgggggactagggtgcttgagtgtctctgcagaaaagactccaggaccccgccaccatgttcccggagcccccaaccccggggcctccatcgcccgacacgcctcccgactccagtcgcatcagccacggcccaggtgcagccagaagtagaggagctggagccagcaccatccgggccagggcagcaggtggcagacaagcatgagctaggacgactgcagtactccctggattatgacttccagagtggccagctgctggtgggcattctgcaagcaatgggattggcagccttggatcttggtggctcctcggacccctatgtgcgggtctacctgctgccggacaaacggaggcggtacgagaccaaggtgcatcggcagacgctgaaccctcactttggggagaccttcgccttcaaggtcccctacgtggagctggggggcagggtgctggtcatggcggtgtacgacttcgaccgcttctctcgcaatgacgccatcggggaggtgcgggtccctatgagctccgtggacctggggcggccagtgcaggcctggcgggagctgcaggcggctccgcgggaggagcaggagaagcttggggacatctgcttctccctccgctatgtccccacggccgggaagctcaccgtcatcgtcctggaggctaaaaacctgaagaagatggacgtaggaggactgtcagatccatacgtcaaggtccacctgctgcagggcggcaaaaaggtgcggaagaagaaaaccaccatcaagaagaacactctgaacccctattacaacgaagctttcagcttcgaggtgccctgtgaccaagtccagaaggtgcaggtggagctgaccgtgctggactacgacaagctgggcaagaacgaggccatcgggagggtggccgtgggggcggccgccggcggggctggcctgcggcactgggcggacatgctggccaacccgcggcggcccattgcccagtggcactcgctgcggcccccggaccgagtgaggctgctgcctgcgccctgactcccaccccaagcccccggccaagcctggactctagcccctgaccccagactcccgagaccggccaaagccaagccagccccacccttaagcttcctctgacggttaccctccccccaccttccaccccaaccatctgaaccattcctgtcttctcacccccaacgatgccaatcacgacaactttccagcacactcccccgaccctcgcggacacacccagatgccccagggaccccgggaagggaaggcagcctggtttctcctgcccccgggtcctgccccctgctttgacaatcagccatcctcgtctgctctcctctctcttccaacacagcccatccctgcactgctcctggggccaaataaatattcagca

SEQ ID NO: 26098 - DNA, 864 bp, Homo sapiens
ggggctctggtgatgggcccctctcctttcagcaggagaagcttggggacatctgcttctccctccgctatgtccccacggccgggaagctcaccgtcatcgtcctggaggctaaaaacctgaagaagatggacgtaggaggactgtcagatccatacgtcaaggtccacctgctgcagggcggcaaaaaggtgcggaagaagaaaaccaccatcaagaagaacactctgaacccctattacaacgaagctttcagcttcgaggtgccctgtgaccaagtccagaaggtgcaggtggagctgaccgtgctggactacgacaagctgggcaagaacgaggccatcgggagggtggccgtgggggcggccgccggcggggctggcctgcggcactgggcggacatgctggccaacccgcggcggcccattgcccagtggcactcgctgcggcccccggaccgagtgaggctgctgcctgcgccctgactcccaccccaagcccccggccaagcctggactctagcccctgaccccagactcccgagaccggccaaagccaagccagccccacccttaagcttcctctgacggttaccctccccccaccttccaccccaaccatctgaaccattcctgtcttctcacccccaacgatgccaatcacgacaactttccagcacactcccccgaccctcgcggacacacccagatgccccagggaccccgggaagggaaggcagcctggtttctcctgcccccgggtcctgccccctgctttgacaatcagccatcctcgtctgctctcctctctcttccaacacagcccatccctgcactgctcctggggccaaataaatattcagca

SEQ ID NO: 26099 - DNA, 1672 bp, Homo sapiens
ggcacgaggccagaatgctggagcgtaggtgaaaggacaaaagccagacacatttcaacatgagggacccactgacagattgtccgtataataaagtatacaagaacctaaaggagttttctcaaaatggagagaatttctgcaaacaggtcacatctgttcttcagcaaagggcaaacctggaaattagctatgccaaaggacttcagaaactggcaagcaagctgagcaaagcattacagaacacgagaaaaagttgtgttagcagtgcctgggcctgggcctcagagggaatgaaatccacagcggacctgcatcaaaaacttggcaaagcaattgaattggaagcaataaaaccgacttatcaagtcctaaatgtacaagagaagaagagaaaatcacttgacaatgaagttgaaaagacagcaaatcttgtcattagcaactggaatcagcaaattaaggccaagaagaaattaatggttagtaccaagaaacatgaagcacttttccagcttgtagaaagctccaagcaatctatgactgagaaggagaagcggaagctcctcaataaactgacaaaatcaactgaaaagttggaaaaggaagatgaaaattactaccaaaaaaacatggcgggttattctaccagactgaaatgggaaaacacactagagaactgctaccagagcattctggagctggagaaggaaagaattcaacttttatgcaataacttaaaccagtacagccaacatatttctctttttggccaaaccctgaccacatgccacacgcagattcactgtgccatcagcaagattgacattgaaaaagatatccaggctgtaatggaagaaactgcaattttatctacagaaaacaaatctgagttcctgttaacggattactttgaagaagatcctaacagtgcaatggataaagagagacgaaagtctttactaaaaccaaaattattgagactgcagagagacattgaaaaagcctcaaaagacaaggaaggcctggaacgaatgcttaaaacgtactccagcacctcctccttctctgatgcaaagagccagaaagacacagcagcgttaatggatgagaacaatttgaaactagaccttttggaagcgaactcctacaaactgtcatcaatgttagcagaacttgagcaaagacctcaacccagccatccttgtagtaattccatcttcaggtggagggaaaaggagcatactcatagctatgtgaaaatatctcggccttttttaatgaagagattagagaatattgtgagcaaggcatcttctggtgggcagagcaatccaggttcttcaactccagcccctggtgcagcccagctcagcagcagactttgcaaggccttgtattcttttcaagccaggcaagatgatgagttgaatttggaaaagggtgacattgtgattatacacgagaaaaaagaagaaggatggtggtttggatctttgaatgggaaaaaaggccattttcctgccgcttatgtggaggagttaccttcaaatgctggcaacacagctacaaaggcataaaacaagactctgaacatactaccttcacactcggtaatcaacaatacagtgtggttcaaataagaataaagtgctcttacctttaaaaaaaa

SEQ ID NO: 26100 - DNA, 1708 bp, Homo sapiens
ggcacgaggccagaatgctggagcgtaggtgaaaggacaaaagccagacacatttcaacatgagggacccactgacagattgtccgtataataaagtatacaagaacctaaaggagttttctcaaaatggagagaatttctgcaaacaggtcacatctgttcttcagcaaagggcaaacctggaaattagctatgccaaaggacttcagaaactggcaagcaagctgagcaaagcattacagaacacgagaaaaagttgtgttagcagtgcctgggcctgggcctcagagggaatgaaatccacagcggacctgcatcaaaaacttggcaaagcaattgaattggaagcaataaaaccgacttatcaagtcctaaatgtacaagagaagaagagaaaatcacttgacaatgaagttgaaaagacagcaaatcttgtcattagcaactggaatcagcaaattaaggccaagaagaaattaatggttagtaccaagaaacatgaagcacttttccagcttgtagaaagctccaagcaatctatgactgagaaggagaagcggaagctcctcaataaactgacaaaatcaactgaaaagttggaaaaggaagatgaaaattactaccaaaaaaacatggcgggttattctaccagactgaaatgggaaaacacactagagaactgctaccagagcattctggagctggagaaggaaagaattcaacttttatgcaataacttaaaccagtacagccaacatatttctctttttggccaaaccctgaccacatgccacacgcagattcactgtgccatcagcaagattgacattgaaaaagatatccaggctgtaatggaagaaactgcaattttatctacagaaaacaaatctgagttcctgttaacggattactttgaagaagatcctaacagtgcaatggataaagagagacgaaagtctttactaaaaccaaaattattgagactgcagagagacattgaaaaagcctcaaaagacaaggaaggcctggaacgaatgcttaaaacgtactccagcacctcctccttctctgatgcaaagagccagaaagacacagcagcgttaatggatgagaacaatttgaaactagaccttttggaagcgaactcctacaaactgtcatcaatgttagcagaacttgagcaaagacctcaacccagccatccttgtagtaattccatcttcaggtggagggaaaaggagcatactcatagctatgtgaaaatatctcggccttttttaatgaagagattagagaatattgtgagcaaggcatcttctggtgggcagagcaatccaggttcttcaactccagcccctggtgcagcccagctcagcagcagactttgcaaggccttgtattcttttcaagccaggcaagatgatgagttgaatttggaaaagggtgacattgtgattatacacgagaaaaaagaagaaggatggtggtttggatctttgaatgggaaaaaaggccattttcctgccgcttatgtggaggagttaccttcaaatgctggcaacacagctacaaaggcataaaacaagactctgaacatactaccttcacactcggtaatcaacaatacagtgtggttcaaataagaagtagatggatgatgttcctttttagaagtagtcattaaaataggtgcaacaaccaagaaaaa

SEQ ID NO: 26101 - DNA, 1560 bp, Homo sapiens
ggcacgaggccagaatgctggagcgtaggtgaaaggacaaaagccagacacatttcaacatgagggacccactgacagattgtccgggcaaacctggaaattagctatgccaaaggacttcagaaactggcaagcaagctgagcaaagcattacagaacacgagaaaaagttgtgttagcagtgcctgggcctgggcctcagagggaatgaaatccacagcggacctgcatcaaaaacttggcaaagcaattgaattggaagcaataaaaccgacttatcaagtcctaaatgtacaagagaagaagagaaaatcacttgacaatgaagttgaaaagacagcaaatcttgtcattagcaactggaatcagcaaattaaggccaagaagaaattaatggttagtaccaagaaacatgaagcacttttccagcttgtagaaagctccaagcaatctatgactgagaaggagaagcggaagctcctcaataaactgacaaaatcaactgaaaagttggaaaaggaagatgaaaattactaccaaaaaaacatggcgggttattctaccagactgaaatgggaaaacacactagagaactgctaccagagcattctggagctggagaaggaaagaattcaacttttatgcaataacttaaaccagtacagccaacatatttctctttttggccaaaccctgaccacatgccacacgcagattcactgtgccatcagcaagattgacattgaaaaagatatccaggctgtaatggaagaaactgcaattttatctacagaaaacaaatctgagttcctgttaacggattactttgaagaagatcctaacagtgcaatggataaagagagacgaaagtctttactaaaaccaaaattattgagactgcagagagacattgaaaaagcctcaaaagacaaggaaggcctggaacgaatgcttaaaacgtactccagcacctcctccttctctgatgcaaagagccagaaagacacagcagcgttaatggatgagaacaatttgaaactagaccttttggaagcgaactcctacaaactgtcatcaatgttagcagaacttgagcaaagacctcaacccagccatccttgtagtaattccatcttcaggtggagggaaaaggagcatactcatagctatgtgaaaatatctcggccttttttaatgaagagattagagaatattgtgagcaaggcatcttctggtgggcagagcaatccaggttcttcaactccagcccctggtgcagcccagctcagcagcagactttgcaaggccttgtattcttttcaagccaggcaagatgatgagttgaatttggaaaagggtgacattgtgattatacacgagaaaaaagaagaaggatggtggtttggatctttgaatgggaaaaaaggccattttcctgccgcttatgtggaggagttaccttcaaatgctggcaacacagctacaaaggcataaaacaagactctgaacatactaccttcacactcggtaatcaacaatacagtgtggttcaaataagaa

SEQ ID NO: 26102 - DNA, 313 bp, Homo sapiens
aattgaggtaaaaagttgttggaaagtattagaactacagaggattgagtagatttttaaaacacaggaaacaagtagaacttagaaatgatgtaacagttaagtggaagagtttggcgagctaaattttcatctcttagagtagggagtcagtggacaccaagatagtacatttcaaaataggcacataagaatattatttagcttattctttagaattaaaaagagaaaagttcaatgtgcttctagggagggcaagtgttgaattttttttatcatgtactgtactatttcattttttattatgtacaca

SEQ ID NO: 26103 - DNA, 155 bp, Homo sapiens
cgaaggagaggggcagccgcaaattagaccttcttcctgggggctcaggccagtagggactgtccgtggtgcccttccctttctttctcctcctgaacgagagccaacgctgccccttcccaggactggatctgagccaaccaaatcctacagcg

SEQ ID NO: 26104 - DNA, 176 bp, Homo sapiens
ctgctgtgtcctgccctgtcctgccccactccacctcgttctccctcccctccttaactcttcccttccttccccataggtaatgactggcaataattttgtgtgtatattgtgtgtacatttgtgtgtatatccttccagaaatttttggcgcatttatatacacagtacatatg

SEQ ID NO: 26105 - DNA, 444 bp, Homo sapiens
tagacagagtctcaatggcatgatcttggctcactgcaacctccgcctcatgggttcaagtaattctcctgcctcagcctcccaagtagttaggattacaggtgtgtgccaccacacctggctaatttttgtacttttagtagagacgggttgcaccatgttggccaggctggtctcgaactcctagcctcaagtgatctgcccacctcagcgtcccaaagtgctgggattacaggcatgggccaccacacctgactgcacgtgctctttctcatttacacgctctctcttgaacacacacacatacactttattccaatagactcaggagacaaaaattatcaatgttacacaaaataacagttgtcacaataataaaccattggctttcgtttttaaaagaaaatgctttgcgaacttcacagtgataaaagtactctaatg

SEQ ID NO: 26106 - DNA, 452 bp, Homo sapiens
cggcatactgcaacctctgactcccgggttcaagcagttctcctgcctcagcctcccaaatagctgggaatacaggcgcgtgccactacgcccagctaatttttgtatttttagtagagacggggttttgccatattgggcaggatggtcttgatctcttgacctcgtgatccgtctgcctcagcctcccaaagtgctgggattacaggcgtgagacaccgcgcccggatgtattatacatatttacataattgaagtaatgttatatgttttataaccaataatttatctgtcaacattacgttggtctatataatttatacttttttccatgttagtaagaatccttcaaacaatgtaatgaatttaattacacccccattattaggatactttcagtatttttcctaatgttaattatttttttccttttttctgagtctgcttgctag

SEQ ID NO: 26107 - DNA, 551 bp, Homo sapiens
  misc_feature (547)..(550): n is a, c, g, or t
ggttgcaatgagccgagatcacgctgttgcactccagcctgggcgacagagtgagactccatctcaaataaagaaagaaagaaggaaggaaagaaggaaggaaggaagagaaagagaaaggaaggaaggaaggaaggaaggaaggaaggaaggaaggaaggacacgaaagcaagcaagcaggcagcatccgtttagtgaccgtgctgaccatcgccagcacttgaaccagcctgggttgggggttatgattactggacttctgtgctgcccagttccaccacacccctactgtgcctttccttttcttcaggttcctgagctccctgtatatatcctagaatggttaaaaatgttaaactgtcaataccaggtgttattgaagatgcagagcaactggaacactcagacactgcttgtgggaatgtaaataggaacaaacacttcgaaaattctttgtcagtgttgactgtaaatatacccaatgacagtaattctactctgaaatatacgcccaagagtaaatacactaaaaaatgatataaaaannnna

SEQ ID NO: 26108 - DNA, 707 bp, Homo sapiens
  misc_feature (703)..(706): n is a, c, g, or t
ggttgcaatgagccgagatcacgctgttgcactccagcctgggcgacagagtgagactccatctcaaataaagaaagaaagaaggaaggaaagaaggaaggaaggaagagaaagagaaaggaaggaaggaaggaaggaaggaaggaaggaaggaaggaaggacacgaaagcaagcaagcaggcagcacctatcagaataagtcatccatgtgggaagggggtgaggggctactctctggcattaactttccatttctcccccaaaagctcagagcctgccctgtcctcagacactgaggtggagagagctgaactcctccaggctctcccttggggatttgcatccgtttagtgaccgtgctgaccatcgccagcacttgaaccagcctgggttgggggttatgattactggacttctgtgctgcccagttccaccacacccctactgtgcctttccttttcttcaggttcctgagctccctgtatatatcctagaatggttaaaaatgttaaactgtcaataccaggtgttattgaagatgcagagcaactggaacactcagacactgcttgtgggaatgtaaataggaacaaacacttcgaaaattctttgtcagtgttgactgtaaatatacccaatgacagtaattctactctgaaatatacgcccaagagtaaatacactaaaaaatgatataaaaannnna

SEQ ID NO: 26109 - DNA, 540 bp, Homo sapiens
  misc_feature (533)..(534): n is a, c, g, or t
  misc_feature (537)..(540): n is a, c, g, or t
gtgaagacgagaagaaggcaactgtctccaatccagacggagatgccaggcacagcccttctgtcacaaccctcagaaggaaccaaccctgccgacaccttggccttgtacttctggcctccagaaccgcaggaaagtacatttctgttgcttaggccgctcagcctgtggcactttgttacagcttctcacccagttcaggcccttttaattgattgctgggcctttgcagttgtttttgcttctaatatattcatctctcaatttatttctggaggctgccacccgaggggcagaacttcaattgtgtccctaatgggaaaccttgctgggatcatgtggtctacagcacaaggttgctaaagcatcttctgccagaattctgtgagtatctggttaggtgggtctggaatatactgagtttaaaaaagttaaataggtttctttactgcaagatgtttcagagactttaatatgctactctgctgtatgaatctccaggcaggaaatcttataaaatgtgtttctgaaannaannnn

SEQ ID NO: 26110 - DNA, 428 bp, Homo sapiens
cctggctgggtacggtggcctgtagtctcagccactcaggaggctgaggcaggaagatcacttgagcccaggagtttaaggctgcagtgagctatgattgcaccactgcattccagcctgggccacagggtgagacgctgtctcaaaaacagaatttgcattcctagtgctgctggtccagggacctcactttgagaaccactacttaaacaaggtggaaagttaccatttcacctaatgtagagaggccagaggtagggaggactccagacaatacaagttggagctcgtgtgcttcagttgtttctttggctactgtttgcctctgacaaggccaggcttcagggcaggtgttcgaggtgctttgtgatcccagcgtttggcaggggctgaagtgagaggatcacttgagcccagaaggttgaggc

SEQ ID NO: 26111 - DNA, 1954 bp, Homo sapiens
ataagtagatactctctgttccctcatctgtagattttttctgtgtgtgccatttagtaaggtaagattgaggtttgctctctgagaactaatgtagcatttaactctcctctaatgtggcatatagtaagaatccagtaaatcacaggtagtaatagttataatatggaaaaataggccttcgggggccatagttgagcaataccatttattactaggtaatgtatcctggatgcttctttggaaaggagtgattccttatggctggtgactcatgctctgttctcttggaagggtctttaggaagtggaaggtgtcgtgtcccatccttcacttgtctatctcacctgctttccctgcctgtatgccacctctgactttgctttcctaccacgtggcctggtcctggacatatgtggtgtttgcagcaaacagaagtctaaaaattttgaaggagggcccagccctacttctgccacttatcagacctgaattatgtggacactgctgggtttctttaaaataacttcagatctggtcttgaatggatcaagaaagattttcttaataaaacaaacaaaaacagcaatcctgtcctttatgaatttacttgttttggaaaacttaatttccacattggacaagagaaaaggtgaatcccggtaggtgagggcacaacctgggtatcactctcctctctagtgacacaagggtcaccctttgtcaccctcacctgtcaataccctcttacattttagaatttttctggcattcaaaaccttcaaattttaaaatcagaaccctgttctccagctaacacatccagattttccaacttcctgcatttttgtcttgcaggttattttatagtgcctgcttaaaacaggcaataatctattgatatcatagaaaatttagagtttgattgctctgcctatggagtagccattctttattcctttactttcttaataaacttgctttcacttaaaaaaagaaaactccaccttcatttataagtattttaagaaacaacctgttccttcattaattggacattattgactattttaaaacaaacatacagggtaatcttcccccagcaccgcccccagcagtcaccagcgagcctaatcatgttttggttcttttacacggaagtattttacatgaatggcaaacttacgttggatcagatggaaaaactttactagaaggagggctgtgtccaaactcttacagcagtgtagccagtaagtgattctgtccttgcatttgccaggggcaaaagcatacatcagtgccttttacctgagcagcatgtgtcagggcacgctcttaacctctaattactttcttctaagctggtagagtagagtcatgggaagagtatggagtcaggttgggtccaatcctggctgagtgaccactgacaagttgtatatctcctctgagccttgctttcctccttggtaaagtgaggataataatgccgacttcatggacttattttccaggttaagaacaagctgccaggtccccagaaagtgcttagtggggtgcagggtctgcccctttgctgggcactctacctactgaggcactgctgcccatctggaactcagtctatcaagaataagtgaaacttgcctttctccactgacaaattctctcagcctctgtttggcttacttggaatttgtttgacagtatatctgtctggcccataaagaggggaatttagacagggttgaaatgcatcaaattaagtcctgtctccacaaagaaaacacttttgtacttctgtgaaaaggctgcagagacgtggtgactggccatgagtcagcccaggactgtggtgcagctgtggtccttaatccctgccccacaaaagatttgatttaaatgccttgtcacacttgttgaaatctgggaagtggtatcgttaaaaaaa

SEQ ID NO: 26112 - DNA, 363 bp, Homo sapiens
tcgaccattgaacagatactaagagaaaaagacaattgaggtcttagagagttttgaatttaagagggaaaagaaagcagaagaaaacaatcaatttatttaggactttcctgtgtacattgctaattcaataacccattggcctgtgattactaagtgagcgaaattaggttcagggatttatgttcaggtactgtgtatctaaatgaagtatatctaatagtctttttactccaatcagtcaagcacaggaagggattgagcttgaaactggatgctttcattttacacagaatgaaaggaagtaaatgtaaatgagtaccaagagttttatgactggaggcagaaagaaatcaaaaagct

SEQ ID NO: 26113 - DNA, 827 bp, Homo sapiens
gactgtacaatctgactttaggactaaatataaaaccacagaatcatgatagtgtggtgcttgcatagggcagaaaaatagatcagtaggatgcaatagagagcccagaaaggttaaaaaaaaaattgttagggaaaggacagtgttttcaataaatggtattgaaataagtggatatccatatgaaaaaaaatgaaccttaatttcatctcacatactacctcaaaattaattttcactcattacaggcttgagccactgtgcctggcccaattaagtctattttgattgccctctcatgctgtcagtgtcactggtactaattgtatagtgagggtcaaggaaaagattctgtaaggttgtaacttcaatgagtaaattttcctgggaaagaacattctttttatagaaatgattctaaatctggtacagttgtgctgctttggtttacagctctgtggtatacatatttagtacatgaggacagggaacttgtttggcacatcatgggtacttaaagtatatgtataagaatgagggccgggtgcagtggcttacgtctctaattcctgcactctgagagtctgaggcaggaggatcgcttgagcccaggagttcaagactagcctgggcaacatagttgagaccttgtctatacaaataataataatcataaaaaaaaaattagccgaggatggtggggtgtgcctgtagtcccagctactcagaaggctgaggtgggataatcgcttgagcctgagcagttgaagctgtagtgagttgtgattgtgccaccacactctggcgacagagtgagaccttgtctg

SEQ ID NO: 26114 - DNA, 521 bp, Homo sapiens
ctggccaagcatgcctcctgtgccaggaaaatctgcagaggttagctgtaagagctttcagcacatagacctgaaagctggcaaaacccagtgagatgatgattgtgtctggtacaggtgtggaagggtcacagcccctacctgaagacactggcctgggtatggcccttccattcccattccatagggagaatttagtcacattaactagaggggtggagaaaagcaggtgtctcagccacaatacttctgtgcagcagaatggggatggattatggtggatgactgaaagtctctaccatggcaggcaaagtcaactgatgtccactcttagccttttttgcttcctcctcccaactctgtttacctgtcctgctcttcagccagttgctagggaaatccagccaaagtgcccaaaatcatgatttaggggttcctcagggctggcagccctggagccttgggtctgaaggtgttggggatggagacccatgagctattaacttgtaccgagtccaccc

SEQ ID NO: 26115 - DNA, 366 bp, Homo sapiens
acctggaccttggccaggtcactgccttctctgtgagcctcattattccctcatctgaaaaaagggaggtgattgtagcactttcatgagtgtagggagaaagggacgagaagaagaattcaaggctcactggggcccttcacagtggctcacacctgtaatcccagcactttaggagaccaaggtaggaggatcgcatgcgcccaggagtttgagaccagcctgggcaacatagggagaccccatctgtacaaaacaaaaaaattagctgggcatggtggtacatacctgtagtctcagctacttggggggctgaagtgggaggaaggattacttgagccctggaggtggaggctgcagtgagct

SEQ ID NO: 26116 - DNA, 1513 bp, Homo sapiens
gccaggccctgggcccgggggcaggacaggcagggaccatgagcagctccacagaaacccttccccagggcttcaggggccaggcgggacccccacttccgggaggagaccccagtgcccctcacgctcaggggtgcggtgggtggagagattcggaggggagagctgggggctccggaggaggggctgtgggtgggaccccatccccctctggctgcagcaggcagtgaagctgcatcaggggctccaccctgctgaccacagtcctggggcacccagtggaggccggagacaccagcaggttctcctggtcacatggccccacctgccctgtcccccagagccccccaggcttgggatgagttgcgaggggtcggatggacggcgcaggacacacgacacagagtagttgtggcggttgcccctagggagacgtggagagaggccccagggcaccctggaagcggaggctgtggctccgtgtgtcccagggcacagcaccgcccctcacagccgaagctctgatcccttggtctcaggaaacactcaggaagtgcagggcgggcgtgggtctgatttcagggtgagggagctggcagccccaggagtgaggaggccccagtcccctttcaccaagcccgtcctccccttcccgctgccacgacactggtgcctgcagccgtgccagctaggagggcgacgtggacaggatttctctctagaaaggatcctggggtccgattgagaagctggcttgaacgttagacgctgtagctcagagcactgggtatgcacccagaaggagaagtgctcatcacatggtaattcttttgttttgtttttttaagaaaaaggtctcactctttgcccaaagcaactttcttatttatctttgcatcctaagagtctaaaacaatgactggcatgaagtatacaaactatacatcgcctagtaagtggataaaacgattaattaatttgcccaacattcaaaacgtgatggggtgggattcacagccatgacttctcattgcaacgctcaagctccttgtgctgctccacgccgcctttcggtacacgagaagctgaggatccacgccgcctttccgtacatgagaaactgtaggatccacgccacctttcagtagagaagctgtaggatccacaccgcctttccgtacacaagaagctgtaggatccacgccgcctttccgtacacgagaagctgtaggatccacgccacctttcagtagagaagctgtaggatccacgccgcctttccgtacacgagaagctgtaggatccacgccacctttcagtagagaagctgtaggatccacaccgcttttcagtacacgagaaactgtaggatccacgccacctttcagtacacgagaaactgcaggacaaatgaccgtatgcccaggttccaatggcaaaacgccacacctcttatgatactatctttgtgcacataaaatgttcatttttgtctaataaataagtgacttgt

SEQ ID NO: 26117 - DNA, 289 bp, Homo sapiens
tttcctccccagttgcactacttttctgtctcatttcctgccattccccacatataacctgtgcattcttgcaatgccttgcacggtattcttggaacacaccatcttctttcttccctccaacttggcactgacccctattcctagaacacactccatcctctgctggaaagagtctaaattattctctgaattattcttccagacccagcttgaacatcacatccttcaggaagccttcctgactcttctgtgctcgtagagcaaagtggatcctttttctatcaaa

SEQ ID NO: 26118 - DNA, 275 bp, Homo sapiens
tatataatgaagactatatccaagagctgccctggcactactgagtgcccctcattgttcatccctgaagacttgtgtcacgcccggtctcacctttgttcaccatctgtgcttgttaatgcttatccttcctggaaaagagaaaaattgaattttacctctttggcagggcattctgaggacaaatcttttctagaaatattcttatatatatcaatcaaggataaatctccaacttggattgaactcaccgtatgagtaacataaaaacacag

SEQ ID NO: 26119 - DNA, 433 bp, Homo sapiens
cagacaggtacttcttttaacttgtttttgctggtaaacaccctgatgggcatctgctcactgtacatgtcattttcttttggacagaaatgctaaatttactattatttgttcatttattttatgtttttccaaaatggaaacatctttctgaaacaatgggaaagggatcagaatatgccaccccaggctgggcatggtggcagggcctataatcccagcattttgggaggctgaagtgagaagatcccttgaggccaggagtttgagaccagcctgggcaataaagcaagaccctgtctctaccaaaaacaaaataaaataaattagcggggcggggtagtgtgtacctgtagtcctagctacttggttcaagatgacagtgaggtatgatcacactaccacactccagcctgggcaacaacaaacaaga

SEQ ID NO: 26120 - DNA, 359 bp, Homo sapiens
aaatggagaggttgagggactcacccaaagtcactcagctttcagagtggtagagcagggatttgaacctgtgcatatgatttcagaaccttgctcttaatcacaccaggctgccagtctaatacaagccccatcctgtcagatcttccagtttttccagagaagttaaaaatgtggatttttaaaaatatgaaatctatttcaacactgctagacaaacaaaatgaggctctgagttgtagcttgtccatgcagtgggttttactttctatcctcctcaaatacatccacatctgtgttcccatttgtccaagaacaaagagtagatatcctcatccccatgtttcagatggaaaaaa

SEQ ID NO: 26121 - DNA, 205 bp, Homo sapiens
tatgttctagtttgattattgatcatttacttcttagctatttatattcttccttgagtcatcggtttctgccctttgacaatttttctgtgaatgttttgtgtcgattatatgagctttgtctgtattgagaacatccacgaattgtattattgcatctgttttgctagttgagaacatcgacctgctgtattattgcaaatgt

SEQ ID NO: 26122 - DNA, 762 bp, Homo sapiens
aaagctaggcgccccgtgtcctgggctttccgcggcacattccttgggaaacctttttacgcggccctccggcccagctagccgcagcatttatcaccacttggcaccacactgtggttagaagtctggctttgaagtcacgctgcctgggttcatgtcttggctctgacacagtctagctgggcgacactagaaatatgatgtctaggccacagccagacgcatccttgtgtaattacctcccattgggtgtgggaatatgacatgcttccaaccaatggaatacggcaaaggtgacaagatatatacgactatgtgtatgtgattacactacgtaagacggtaacatctgttttgctgagaaacactctcccttgctggctctgaagaagcaggctgccatgttgtgagctgcttatggagatagccatgtggcaaggaactgagggcagcctcccaccagcaacaaactaaggtctttaatctgacagcctgcaaagaactgaactctgccaacaaccacatcagtttaaaaggaaatgcttcccagtcaagtgccatattagaccctagctccagctgacaccttggactacggcaatgcagaggacccgacaaagtcacacttggactcctgacctacagaaagtgtaatataataagtgtgcattgttttaagccactaagtttgtgagaatttgttacatagcaatagataactaatacaatgaccaaaaacatttatttcagaaatgtaaggat

SEQ ID NO: 26123 - DNA, 445 bp, Homo sapiens
aaagctaggcgccccgtgtcctgggctttccgcggcacattccttgggaaacctttttacgcggccctccggcccagctagccgcagcatttatcaccacttggcaccacactgtggttagaagtctggctttgaagtcacgctgcctgggttcatgtcttggctctgacacagtctagctgggcgacactaggcaagtacttaacctccccaagcctcagtttctccatgcataaaatggaaatagtaattgtctttactccataacagtacttacttggccagattcaatgagagcatgcagtgactctcagctcggtgcctgacatgttgtaggtacttttttctaaatattcttcatgtcttggtctagactctaaacattttgaggacagtaaccatgccaaatgcatcttcctatcctctaagagtgtaacagagttga

SEQ ID NO: 26124 - DNA, 566 bp, Homo sapiens
aacattttgggttcctcaggcaaaaggtatttattagtagtggtttagtcatcctgagaattttccttcaccttggtctttctgtcagatgtttctagtccacaaccaggggtgtaagtcattttgaaagacaagctccaggcctgcttccttcatctgctttgctttttcccccagtgcattaagtggctgattttctgtcctgttcctcacgtacttgatccataactccagattctataggtagaaagtatgtttgtgggaaagcactttgaggaagctggctggaaaagagaacttggagtgaactgagacttaggcaactagttgctgccatgtctctctcagcctgtgatagcgaaagggcacgtgagattccattcattttctgattctaggtctgtttgggagtagttatgtcatcttatcccacttcctttctcttccttgtcgttagtcatggtgcagtctcctcataattccccttattagaagctttcctgccaggcgcggtggctcacacctgtaatcccagcattttgggaggccgaggcaggcagatcacc

SEQ ID NO: 26125 - DNA, 229 bp, Homo sapiens
tatgattctctgaggattcattcatttctgcatattttgaatgtctgctacacagagataaatgatgtaaaatccaggctatcagagctgggtcacaatttagtggagaagatgagtacgacaaaaatttaccatggagtgtgaaaagtgctcctcatagagacatgtacatcatgccatagtaagtttagggaatttggaaactcacttaagtcctaactcaatttaa

SEQ ID NO: 26126 - DNA, 224 bp, Homo sapiens
agcaatgtcaccaacagatgtcagtttaagctcagaagtggaaaagcagagagctcagagggtcagctttttcatcagttcttttaatgttatcaccacaattatgtgagaatgaccttgcttagagaaaattatgttattttcgagatctttccccctgtgttggaactaggctgatgaaagcatgggcttgacttatttattgattgtattcgttttgtaca

SEQ ID NO: 26127 - DNA, 992 bp, Homo sapiens
gtgttctaataactacattgaaagaggtaaaaagaaataggcaaaattaatgttaataaggtatcttatttaaaccaatttatccaaaatattatcacttcaacatgtgattggtacaaaaaaattattaagatgttttaccttctttgtactaagctttcacatttttgtgtatattttatacctacagcacacctcactttggattcatcactgtcaagtgattaatagccatgtgtgactagtggccccagatctagagcataccatggtagtacattcacagaagggtgagcagggaaaacaacattgtgttaaatactcccaggcatcacactttggaaaacactgccattggcgtttccatagcctgagttcatgatataaagggatccctagtcattttatattaaatgagattccttaattgaccctaaaattgcccacaacctcttcagagagattgattaccctgtcctaggaaagatctttcatactgcaacagatgcatctagattcatcgtggtctgaattgccgttcctttgggccattgctgaaactaagaaaaactctgaactggcagcatttggttagataatggtttctgttttcccttctatctcctggcaagttttgcaattttacaatccaaagctttcaaagctgttggttgtcaattagctgctcctatggtatttatactgtactctaattctcatttcaggccatgtgcatagtcaacatggagtgtgaaaaagactatttaaagcatatatccattttttaaagttatcctcactacatgtaaaaatagcatacaccctgtcatcttgagtgagaattgtttagactagtcacacagctctgctatctgaatccactaggccacagaattgctcaactctgtttgccattgacaatataggtctgcttaattatgcatgttctgttttgtgtttcagtttttctgaaaataaaggatatgaaaaat

SEQ ID NO: 26128 - DNA, 402 bp, Homo sapiens
  misc_feature (380)..(380): n is a, c, g, or t
ttataaactcatttagactaataatgaatgagttaatagataaaaagatcaagaactgaccactcatgagactgtgttataaagccaggaatgagaagaagctgattctgtaaagcaaagctaacttgcagagaatagcaagacgattacatgtttgagtggcggcactggggccaatatgtcccatagtcagatgtttttcttaatgcaggtgatggattcaagaatgttcactattgatgtaaaattcataacttaaataattcaataaataaaaggagagtgaatctaatctaagggatgggggagttgattcaagcatttgtcatctccccctcccgggggtaccctcctcttcaaacagactaggcgtggatacnggaacttctttaccacccccag

SEQ ID NO: 26129 - DNA, 145 bp, Homo sapiens
ctcatacacgaattttaagttgtaacctacatgtgataagttgctttatcttccaaatgtaataaaaaccagaagttactttgaaataaattgaaggattagcagtggtgactgaggaataaaaattataatttaaaattgtcct

SEQ ID NO: 26130 - DNA, 2626 bp, Homo sapiens
agaagcgggcggcgcgggggagatggtgtgacagcatggagaagctaaaggctcttctgccaagactggagcaggagctgaaggacacagccaagtttaaagatttttatcagtttaccttcaccttcgctaagaacccagggcagaaaggtttagacttagaaatggctgttgcgtattggaaattagtgttatctggaaggtttaaatttttagatctctggaacacattcttaatggaacatcacaaaagatcaattccaagggacacctggaacctcctgctggactttggaaacatgattgcggatgatatgtctaactacgatgaagaaggagcttggcccgttcttatagatgattttgtagaatatgcacggccagtagtcacaggtggaaaacgcagccttttctaggcagcaagttaagcaggagtaagattatgaaatgatttgtatcctgcaaggagattgcagtcagttcctgggtgcattgtcgctgattccagaagtcattcttgaccagccatgaaaccagaggcgccatcccattctgccggaggacagccagcggctgctttgtggacaccgcaggaagttcctcgggacacggctgctttgggatgtttggagatttgtcatcatagcttttgcgttaggaaatttctgcatgattttttaatatttacaaaatactaaggtagagccatagcgccgcctgtgggaccgcagagcatgctgcgtagctcgcgcgtcaggcgaaccagcgtccggcagcgtcccgccgaatgacgttgcggtggcactggcaacacggcatgtgtcctctgcagggcgctgcgtttttatacacgtcaaagctgttaagaatgtgccctaagggagaggatcttgtcgtagagtctaatgttttttaaaattggtgccagcaattcacgatttatattttttgaattaccaaatatctagatttaccagctctatttttgttttcattttctctagacattcatctgaaaatcattttatggttctcaatccccatgtagctttgcatagcaacggcacacgtggcacgattccagcagagtttatctcacaccgtttatatatcactgggcctctcttacttaaatattatttgacctgcctgagaagcttcataaagtatgtttttttaaaatatattttaattacatttaaaaagacatttttccatgaaaaacatttattttatgagtgatgaattatagattttaaaatcaaggccgggcgtggtggctcacacctgtaatcccagcattttgggaggccgaggcaggtggatcacctgaggtcaggagtttgagaccagcctggccaacatggtgaaaccctgtctctactaaaaatacaaaaattagccgggcatggtggcacatgcctgtaatcccagctactcaggaggctgaggcaggagattcgcttgaactcaggagacggaggttacagtgagtcgagatcgcgccactgcactccagcctggacgacagagtgagattctgtctcaaaataaatacatacatacatacaataaaaccgaatgagctggttctttccatcctcttgtggtacccgtagtgcccagcatccagacctttgtgcccctgtgcacatttggaagctaaaatgtacatcgttgtctgaaaaaacccaaccccaaaaccttcatctgattggtgagctgaagtctgtccttgcaccatgttatcatctgtttctcgtgtccgcctggttgaggaggacccacgagtgctgccgaggtgtggagggctggtattgagttgtggacatcactgttgaccctacctcacgtgccgagactctcatgtcacaggcgtgccttgctgcccccctgcagcactgtgcaggacgtggaccagctggagctgctgcccagcacagaggagagtcgccgcagatgacctagctgcggtgtgagagagcatggcccagacaagcagctgggttggcttctgagaacaggacttaccctgggcttcaggaacatctgatggctgaggttagtgtgcttggaggctgcaggacgaactgtcgatgtttcttagcagagatggtcacagagggcagcagggacaggactggaagggacctgcagcctgcagaccccgcctggcccccgctggcttctggctggtccagtgatgggcaagtgacagaccttccccaggctctgcttccagaactctaatgggaaactgggcctgtctacctttagaagtcttcgattctcagagagcatttgtctaatacaataaaaactggcattaatacaaacctcaaaaacgtgagcgtatcttccaggcttcatggattcttgacatgtaattgttttgttcagaaaagtttatagaattcacataattctgtataaactatggagatccacagtacttttttgtttttgagatttaaagttctaagggattgtcaatagatatcaaaatattaatcattggacaaaggcttttccaaaaattgtgggtttttttcttctgttgtatccatttgagtcctgcatgctgtgaaatgctgagaacagaagcattaaattggtttttctcggg

SEQ ID NO: 26131 - DNA, 3164 bp, Homo sapiens
agaagcgggcggcgcgggggagatgcataagcttaaatcgtctcagaaggacaaggtccgccagtttatggcgtgcactcaggctggcgagagaactgctatctactgcttaacgcagaatgagtggagactagacgaggccacggacagcttcttccaaaacccagactcgctccacagggagtccatgcggaacgctgtggacaagaagaagctggagcggctgtacggcaggtacaaagatccacaagatgaaaacaaaattggagtcgatgggattcaacagttttgtgatgatctgagcctggatcctgccagtatcagtgtattggtcatagcgtggaagttcagggcagcaactcagtgtgaatttagcagaaaggaatttctagatggcatgacagaacttgggtgtgacagcatggagaagctaaaggctcttctgccaagactggagcaggagctgaaggacacagccaagtttaaagatttttatcagtttaccttcaccttcgctaagaacccagggcagaaaggtttaggttcacctccatttctcaatgtgaaagctttacatcattaagatgagttgaatatagatttcaattaatgttcttcctaagtgataaggatgtagacttataagcaggacaagactaatcatcttcttagcattttactgcgggtcccatcgacttagaaatggctgttgcgtattggaaattagtgttatctggaaggtttaaatttttagatctctggaacacattcttaatggaacatcacaaaagatcaattccaagggacacctggaacctcctgctggactttggaaacatgattgcggatgatatgtctaactacgatgaagaaggagcttggcccgttcttatagatgattttgtagaatatgcacggccagtagtcacaggtggaaaacgcagccttttctaggcagcaagttaagcaggagtaagattatgaaatgatttgtatcctgcaaggagattgcagtcagttcctgggtgcattgtcgctgattccagaagtcattcttgaccagccatgaaaccagaggcgccatcccattctgccggaggacagccagcggctgctttgtggacaccgcaggaagttcctcgggacacggctgctttgggatgtttggagatttgtcatcatagcttttgcgttaggaaatttctgcatgattttttaatatttacaaaatactaaggtagagccatagcgccgcctgtgggaccgcagagcatgctgcgtagctcgcgcgtcaggcgaaccagcgtccggcagcgtcccgccgaatgacgttgcggtggcactggcaacacggcatgtgtcctctgcagggcgctgcgtttttatacacgtcaaagctgttaagaatgtgccctaagggagaggatcttgtcgtagagtctaatgttttttaaaattggtgccagcaattcacgatttatattttttgaattaccaaatatctagatttaccagctctatttttgttttcattttctctagacattcatctgaaaatcattttatggttctcaatccccatgtagctttgcatagcaacggcacacgtggcacgattccagcagagtttatctcacaccgtttatatatcactgggcctctcttacttaaatattatttgacctgcctgagaagcttcataaagtatgtttttttaaaatatattttaattacatttaaaaagacatttttccatgaaaaacatttattttatgagtgatgaattatagattttaaaatcaaggccgggcgtggtggctcacacctgtaatcccagcattttgggaggccgaggcaggtggatcacctgaggtcaggagtttgagaccagcctggccaacatggtgaaaccctgtctctactaaaaatacaaaaattagccgggcatggtggcacatgcctgtaatcccagctactcaggaggctgaggcaggagattcgcttgaactcaggagacggaggttacagtgagtcgagatcgcgccactgcactccagcctggacgacagagtgagattctgtctcaaaataaatacatacatacatacaataaaaccgaatgagctggttctttccatcctcttgtggtacccgtagtgcccagcatccagacctttgtgcccctgtgcacatttggaagctaaaatgtacatcgttgtctgaaaaaacccaaccccaaaaccttcatctgattggtgagctgaagtctgtccttgcaccatgttatcatctgtttctcgtgtccgcctggttgaggaggacccacgagtgctgccgaggtgtggagggctggtattgagttgtggacatcactgttgaccctacctcacgtgccgagactctcatgtcacaggcgtgccttgctgcccccctgcagcactgtgcaggacgtggaccagctggagctgctgcccagcacagaggagagtcgccgcagatgacctagctgcggtgtgagagagcatggcccagacaagcagctgggttggcttctgagaacaggacttaccctgggcttcaggaacatctgatggctgaggttagtgtgcttggaggctgcaggacgaactgtcgatgtttcttagcagagatggtcacagagggcagcagggacaggactggaagggacctgcagcctgcagaccccgcctggcccccgctggcttctggctggtccagtgatgggcaagtgacagaccttccccaggctctgcttccagaactctaatgggaaactgggcctgtctacctttagaagtcttcgattctcagagagcatttgtctaatacaataaaaactggcattaatacaaacctcaaaaacgtgagcgtatcttccaggcttcatggattcttgacatgtaattgttttgttcagaaaagtttatagaattcacataattctgtataaactatggagatccacagtacttttttgtttttgagatttaaagttctaagggattgtcaatagatatcaaaatattaatcattggacaaaggcttttccaaaaattgtgggtttttttcttctgttgtatccatttgagtcctgcatgctgtgaaatgctgagaacagaagcattaaattggtttttctcggg

SEQ ID NO: 26132 - DNA, 2517 bp, Homo sapiens
gaagaagcgtagcagcgctcgtgagatgacttagaactggctgtgcgttatcgtggatatatgtgatcttcgtaagagtatccattttcatgatctctggaacgcatcctttcctggaacatcacgcaccagatcaatccgaagggtacatctggaatctcctgtcgtggatctttggagaccttgatggctcgtttctatgtctatctacgatgactcaaaggatcttggtccgctcccttactctgatgattttgtagaatatgcacggccagtagtcacaggtggaaaacgcagccttttctaggcagcaagttaagcaggagtaagattatgaaatgatttgtatcctgcaaggagattgcagtcagttcctgggtgcattgtcgctgattccagaagtcattcttgaccagccatgaaaccagaggcgccatcccattctgccggaggacagccagcggctgctttgtggacaccgcaggaagttcctcgggacacggctgctttgggatgtttggagatttgtcatcatagcttttgcgttaggaaatttctgcatgattttttaatatttacaaaatactaaggtagagccatagcgccgcctgtgggaccgcagagcatgctgcgtagctcgcgcgtcaggcgaaccagcgtccggcagcgtcccgccgaatgacgttgcggtggcactggcaacacggcatgtgtcctctgcagggcgctgcgtttttatacacgtcaaagctgttaagaatgtgccctaagggagaggatcttgtcgtagagtctaatgttttttaaaattggtgccagcaattcacgatttatattttttgaattaccaaatatctagatttaccagctctatttttgttttcattttctctagacattcatctgaaaatcattttatggttctcaatccccatgtagctttgcatagcaacggcacacgtggcacgattccagcagagtttatctcacaccgtttatatatcactgggcctctcttacttaaatattatttgacctgcctgagaagcttcataaagtatgtttttttaaaatatattttaattacatttaaaaagacatttttccatgaaaaacatttattttatgagtgatgaattatagattttaaaatcaaggccgggcgtggtggctcacacctgtaatcccagcattttgggaggccgaggcaggtggatcacctgaggtcaggagtttgagaccagcctggccaacatggtgaaaccctgtctctactaaaaatacaaaaattagccgggcatggtggcacatgcctgtaatcccagctactcaggaggctgaggcaggagattcgcttgaactcaggagacggaggttacagtgagtcgagatcgcgccactgcactccagcctggacgacagagtgagattctgtctcaaaataaatacatacatacatacaataaaaccgaatgagctggttctttccatcctcttgtggtacccgtagtgcccagcatccagacctttgtgcccctgtgcacatttggaagctaaaatgtacatcgttgtctgaaaaaacccaaccccaaaaccttcatctgattggtgagctgaagtctgtccttgcaccatgttatcatctgtttctcgtgtccgcctggttgaggaggacccacgagtgctgccgaggtgtggagggctggtattgagttgtggacatcactgttgaccctacctcacgtgccgagactctcatgtcacaggcgtgccttgctgcccccctgcagcactgtgcaggacgtggaccagctggagctgctgcccagcacagaggagagtcgccgcagatgacctagctgcggtgtgagagagcatggcccagacaagcagctgggttggcttctgagaacaggacttaccctgggcttcaggaacatctgatggctgaggttagtgtgcttggaggctgcaggacgaactgtcgatgtttcttagcagagatggtcacagagggcagcagggacaggactggaagggacctgcagcctgcagaccccgcctggcccccgctggcttctggctggtccagtgatgggcaagtgacagaccttccccaggctctgcttccagaactctaatgggaaactgggcctgtctacctttagaagtcttcgattctcagagagcatttgtctaatacaataaaaactggcattaatacaaacctcaaaaacgtgagcgtatcttccaggcttcatggattcttgacatgtaattgttttgttcagaaaagtttatagaattcacataattctgtataaactatggagatccacagtacttttttgtttttgagatttaaagttctaagggattgtcaatagatatcaaaatattaatcattggacaaaggcttttccaaaaattgtgggtttttttcttctgttgtatccatttgagtcctgcatgctgtgaaatgctgagaacagaagcattaaattggtttttctcggg

SEQ ID NO: 26133 - DNA, 2952 bp, Homo sapiens
agaagcgggcggcgcgggggagatgcataagcttaaatcgtctcagaaggacaaggtccgccagtttatggcgtgcactcaggctggcgagagaactgctatctactgcttaacgcagaatgagtggagactagacgaggccacggacagcttcttccaaaacccagactcgctccacagggagtccatgcggaacgctgtggacaagaagaagctggagcggctgtacggcaggtacaaagatccacaagatgaaaacaaaattggagtcgatgggattcaacagttttgtgatgatctgagcctggatcctgccagtatcagtgtattggtcatagcgtggaagttcagggcagcaactcagtgtgaatttagcagaaaggaatttctagatggcatgacagaacttgggtgtgacagcatggagaagctaaaggctcttctgccaagactggagcaggagctgaaggacacagccaagtttaaagatttttatcagtttaccttcaccttcgctaagaacccagggcagaaaggtttagacttagaaatggctgttgcgtattggaaattagtgttatctggaaggtttaaatttttagatctctggaacacattcttaatgatgattgcggatgatatgtctaactacgatgaagaaggagcttggcccgttcttatagatgattttgtagaatatgcacggccagtagtcacaggtggaaaacgcagccttttctaggcagcaagttaagcaggagtaagattatgaaatgatttgtatcctgcaaggagattgcagtcagttcctgggtgcattgtcgctgattccagaagtcattcttgaccagccatgaaaccagaggcgccatcccattctgccggaggacagccagcggctgctttgtggacaccgcaggaagttcctcgggacacggctgctttgggatgtttggagatttgtcatcatagcttttgcgttaggaaatttctgcatgattttttaatatttacaaaatactaaggtagagccatagcgccgcctgtgggaccgcagagcatgctgcgtagctcgcgcgtcaggcgaaccagcgtccggcagcgtcccgccgaatgacgttgcggtggcactggcaacacggcatgtgtcctctgcagggcgctgcgtttttatacacgtcaaagctgttaagaatgtgccctaagggagaggatcttgtcgtagagtctaatgttttttaaaattggtgccagcaattcacgatttatattttttgaattaccaaatatctagatttaccagctctatttttgttttcattttctctagacattcatctgaaaatcattttatggttctcaatccccatgtagctttgcatagcaacggcacacgtggcacgattccagcagagtttatctcacaccgtttatatatcactgggcctctcttacttaaatattatttgacctgcctgagaagcttcataaagtatgtttttttaaaatatattttaattacatttaaaaagacatttttccatgaaaaacatttattttatgagtgatgaattatagattttaaaatcaaggccgggcgtggtggctcacacctgtaatcccagcattttgggaggccgaggcaggtggatcacctgaggtcaggagtttgagaccagcctggccaacatggtgaaaccctgtctctactaaaaatacaaaaattagccgggcatggtggcacatgcctgtaatcccagctactcaggaggctgaggcaggagattcgcttgaactcaggagacggaggttacagtgagtcgagatcgcgccactgcactccagcctggacgacagagtgagattctgtctcaaaataaatacatacatacatacaataaaaccgaatgagctggttctttccatcctcttgtggtacccgtagtgcccagcatccagacctttgtgcccctgtgcacatttggaagctaaaatgtacatcgttgtctgaaaaaacccaaccccaaaaccttcatctgattggtgagctgaagtctgtccttgcaccatgttatcatctgtttctcgtgtccgcctggttgaggaggacccacgagtgctgccgaggtgtggagggctggtattgagttgtggacatcactgttgaccctacctcacgtgccgagactctcatgtcacaggcgtgccttgctgcccccctgcagcactgtgcaggacgtggaccagctggagctgctgcccagcacagaggagagtcgccgcagatgacctagctgcggtgtgagagagcatggcccagacaagcagctgggttggcttctgagaacaggacttaccctgggcttcaggaacatctgatggctgaggttagtgtgcttggaggctgcaggacgaactgtcgatgtttcttagcagagatggtcacagagggcagcagggacaggactggaagggacctgcagcctgcagaccccgcctggcccccgctggcttctggctggtccagtgatgggcaagtgacagaccttccccaggctctgcttccagaactctaatgggaaactgggcctgtctacctttagaagtcttcgattctcagagagcatttgtctaatacaataaaaactggcattaatacaaacctcaaaaacgtgagcgtatcttccaggcttcatggattcttgacatgtaattgttttgttcagaaaagtttatagaattcacataattctgtataaactatggagatccacagtacttttttgtttttgagatttaaagttctaagggattgtcaatagatatcaaaatattaatcattggacaaaggcttttccaaaaattgtgggtttttttcttctgttgtatccatttgagtcctgcatgctgtgaaatgctgagaacagaagcattaaattggtttttctcggg

SEQ ID NO: 26134 - DNA, 3105 bp, Homo sapiens
agaagcgggcggcgcgggggagatgcataagcttaaatcgtctcagaaggacaaggtccgccagtttatggcgtgcactcaggctggcgagagaactgctatctactgcttaacgcagaatgagtggagactagacgaggccacggacagcttcttccaaaacccagactcgctccacagggagtccatgcggaacgctgtggacaagaagaagctggagcggctgtacggcaggtacaaagatccacaagatgaaaacaaaattggagtcgatgggattcaacagttttgtgatgatctgagcctggatcctgccagtatcagtgtattggtcatagcgtggaagttcagggcagcaactcagtgtgaatttagcagaaaggaatttctagatggcatgacagaacttgggtgtgacagcatggagaagctaaaggctcttctgccaagactggagcaggagctgaaggacacagccaagtttaaagatttttatcagtttaccttcaccttcgctaagaacccagggcagaaaggtttaggttcacctccatttctcaatgtgaaagctttacatcattaagatgagttgaatatagatttcaattaatgttcttcctaagtgataaggatgtagacttataagcaggacaagactaatcatcttcttagcattttactgcgggtcccatcgacttagaaatggctgttgcgtattggaaattagtgttatctggaaggtttaaatttttagatctctggaacacattcttaatggaacatcacaaaagatcaattccaagggacacctggaacctcctgctggactttggaaacatgattgcggatgatatgtctaactacgatgaagaaggagcttggcccgttcttatagatgattttgtagaatatgcacggccagtagtcacaggtggaaaacgcagccttttctaggcagcaagttaagcaggagtaagattatgaaatgatttgtatcctgcaaggagattgcagtcagttcctgggtgcattgtcgctgattccagaagtcattcttgaccagccatgaaaccagaggcgccatcccattctgccggaggacagccagcggctgctttgtggacaccgcaggaagttcctcgggacacggctgctttgggatgtttggagatttgtcatcatagcttttgcgttaggaaatttctgcatgattttttaatatttacaaaatactaaggtagagccatagcgccgcctgtgggaccgcagagcatgctgcgtagctcgcgcgtcaggcgaaccagcgtccggcagcgtcccgccgaatgacgttgcggtggcactggcaacacggcatgtgtcctctgcagggcgctgcgtttttatacacgtcaaagctgttaagaatgtgccctaagggagaggatcttgtcgtagagtctaatgttttttaaaattggtgccagcaattcacgatttatattttttgaattaccaaatatctagatttaccagctctatttttgttttcattttctctagacattcatctgaaaatcattttatggttctcaatccccatgtagctttgcatagcaacggcacacgtggcacgattccagcagagtttatctcacaccgtttatatatcactgggcctctcttacttaaatattatttgacctgcctgagaagcttcataaagtatgtttttttaaaatatattttaattacatttaaaaagacatttttccatgaaaaacatttattttatgagtgatgaattatagattttaaaatcaaggccgggcgtggtggctcacacctgtaatcccagcattttgggaggccgaggcaggtggatcacctgaggtcaggagtttgagaccagcctggccaacatggtgaaaccctgtctctactaaaaatacaaaaattagccgggcatggtggcacatgcctgtaatcccagctactcaggaggctgaggcaggagattcgcttgaactcaggagacggaggttacagtgagtcgagatcgcgccactgcactccagcctggacgacagagtgagattctgtctcaaaataaatacatacatacatacaataaaaccgaatgagctggttctttccatcctcttgtggtacccgtagtgcccagcatccagacctttgtgcccctgtgcacatttggaagctaaaatgtacatcgttgtctgaaaaaacccctgtttctcgtgtccgcctggttgaggaggacccacgagtgctgccgaggtgtggagggctggtattgagttgtggacatcactgttgaccctacctcacgtgccgagactctcatgtcacaggcgtgccttgctgcccccctgcagcactgtgcaggacgtggaccagctggagctgctgcccagcacagaggagagtcgccgcagatgacctagctgcggtgtgagagagcatggcccagacaagcagctgggttggcttctgagaacaggacttaccctgggcttcaggaacatctgatggctgaggttagtgtgcttggaggctgcaggacgaactgtcgatgtttcttagcagagatggtcacagagggcagcagggacaggactggaagggacctgcagcctgcagaccccgcctggcccccgctggcttctggctggtccagtgatgggcaagtgacagaccttccccaggctctgcttccagaactctaatgggaaactgggcctgtctacctttagaagtcttcgattctcagagagcatttgtctaatacaataaaaactggcattaatacaaacctcaaaaacgtgagcgtatcttccaggcttcatggattcttgacatgtaattgttttgttcagaaaagtttatagaattcacataattctgtataaactatggagatccacagtacttttttgtttttgagatttaaagttctaagggattgtcaatagatatcaaaatattaatcattggacaaaggcttttccaaaaattgtgggtttttttcttctgttgtatccatttgagtcctgcatgctgtgaaatgctgagaacagaagcattaaattggtttttctcggg

SEQ ID NO: 26135 - DNA, 1975 bp, Homo sapiens
tttttgcttctgtttgtctgcacgctccttcatgtcatagaactctagcaatggatgagaaatctgccagcaccagacacatcaaaattgggcacatagatggaaaattttgcaatttttcatgaatttatagggtttccagaatctagttgaggcaaagctcatttggctatagagtaaatgtaagacttgttacaacagaaatttaagtggccagttcaatgtcctttggctatatttgacctacctttaaaacctagcccatttcatatcagcctcttctgtgcctgggcttgaaatgtctaaagctgccttcgtgtctgggattacaccatgtaggtcagtataaagagggcagtcactcctccatttctcccagcgtgtccagttcagcagatttctaaagctgttaagcagcctctctttttgaccgtcctaaactttgtgaaaataaataccccacacccagataaccattaatagaagtaatgtagttttttaggcttttggaatatgtcttctcttttgtatttatgatggtgtttggaatttttcactagtgtatttttagactgaagtgggtgcattaggataaaactttcccttgctgagcctgaaggcaagcaagagggaagaaattgacctgtattgtatcattggggaggcgactacttcttgtggtggtagggggtggggggaatggggcattgtagattatgtgggggtacaatagaattctggcctgaggctccccaagtcttattaccttgtatgaaaaatccccatattagcctcacttaatctcaatagaagcctgctgtttaccctcagggaacaagtagttttcaaaattgagctcctccaaggtcattggccaatgctgtgtgcaggcattggtcatctttgtaaactcatggcattatttcctcatatgcattatgatactaagaaattcaaccccaacctgtatgaaaagcacagcccagggccctaattgaggctagcatgaatgcctttgaggggccagggggccataggaggcccatgcaatttaactgaagctcaggtgccacgttggatttttattcttattaggccgcaacctttctgaatgagtttagggcaggggctgctgatccggctgtggattcagggagctctaaaatgaatctctaccgttcctttaaaggtctttctggttcctcccagtgttgtcattgctgaggtcgatctcgtagttgttcagttgtgctctttttgctgtcttgtgagtcttagccagtgatccagctgcccaaggacagggcctccagagggcctagcgccctcctggtaccaagcgtgtgctcctggcctgtgtgacagtgtctttcccgaagcagtgaaatgagaaattctgcaagtggccacccggaagatcagtctgtagctcttgggcctggatttctactatgttagtgagtgtaggaatatactgtgtctttaatggatgaaaattcaatgtatgctgtgaatttgttggtttgaaacattgaaatttttcattagacaatgtttacatacctcacctgaagaacctttgagagtgtatatataaaattttaaaatatattaagttgctttaaaacaatatgtatagctataaaagttggagttattttaactttgaatatgtaccaagtctcttaaatattgaaatcttgtagacttcttgtgcttctgtgttttgctttcctatcaggccatgtaggaaactgtgttcttgttattggtagaggggccctcactgaaatccaagcttggaaggatgtcctgtgttgtttcagattctcttgtttggttttgaaggatgcggtgtggagccagaggatgtgtgggaggggtttctctaacactgacttctattccatgagctttttcaaggcgcttattttatggcagcgtattaaacttctttgatattcaaaaaagtctg

SEQ ID NO: 26136 - DNA, 452 bp, Homo sapiens
ggcacgaggggagctaatttttgggaaagagactataccaacaagatttgcataattttttatatttataccacaggtagggattatttttagagtcactatagcttaaggttattgatttcactagtgtggtttctgcattctaaatagttctcggagactgtgttagtaactggtttcaaatacatatatataatatttatacacaccactgtgggaatttatttcactgtgtaaatagtgatattttcctgttcagatacttctatagaaagtatttattttaacaagaaaattaactgtgcaaaagggctttccaaaaagtgttctttctagccacccatcctccccagctaccatggctcaaccattggggcccccaaacaacagtggaaagcagaaaggtgtgggccttgaaaccttcactgtatttggacagatgcaacagaagc

SEQ ID NO: 26137 - DNA, 286 bp, Homo sapiens
ggcacgaggggagctaatttttgggaaagagactataccaacaagatttgcataattttttatatttataccacaggtagggattatttttagagtcactatagcttaaggttattgatttcactgtgttgtttcagattctcttgtttggttttgaaggatgcggtgtggagccagaggatgtgtgggaggggtttctctaacactgacttctattccatgagctttttcaaggcgcttattttatggcagcgtattaaacttctttgatattcaaaaaagtctg

SEQ ID NO: 26138 - DNA, 313 bp, Homo sapiens
gtgatccacccgcctcagcctcccagagtgctgggattacagatgtgagccactgtgcctggctgagaaatctaattgatgtttttactctgcatattactctttgttcttcagcttatatattagaatttttaaaactttaaaaaaatgttggtcaggctgggtgcagtggctaatgcctgtaattgcagcattctcgggaggctgaggcaggagaatggcttgaacccaggaggtggaggttgcagtgagccgagatcgtgccactgcaccccagcctgggcaacagagcaagactccatctcaaaaagga

SEQ ID NO: 26139 - DNA, 617 bp, Homo sapiens
tggtctccatctcttgacctcgtgatccaccctccttggcctcccaaagtgctgggattacaagcgtgagtcactgtgcctgtcccagcatatgtatttttaaaagagaattcattctattggtataattagaaaaatatttatgaaatattatttatatagttcatgaagtctccaagaaaaacaaactgggataacaaagccagaaaatatcactgcagccttatcaggctatttagaatgaaccaagctattgcttaaagccagaagctgcatcgcattcttccccaggccagatgcctcctcacccttttttgacagaaggtgagccttctatatactagtctcactgagatgcatctattgggaagaacctagacttcctccgtcatagcagtttatggcaaacctattcatactcttccttgcagtggtggtgctcccaatgtgagaaaataaaaaatatcttgaggtaaatattattttttatcagctactcaggcttcaacttatcctatcattcaaagtttatgaagcatcggtcgggtgcggtggtttacgcctgtaatcccagcaatttgggaggctgaggcgggtagatcacctgacgtcaggag

SEQ ID NO: 26140 - DNA, 384 bp, Homo sapiens
ttttttttttttttttgagacagggtattgctctgtcacccaggctggagtacagtggcatgacctcagctcactgcaacctctgcctcccaagttccagtgactctcgtgcctcagcctcccaagcagctgggattacaggtgcccaccatgacacccagctaatttttgtatttttagtagagatggggtttcaccacattggtcaggctggtcttgaattcctgacctcaagtgatcagcctgcctcagcctcccaaagtgctgggattacaggcgtgacgaccacgcctggcctcatactttaattctaatgccaatgggttgtttccagtttggggctattaagaacagcgttattatgaacacttttataagtgtaca

SEQ ID NO: 26141 - DNA, 412 bp, Homo sapiens
ttttttttttttttttgagacagggtattgctctgtcacccaggctggagtacagtggcatgacctcagctcactgcaacctctgcctcccaagttccagtgactctcgtgcctcagcctcccaagcagctgggattacaggtgcccaccatgacacccagctaatttttgtatttttatagaaacgaagtttcaccatgttggccaggctggtctcgaacccctaacctcgtgatccacctgcctcggctcccaaagcactgggattacaggcatgagccaccacacccagccacattaacattttaaaagtatgtattaatgcactgaacaaatataaattgaagccaggcacctgtagtcccagctactcaagagggtggggtaggagaattgcttgagcccaggagtt

SEQ ID NO: 26142 - DNA, 327 bp, Homo sapiens
gaagctgtagttggccataaagttgacgttggccaggagcccgttggggtcactagaggagttgccataagtagaggtacctcagtgaaaccacagtgtagatcagatccatgtatctctgagtgaggtccacagattctgcaaatcagaggtgctggcaccacctgggacctgctggatcaggcccagcagctgagagtgcagctgggactctattttggacactttttcctcagttgattctgatgcacctcaaagcttgaggaccagtgataaccatccatttgacagatggagaaattgaggctcaaagaagtcagattctct

SEQ ID NO: 26143 - DNA, 487 bp, Homo sapiens
tggtttggagaaatttccctgaggaagtgatattggagtaggttttgtaggctagttggaatttgattggggtcttatggtggtagtggttgggaaaggattggtaggaagacacatcagtagagacacattgagcaggtggggtgggggtggcatgtgtgcagatgcagagacaagaaagagcatggagagtttgggagcaatgacaagcaattcattatgggtggacatcaccctgcacagaagggagtggtatgacataaaactctaaagttaggcaggatagatcactgaggaccctgtactacacacgaaagtatgccatggatggggagtgttatgatcaatgtgaagattggaaagatggtggcagtatgaagcgtggacaggcagggagtgatcctagagcagtagttttcaaatgttgtggtttcaggatttctttacactcttaaaatcattcatgaacccaaagaacttttgttta

SEQ ID NO: 26144 - DNA, 821 bp, Homo sapiens
ggctgttccagtttcttatctcaggagggaagagctgcagatgtctttactgtgaatgagggagagaaacgctaaagcacagaaatgttcagaaccaaagagctggatcactcatgcttctagaaaagacattggcatcttctcattgctcatctactgtgcctggcacagccttattttctagctttctgaatgtgagttccatccatatcctttgcataacggtggtactgggctgtggagagcttggaatgtgtgtccatggggaaatgggctgttctggttattataaaacggccaagggagggctccatggcacacctctgagtaacccaggacactcctgtttgggaaatgcaaaccatccatacggcaggggcacaattataaagattgatcctgtcacgggaatggtttcaaatctgaccaacctcatggcatacattggggaagcaattgtgaaaccccttgattctttggatctggacatgctgtactgtgacaatggtttgtgtgtgacagaaaatgtagctgtgtctaccgggaaagactggggaaatttcttcctgtggagttctttataaagcaaaagtgcatgaaactgtcagtaatattgtagtctataaagggaaattgctcttagaggctaatattgcacaatgactactttttttgcttatttggaaaagatctttatctcttggagtattaagaagtcaacatataattgccaccctatacattgtgttctggagtgcctgatttattgaaatcagtgtgaaacctattttaaataaatatctatttcaaaaccaaggcca

SEQ ID NO: 26145 - DNA, 350 bp, Homo sapiens
aaaaaaaaaaaaagaaaagaaaaggaaaaaaaaatgaaaaagaagccattgaataccctattgaccataagaaaaaggtagggaaagttggtcaacggcaacccaggcactgaaggaaaaagaacatggagaatgacaaaagcccagagggaagagtaaaaggacacaaacaccattctcagggaccaggactgggcgccgttctcagggaccaggactgggcactaatcacagaactgtaacaggcaccccatgggaatgaccaactgttagacggggcctgcagggcagcacttccctcttgcctcccaccaacagcttctaaagggaaatgccgactgttttcacac

SEQ ID NO: 26146 - DNA, 422 bp, Homo sapiens
gcatttgaacttgatgtaggcagaaaagtcggcaaatacatccagcccagctgtgtttgactcaggatttagagctcttagcttggggtacctgcaggggaacagcactgcctccagaaattcctcaatcttttgggtgtctatgtgtgcttccatgccacgcagcaggaacaggagctgcccttctgggcacagcttctgcactgtcacggtctacctcttggtgtcaatggtggtgatgttgaaagtgactcctttgagccagagcaccatgaacagtctctagaagaaggggcagttcctggccaagcgcggtggctcacgcctataatcccagcactttgggaggccgaggtgggtggatcacctgaggtcgggagttcgagaccagcctcgccaacatggagaaaccccgtctctac

SEQ ID NO: 26147 - DNA, 701 bp, Homo sapiens
tttctccaaagggagtgggggctgttgagcctgaaatagggaacaccaggacagtaagatcaaatgctttgaaagtggctgtgccaacgctttttgctaattaaagaatgttaggacaatcaccactagcagcagtaaagggcgccccattacctcgctttatggagagctgggtaaatttaaaggcagctataaatatcccactgagtgccagagctatagcacagtcggcgggtacctgctgggcaaggagaggagcccagagcttctggtcccctttgtctagggttctcatctctattacctgtcagtccccaaattttgcttgaccaaggaagaattccatcaacgaacccttaatttaaaaacactcagggagacagcaaacagctgtgtattgagtctgcctgggagcccaggctacctgggtccttctccagctttgtcagtgactttcttttccttttgcctggatggaagatatttcttcacgttgtgattttgtttccttgaaacacggggtgtgtcacagaaatttaaaaaaaaaaaatccaggtgcagtgcttatgcttgtaatcccagcattttgggaggccaaggtgggggaattgcttgagcctgggaggaggaggttgcagtgacctgagatcgcaccactcactccaactctggtcatcaaacagagcaaggtcctatcttta

SEQ ID NO: 26148 - DNA, 1087 bp, Homo sapiens
ggttgagagctaagcagacatcaggactaccagctgcagagaggagctacccactgtgggcttcgtctctgctgagagctgaacactcactgggacgccctgcctatggaaaccagctgttcactctgggtctcctctgagctgttctgtcgctcagtaaaggtcttcttctgcttactcgccctccatttgtctgccttacctcattcatcctggacacaggacaagaacttgggacttgccggtatggtggagctaaaatagctgtaacacaaacaggattgaaacatgccccttgctcgccacattgtggatgacaagagggagggaagaaaggagagaagatctgcgacccttcggcaaacccagacttaggagatcggagagccaagactgtgacaccctttctggggctctgtggttcctggcgtctccaagcttctgggcacctcggctttccccggtgccagtcgtggaagctgcttgtgcagagtcttgctttgtcacccaggctggagtacagtggcgtgatcacagcttactgaaacgtctgcgtctcaggttcaagcgatttttctgcctcagcctctggtgtagctggaattacagtgttagcagtcactgatgctcaaacatgagaagactgggacatccatcagataagaaacgctgcccaaagtgttagactaataagtgacagggttggacaatgaacccaaccactcaaccttccggaaaagtgagttttaaacaatagattatgctaatcttatcagaaaaaaacgacattgtccgggcacggtggctcacgcctgtaatcccagcactttgggaggccaaggcgggcggatcatgaggtcaggagatggagaccatcctggctaacacggtgaaaccccgtctctgctaaaaatacaaaaaattagccgggagtggtggcgggtgcctgtagtcccagctacttgggaggctgaggcaggagaatggcatccacccgggaggcggagcttgcagtgagcagagatcgcaccactgcactccagcctgggcgacagagtgagactcgatttcaaaaaaaaaaaaaaaa

SEQ ID NO: 26149 - DNA, 423 bp, Homo sapiens
agcaacttttcggtgaatctgacaggataaattgtttgtaaaatatactcttacataactatagacagatctgtatgaaggttttgtatatgaaccaattgaatatgccatggataattttgtttttagaaagactgatccaggccgggcgtggtggctcacgcctgtaatcccagcactttgggaggccaaggcgggtggatcacctgaggtcgggagttctagaccagcctgaccaacacggagaaacctcatctctactagaaatacaaaattagccgggcatggcagcgcatgcctgtaatcccagctactcgggaggctgaagcagaactgcttgaacctgggaggcagaggttgtggtgagccgagatcacgccattgcactccagcctgggcaacaagagcgaaactctgtctcag

SEQ ID NO: 26150 - DNA, 768 bp, Homo sapiens
acacctgcccttcaaatattagaagacagttctcaggtcccctgaatcttctcttcaccaggttaacatccctaatgctgccagcatttccttatatgatgtggtttcaagtcattctttacctctgtcactctcctctggacaattccagggatttagcatctttctcaatgtatgtcttccaaagttgaacccgagacttcatagtggtccgacatgtgtagggggtgcagcaggactattcttcacttgttctgggccttgacgtggcctcatagcatgaaaagagccactggcattagagccagcctacacatgggctcaaactaatgttggcatcccatcagcccatgtaactaggggtaatacctcaaaatatttaacaaatgacatggttcaggaactaactagtcaattacagctttggagcacagtaaaaaagcccctgctgtgcctgatgttatccttttggtttttggatcatggggtagaggtggaggtgggggatcagggaagcagctaattctcaaccaacacacaatatctgaacattttaacagctggtacaagccacacctgtgtggaccaggtagatatcagtaatggatacaaccagattaaagtaacttcagtgctctgagcctcagtttcctcatctgtgaaatggagttgaaggtagtagccactgctggggactttgaagggacactgtattacttcattttcacactgctgataaagacatacccgagactgggtaatttataa

SEQ ID NO: 26151 - DNA, 282 bp, Homo sapiens
gagagatggggtctctctgtgttgccctcagagacctggttggtctctctaactcctgggctcaagcgatccatccactcagcctcccaaagtgttgggattacaggcgtgagccactgtgcccagtcttcttagttctagggacacatctcaagtaaacagtgtccattccctgtggaacccaccccagaaatccttcctcgtcctaacgtcccgataccagcctaagggtgctgtggtccgcgtgccccactctcaggcaggggcctggtcagcatccca

SEQ ID NO: 26152 - DNA, 342 bp, Homo sapiens
atcactaacttcctcgtctgcaactaggcagagaaaaaaattttaaaaggctcatatgagggtcggaggcggtggctcatgcctgtaatcccagcactttgggaggccaaggcgggcagaccacctgaggtctggagttcaaggccagcctggccaacatggagaaatcccgtctctactaaaaatacaaaattagccgggtgtggtggtgcattcttgtaatcccagctactccgaaggctgagagaggagaatggcatgaacctgggaggcagagcttgcagtgagccgagatcgcgccactgcattccagcctgggcgacagagcaagactcggtctca

SEQ ID NO: 26153 - DNA, 604 bp, Homo sapiens
ccgtcccgctctcacaggtgaggacagtggctcctacagatcttcaggaagaatcaccaacattctagagcacttgccaggtcccatgcagcaggctgggatgctcccatggattacctcactgtcccctctcagtaatcctgtgaaaatagatgttattattcccagtttccagatgaggaaatgagagctgagagaaattagataactgcctgagatcgcctgggcggtatgtggtggtggagcctcaacccgcctctggggcctgtgctggtgccgtggggccgccagctgcttggcacttagtggggtgggtatcagtgcgtctaagtccctggtgtgctggtccttacagcgctgcccgtagaaggctcatgggaaccacaggcatcatttaaaattttccaggagctgcgtttaaaaagtaaaaagaaacacagatgaaactattttaataatatacttgagcccaagacatgaagaatattagaatttaaacacgtgataccttatttcacttgctcagtagctacgtgtggttggcacaatggtgcagatctaagaaatagaaagaattttgaaaatgcagagtggttttttattt

SEQ ID NO: 26154 - DNA, 301 bp, Homo sapiens
aattccttacaaagataacttgcaaaactgataaaagatggaaaaaaaaaaaaaactgaatggctctgtacctacgaaagaattggattttcaagtaaaagccttcttacgaagaaagctgtgggccaggcgtagtggctcatgcctgtaatcccaggactttgggaggccaaggcgggtggatcacctggggtcagggcaggcggatcacatgaggtcgggagttcaagaccagcctgaccaacatggagaaaccctgtctctactaaaaatacaaaattagccaggtgtggtggcgcat

SEQ ID NO: 26155 - DNA, 349 bp, Homo sapiens
ctttctatatatactctgggttcaaattttatcttcaccgcttgtccaaaatgtcaacggtggccgggcgcggtggctcacgcctgtaatcccagcactttgggaggccgaggcgggtggatcacgaggtcaggagatcgagaccatcctggctaacaaggtgaaaccccgtctctactaaaaatacaaaaaattagccgggcgcggtggcgggcgcctgtagtcccagctactcgggaggctgaggcaggagaatggcgtgaacccaggaagcggagcttgcagtgagccgagattgcgccattgcagtccgcagtccggcctgggcaacagagcgagactccgtctc

SEQ ID NO: 26156 - DNA, 344 bp, Homo sapiens
gagaccagcttggataacatggcgagaccctgtctctacaaaagatacaaaaattagccaggtgtagtggtatgcgcctgtagtccagctactcaggaggctaaggtgggaggatcacctaagccaggaagttgaggctgcagtgagctatgaaaaaaaaaaaaacccactaaaactgaaataaaatagatagcaatttaactaaaagtttagaaatatcaagtttaatggtatgagaaagagatgaggctggacgcagtggctcacacctgtaatcccagcactctgggaggccgaggtgggcagatcacttgaggtcaggagttctgagaccagcctggcca

SEQ ID NO: 26157 - DNA, 424 bp, Homo sapiens
tctttttttgagatggggtctcattctgtcaaccagtttggagagcagtggcatgatcacagctcactgaagccttgacctcctgtgcttaagcaatcctcccacctcagcctcccaaatagctgggagcctcccaagtacaggagaatgccaccacacctggttattttttttaatttttttatttttttggtagagaccgggttttgccatgttgcccagtctggtctcaaactcctgggctcaagcaatcctctcacgttagcctccccgagtgctgggattatcgaccacgatttcctttttaatcttttggtaactcaactgactaggccatgttgtaccataaagggtagcagtgatagaaagtgaaggactaagaacaacactgaaaaaacaatagcacagataataagcattaagt

SEQ ID NO: 26158 - DNA, 738 bp, Homo sapiens
ctgtagtcccagctttttgggaagctgagggaggagaatcgcttgaacccaggaggtggaggttgcagtgagccaagatggtgccactgcactgcagcctggtgacagagcaagactccgtctcaaaaatataaataataaataaataaaaacaaaacaaaaaacacaggtggctcccactgcttcctgatggtgagtagcccgaggctgcaagatgagtaactccagaggcctcccgacggggcacctgcctgaagcacttgcctggtctagtctgtctcatccccagagccacacagctgtccactaccttacacagcttctcctgcatcccctacccacacaccgcagcctctctccttgttttactttacttgatgcatgttagaataataagtgtctttggtacagcccatatctatccaaaagtgagcttcaggaagggtttgtaggatatccgaagaatgtcagtccttccgggcagcagagttctcatcttcattgtatatgagcccctgggaagtgtgtgaaggatgcccttgtccaggctccacctagagacggacgcagtggatctagggacttttgagagctccaccggcagctttagggtcatgtgaattcctgcctggccgcatgttccatcttctctcctggcccagcctgccagtcatggaagattgagaggctagttactcatctttcttcattataaaatcttttgcttagcaaaaaaaa

SEQ ID NO: 26159 - DNA, 395 bp, Homo sapiens
ttggaattgcaaaacttcaaatattgttttccctctgttttaacaggaatagttgtatattaagtaagacagaggatctttccatgttaaagttgttagaaaaatataactccaggccgggtgcagtgcctcatgcctgtaatcccagcactttgcgaggccgaggcgggcggatcacggagtcaggagatcgagaccatcctggctaacacggtgaaaccccgtctctactgaaaatacaaaaaattagccgggcgtggtggcgggcgcctgtagttccagctactcaggaggctgaggcaggagaatggcgtgaacccaggaggtggagcttgcagtgagccgagatcacgccactgcactccagcctgggcgacagagcgagactccatatc

SEQ ID NO: 26160 - DNA, 509 bp, Homo sapiens
gggccaatagaaatgtatggctcagccaagcaacacacacaagggggaatgaatcccataggactctgtctaacctgaatgaaaaagaacttaatgatggtgaggctattgaagcagtaagaacaggagactgaaagtcctggattggcttcccattgactctttttttttttttttaattctgcatgaccttggatgggacaatgccttagtttctctgtccccctgagcttgcagaggtattgtagatggagtttcaaatctattgctatttttactgctattatcatttcataggtcttgcacagttctgagtaaaaatcagctttttcttaacaaaatgcatgctctaattgaccttaagaggttatatagtcaaaccactgtttctaggtaagattatatttcgtctaaacgcaacgatctactttctatttgaaaatctccagaaggggaggtaacatatcttagtatgttttaaattatagtactcaaaaactattcaaatc

SEQ ID NO: 26161 - DNA, 644 bp, Homo sapiens
ctgctcacacagagatggtagcatcacatggcatttgaagtggttattcaccagaactcactgcaatagcaacaagaggtggctatgaaagtattacagtgatacagtatgaactacagttaattttatgcatgagtggtttaatactgcatctttacatttgtttacatttctctcgactgggaatgggaccatgtctgtaagtgtttgtgtaagttttgaaaatttttaactttttataatagatttgtgtgtattttatggtagtaaatgataaaatagatgggtagctacatatttttatacattcatgacaactttattttaatttcgtcaatatttctcagctacattgttgtctgtgagttttttcaaactgtgatgtgttcaagggtcaattgtagttggtcaatgcctgtcctagactgtcattttcatttatttatgtatgatatctatctggttcactactgaatccctaatgtctggctcttattaggccctcaataaattattgaatgaatgaatcaatgaatgttcagaatgggcataatgggaaaaaattgggacttgaaggtaaaaggttaaaaaatgtatcttttgggaaaactttagttttcttttattatcaggtgatcatgacc

SEQ ID NO: 26162 - DNA, 491 bp, Homo sapiens
agaaagtcccagataagccagacatataggtgagccactgtggacattctaggcctgtcaagtttccacctaaaagaggaagctaggacatgactcaattgcccactgagataatggaagaattaataaatatctgaatgacaaaagtaatcaagaggaaaattctttgataatcagatacatgtggttgttattgggaagatatataatttaacataagcattcaagacactgcatgccacttaagtattcaataaatgttagctattataaccgctgttaaagaaatctcagtctcccaagtttctcttctatttattattttatccatcagatgtcagctatcccttgcttccaacttttggcaattatgaataaagctcctataaacattgtatgcaggtttttgtgtggacatgttttcaactccttttggtaagtaccaaggagcgcaactgttggatcatgtggtaagagtgtttagtttttta

SEQ ID NO: 26163 - DNA, 470 bp, Homo sapiens
agagtaagagatttccagtgaacatgtattctatgttttctttaataatataacatggattttaattcagtttatcagccatgccaatttatcagtctgctgaaaaatacttgaggttcatggtctgttgtaaattcaaagtgttcattgtcatattggggaagtttggctcatcgtttagggcccattatgcttgcgtatggtatctttatcacctgctagacaattatactctgatatatttatataaacttgaagacaaattctagtcaacttataaagacaaaagccaatatcagacggtacatttaaaacctgtgaatcaaggtttgactttagtggccttttcaccaaataatagtccccttttccttcccccctcagtttagcacagcggtaataacaccttagagaggaacctttcttacaaacaccttccctccttggtgattggaaggcatattttctga

SEQ ID NO: 26164 - DNA, 395 bp, Homo sapiens
cctaaaagctttggaagaagtcatttacttcctctttgcagtggctggccatgcagtcccagtgaaatcaatctatgttctgtaaataaattgttaataaacacactcacttattggcatcggccacaggaatagataaaatccccagccaattattcaactgttctaggaattgcatagttgatttgcagacaggtacaccctcttgataacctatgtaggttctctgtgggaatgcttcctgaactgcatacctattgcccgattatagaaaaagccctggagcaatccaaaagtctctggttcctgcaaagtcaaagagagagctgcaagtcatcaaatcttccccctccttcctaagagatgtagaatttgtggccaataaaacagatctt

SEQ ID NO: 26165 - DNA, 4545 bp, Homo sapiens
cagaaatcgttttacagaaattccttctgatgtctggttatttgcaccccttgaaacattaaatttatatcataattgcatcaaaaccattcctgaagccattaaaaatctgcagatgttaacataccttaacattagccgaaatcttttatcaacattgccaaaatacctatttgatcttccccttaaagttttggtcgtcagtaataataaactggtatccattccagaagaaattgggaagttaaaagatttaatggaattggatattagctgcaatgagattcaagtccttccccaacaaatgggaaaattacattcacttagagagctaaatataagaagaaataatcttcatgttttgccagatgaattaggagaccttcccttagtcaagctggatttctcttgtaataaagtgaccgaaattccagtttgttacagaaagctgcatcatttacaagtaataattttggataacaatccattgcaagtaccaccagcacagatatgtttaaagggtaaggtgcacatatttaagtacttaaatattcaagcatgttgcagaatggataagaaaccagattccctggatcttccatcattgagtaaacgaatgccctcacagcctctcacagacagtatggaagatttttatccaaataaaaatcatggccctgactctggaattggaagtgataatggagagaaacgattatccacaacagaaccatcagatgatgacacagtcagccttcattctcaagtctcagaatcaaatagagagcagacatcaagaaatgacagtcacataataggaagtaagactgattctcagaaagaccaggaggtatatgattttgttgaccccaacacagaagatgtagcagttcctgaacagggaaatgcacatattggatcatttgtatcattctttaagggaaaagaaaaatgttctgaaaaatctcggaaaaatgaagaattaggagatgaaaaaagacttgagaaagaacagttactggcagaggaagaggatgatgatttgaaggaagtaactgatttgaggaaaatagctgctcagttattgcagcaagaacagaagaacaggattcttaatcattcaacttctgtgatgagaaacaagccaaaacaaactgtggaatgtgaaaagagtgtctcagcagatgaagttaattcaccattatcacccctcacctggcagcccttagaaaatcagaaggatcaaatagatgaacaaccgtggccagaatctcaccctataatctggcagagtgaagaaaggaggcggagcaaacagattagaaaagaatatttcaagtataaatcaatgaggaagagttcaagtggcaatgaaaatgatgagcaagacagtgataatgctaatatgtcaacacaatctccagtatcatctgaggaatatgacagaactgatggtttttcacacagtccctttggcttgaagcctagatcagcttttagccgctcatctcgccaagaatatggggcagcagatccaggatttacaatgagaagaaagatggaacatttacgggaagagcgagagcaaatacgacaacttcgcaacaatcttgaatccaggttaaaagtaattttgcctgatgacattggagctgcactgatggatggggttgttctttgccatttagccaatcatataaggccacgttctgttgctagtattcatgtaccatcaccagcagtgcccaaactgagcatggcaaaatgtcgaagaaatgtagaaaattttcttgatgcttgtaaaaagttgggtgtctcacaggaaagactttgtttgcctcatcatattttggaagaacgaggacttgtgaaagttggtgtcacagttcaggcgctccttgaattaccaacaaccaaggcatctcagctttctgtggcttaatataacattttaaaattctaagtgtatagtttcatttatttgaagtgatttcaaatatttcaaattcatgaataagaatattccgtcaaaaatagtttgccttaggtcacgccttaggattttaaaaaaattacattgaaacatcaaacttaaacattgaattgcccgaacttctttgggggaaaactggattaacttaataagagtatttgataaactcaaattctctttttactaagtcagttgataatcttgattatttttcagaaagcagactgatactaaatttaaaatgtagtttcaatttaataatcacattaggtttaatttttttacatcatagcatattagtaaacatctggataaaggtaattttttttagcaatttagagcaattctatatttgagttatttaatacacttctaattctagtttatacacaatttcttcaatctttggtcttagttttctagaaaaaaggagtagaaaaaacaattctggctttatattaaattcttttagtattataggttggtgccaaaatattttcagttgtactgtagattgtttacatgtgaagtgcctgtgtaattgatgactcttacatagtcttaagcatttttgcaattttttaaatgtattaatagagtcaatggaactttaaaatattttagtagattttgtaaagtcagtaatatgtgaggatttaaatgagcctcacattgtgacatttgtggttttttagttagtccattgcagtttcccttaaattggttatttcatgttgtcaaaaataccaatgttaatatgattaatttatgctatttaattttgtgaaacttaatcatcttttaaaatgtattatttgaagagtattttatttctgtattgaaaatgttacacaaagcagtaaagtttttgagaactagtgaagtactaattatcaaggacattttgataaaactgccaaagtttgggtttatatcttccctttgagcagcattctatcagtgctgcctttagctatactcagagagcagcagttgaggaataggtttttactcaaaatctggccatttgtgaatcctgtaaaccttgtgatcttcaattactttgatgttaaattaaacacagactcttctataaatattttcatgagatactgtgttacacaaagtccttgttttaacttaggtatgggtaaatttacattggtggtattgcaggaatttttcaaaaacattactgtaatgaataactgagtttcctatagaagaacctgaataattacttttgtagtaaccaagcaagcatcatatcttaagtatgtgatcatttgcacttgttacctcttaatatggatgcaacttattaaaaatgttggcctgggtatttcaaagggtatatataaaaggtaaaaaactagtgtgccaaatggtataggaacaactgtactttttttgatcagttggcatgaagccatagaattaaattttggctttagaatacagatgtgttcattacattccccaagggtcaaattggagcttttaaagaattaaagcttctatgagtatatggtttaagaattaaattattagtaatttattattttaaatatttgacctcattagttgttaattttttagttggataaaaaaaaaactcgctgacataatctccctagtgaaaacttgggtaatatatgtaagaaatggcaaataaataccttagttaatgactttttatgtagaaatttgacagcattacaaattaagtgaccattaaaaacacagcaatcattcatactgctttcataggtgttatgatagtctctgattaatcaatctagtatgaattattttacaagtgttgtcctgtttcatatctttgaagtagtagtgaaattgtaggccattttcttataacatttcagttacttttcagttaattattcctttaaaaagaaaatacagcagaacctcactgtagcattctttactgcagagcaaaattcaatttaagatgggcttctctgaggtccacatcatggcagttcatttactcttgtgccaaatggcaacaccacgtctaaagcagtttcacagcatggtcccctacaatgttataccaaggctctgatgtatttcttttagtagtttctaagtgtaaaatttattctaaatgtttttatggctattatctatttcatcagttattgaattaagaatgattttcattacttgagtgggatttgtgatttaatgacagttgaataatcaaaaatattttattaggcccccaaaatttaatagatatctatttctgttacattttattactgtatggcacaagaaagaagtgacattgggtatgttagaaatgaaataaggagtaaaaatgcattaccatttgtttaataattatctttacagaatgctagtttaatgacttttttaactgaattttttgaataaatcagaaatgtttgtattggtcacagatctatcataattgcttttctgatgcatttaaaaataaatggaacacttaaatgtatattaccgatgcaaactgtggataaagttgaaaaaaaaaattt

SEQ ID NO: 26166 - DNA, 1038 bp, Homo sapiens
tggcttgatccccaaaggaattttctactccaaaatagaatttttctaggatgctatttctcagtccctggagatactcaaacaaagggcttgtcacaagggtttttgtagaagctattcttcacagaggttgggggagagattaagccaaaggatctctgaggtctttttcaaatctataattatgtggccttttgttcattgacttccatgtgttctagttgatcattacaaacctggcaggccttctcaagggttcagtaattagctgtcatttcccatttgtccagagagtgtccaacacaaaatacccctaagatcttggccaatagagaaatgtcatggaattttagaaatgacagtatctgcggagtttattccaagttatatcatttcaaagatgaagaaacccaggctcagagggagccatcacatccacaccctgtcacccttcgtggccagtgccagacagtagctagttggatgctaaaagtagaatttagatatcttaacaataagcccagcagtctttcaacttcattcgtaaatcatttttgttttgagcatctgtcacgtggcagcacttgcctggatactggagagctgagaaggaatgcgacaggcaagtcctactctcacagtgtatacattcaggaggaacaagacacacagtgccaagtaaataaagtagctgaacttcatcaaatgattttattcttaaagtcattaaagcatgtaatgttcccctttttttgtttcaggggtgtacagattgaagaagtgtaggtgtttatgtggttttagtgacaaaccccatgtgctttcattgattttatgttttatgttaaaacatcaaccgcaaggtaaaatgcatattgtatgttgttggatacgtacttaactggtatgcatcccatgtctttgggtactagtgtatgaattctaatctctgtaaatgaaatgttgtatgtgttaatatatttaatagatgtaacttaataaactggcattgaagactgaagaattttcacactgtca

SEQ ID NO: 26167 - DNA, 1638 bp, Homo sapiens
ctgcctcggagcccatggttcggacgtttgcccgagccgtttcccggggccttccctccagctccgagcgtctggccgtgtccgcggcgatagcatcgccccgttacggcctctgcgggagggggaactgaggggacgacgcgggctctggaaacatttcggacccgtttcgggcaggcatgagtcttccgagcgccttgtgattcctcggggggctcaacgtcgaaagaaaggcgagggagactctggggcctgggccacgctgtgcgggagtaagaggagccgaggacgaggctgacggccgtgaaactagccgagtgccacaaaggaccttcccctcaccgcctctggcgctcctttccttgcagcctggagggccggctctggctctgcgcaggcgcgcgggcgcagcccctctcccaactcttgtttgctctttctggccagcgaccccagtgtggggcacgcgggagagccccacatttcttctagtcgcagtcccgccggcgtggggtggcccctgaccgtgcaacgggcgcaaggctcgcacccactacggcccctcgggcggcggagcgaggctccgcgaacccgggactgggcgcgccaggcccgcgcgctgaggccccctcccccggctctggccacgcgggctgctctgcctctgtgagtgtgcgggacacagagccagggggagggagggccgtgttctgcggtcacaggcagacaggagtgccggaagatgcagtctggagcccccgggggactgtgagtgaggtcttctccccggtccctccttagatctcccatttcccagttctcccctcccgcccacaccttttttgtcattccagacggttccggcccagcagcagccgccatccccacgttgggtggcgagatccgaaagtttccagctacgaacagtttgcttttttttttccttgatcgctttttttggcaagggcggagagcaccagtagcgtggggggtttaaatgcactttccctgaatgcaacagagaaatgccgggctggagggcaaactccaccgggacagggaggcgggagatagcctgagcgcccccccatcccccacactctgagcgtcgcaaccccgggggcacctccagggactacttgccttgtgcgtcagcgagtgacagcgtcacacacacgccccctcccgcacatgcccgctgcaccctccctttccccctccccttcccttctctcttttcccctagctcttcccaccaggcagagaggctcagccgacccacacgctcccagagcactgaaagctaaaaatatagccggtgtgttagcaacagccttcccattggtcgggggaaagggagaagcggtgtctgattgggtttaggatccagccgctaagactgggcccttgggagtgtgcgtttgcgccagcgggcacggcaagggatgctggtatttgtagtcattgattaaggcagccatgtaaataggtgggtttacatcccagttcggctacctactgtgtgatcttgatttaatgcagcaaaacgcttgacatcaccaaacctcagtttccccatctataaaatggagctcgtgtcggggattaaatatgatgctgtatgtaaagcctggctca

SEQ ID NO: 26168 - DNA, 485 bp, Homo sapiens
gtgtggtggcaggcgcctgtaatcccagctattggggaggctgaggctggagaatcacttgaacccaggaggcggaggttgcagtgagccgaggttgcgctccagcctgggcttcagagagagacgctgtctcaaaaaaaaaataaaataaaaataaatgtatattagtacccttagtaaatatgcaggtgaaggttttccaagttttcacagaaaaaaaaatccgcatttctctgcctagatcttcaggaactagtacattggcagttttcagtaagactcctctctgtcactgccatacgaaaaagaaagcctatgggttttgtttttgttttgtagtgggaaaagttggcctcataattggccctggattccaggactttttttttcggtagtgtgtcttaaccttctgacagctgctgtgacgaagctagaaagcttaatgagactgtgtggtaaaggatcctgatgttcgaaaaaaaaaa

SEQ ID NO: 26169 - DNA, 317 bp, Homo sapiens
tttttttttttgagacagagtcttgctctgacacccaggctggaactctgtctttaaaaaaagcaaaagaaaaccaacttgtagaaagtcactgagctggaaccagaactagaatagggctctactctttctgggtccaaagttctttaaatcagcaacccctcttactgcctatgtaagggtatacctttagttcctgttgacttgggatgtacaaagaatgaggtagtctaagagagtaacagcacactggctgtggagtcagaaagactccacctctaaactttgtttccatctctaaactttccagcagtgtg

SEQ ID NO: 26170 - DNA, 244 bp, Homo sapiens
aacctataaaacagggaaaagctccttgccattggtttttgtgacaattttttagatgtgacatcaaaagcacaaggaataaaacgcaaaaataaattagaactacatcaaacaaaaaagtgtctgcacaacaaaggaaacaacaaaatgaaaaggcagcacatgtagcgggagaaaatatttccaaccatatatctgataagctattaatatccaatatatataaggaactcatataactagc

SEQ ID NO: 26171 - DNA, 378 bp, Homo sapiens
taattttgtcagttttaactcctaaatatctttcagtttcttcgacttttctctctttctgtcacccctcttggcctaagtgcctgttgtcttttctctgggctacatcagtagtctttatatttcccgattccctgctcactcctttcctccctgcattcattctttcccctgtttcattctccacatttctgccaaaatgatacagcacactatactttttcctttattgtgcttcacacagttcataattggatatttgcaggattattttgttgctgttttccccactatactctaggcgtctaatttgcttactctagaagtttgagcacttggtacagcatgtagtatgtagagtgtgtatgtatgaatgaa

SEQ ID NO: 26172 - DNA, 305 bp, Homo sapiens
gcggccgcctactactactaaattagcggccggtcgacagatgccgtgagcaaaataaaggagggcagatgctggcaaaaaccagataccacttccctccacctgggagccctccccattccatcgagagggcgaaggggcatgggactggtcggctgtgtgggggcgtgtgctaaattcaggaatgtggctcacgtgatcgcatgtgacacgtgtctgtgtggctgcctggagacacactgcatggcccactgaccgtgtttctggggtatatcagagtgggtccagcatcaaaggggccccag

SEQ ID NO: 26173 - DNA, 404 bp, Homo sapiens
gcttgatgggttactatactactgatgatctatatttcctgtcagttgcattttagttattccatcctgggaatactgccattcattgtgattggatttggatgttccccaactgttcttgggcatgacattaaaaaaaaaggtttttgaacaaccagctaatctttattgtgcatggagacacagtaattatactcccataggcgctttttgtttctttggtcttggagcatccctcagcaacctattctgtggctgatggtacagtagctattaatagtttatacaggaggttgggcgcggtggctcatgcctcccaccactttgggaggctgaggtgggcagatcaccagaggtaaggagttcgagaccagcctggccaacatggtgaaaccctgtctctc

SEQ ID NO: 26174 - DNA, 477 bp, Homo sapiens
ctgggtggcagagccagaccctgtctcaagaaaaaaaaagaaatttattacatttcatataaattgcatttttctcaggtaaagaggaatctaacgttagactaaggttcttcatcctcttttcatgaaatctcaaaacatggcagaggacttttttctatgaatatatgtgttatagtattagaaaacaaaatctgtggaatccttgaaattcagaaggcaaacaaaaccagaccaatgctggaaacacatcctagtcataacacagaggaggatgatggcctcagcacctccacctcttcatttttctctttgttatggattaccctttcttcttccccacgcccccaccttcttgtcttccttcacaacccacaatcatgttaataataaattattatgggcatagtgaaatgaaatggtgttttgtcatagctaaataccgtagttacaacaaacaaatatatcaattctgtt

SEQ ID NO: 26175 - DNA, 1377 bp, Homo sapiens
ggggcaaatgccattgaaaccgctagtcttatttcctttctacttttctttggcactcttactgcctgtaaggagtagaactgttagggcacactgttgctatacagtttaactcccattttcatgttttgtctttcttttcccatttctggggcttacctcctgatacctgcttactttctggaagtagtgggcaagtaagatttggctcttggtttctaatttttaaatttctgaatactgccctagtctgaacttggcctttatagattaatctttgcttcacatttttagtgttgtatttaaactattttataatttaaaaatagattctaatctgaagatacttttcaagaaatattattaactgatgtcatcctcatcccagcagctcatctgttaggaatgaagttgagatgcttctattccatgtttttgtatttgggaaggattcaaagttgaaggtttattgtcgttgggtttttcagatggtgacatgtaaactcaggatagcaaaccctaatgttcacacagtgctctgcctctgcatctcagttgggatagttgctccttttgagtgttttaatcatcgtataactaatcatagtgccaagaagttcataatgtgttatgtagctaatgtcactgaaaaacagtcctaccattttaggtaagaccaaacagagtctctaacccaaggacttgttacacctgacaacctatagtatatttgctttttctcacaaaatgaaaccaattttgccgaaagctagctgggataataggatcatcacaagttgcagtttctataactaaaattagattgaaatctcttctgacctagaacattttacttcaggcattcagcagatttcagaaagaattaccttattttaagttagtttctttgttagtttactgtgtgtctcttattcaataaacaagcagaatttgtgtcctgccctatccatgtcttaaagatgagaagttggatccactgagttagtttcattggggcgggggaaagaactgtaattaaacttgtttaatccttattttgtattgtagctattttttgtaaaagcaacttaaaatcttttaaaaattttatagtgacattagagacaatggtcatacaaattatcacataaacatggacttgaaaaattaggcttttcataaaacacatcacatgtcattgactgctttttagaaatacacttccaaggcagtacatctgtattgctactgaaaagtgccatttcacagaacacagacttctttttgctctttgacatcttgaaaacatctgtttttcttttttaatacaaaactttgtgctcaagacaaagggaacaccaggatcctgtagtcagc

SEQ ID NO: 26176 - DNA, 1905 bp, Homo sapiens
ggggcaaatgccattgaaaccgctagtcttatttcctttctacttttctttggcactcttactgcctgtaaggagtagaactgttagggcacactgttgctatacagtttaactcccattttcatgttttgtctttcttttcccatttctggggcttacctcctgatacctgcttactttctggaagtagtgggcaagtaagatttggctcttggtttctaatttttaaatttctgaatactgccctagtctgaacttggcctttatagattaatctttgcttcacatttttagtgttgtatttaaactattttataatttaaaaatagattctaatctgaagatacttttcaagaaatattattaactgatgtcatcctcatcccagcagctcatctgttaggaatgaagttgagatgcttctattccatgtttttgtatttgggaaggattcaaagttgaaggtttattgtcgttgggtttttcagatggtgacatgtaaactcaggatagcaaaccctaatgttcacacagtgctctgcctctgcatctcagttgggatagttgctccttttgagtgttttaatcatcgtataactaatcatagtgccaagaagttcataatgtgttatgtagctaatgtcactgaaaaacagtcctaccattttaggtaagaccaaacagagtctctaacccaaggacttgttacacctgacaacctatagtatatttgctttttctcacaaaatgaaaccaattttgccgaaagctagctgggataataggatcatcacaagttgcagtttctataactaaaattagattgaaatctcttctgacctagaacattttacttcaggcattcagcagatttcagaaagaattaccttattttaagttagtttctttgttagtttactgtgtgtctcttattcaataaacaagcagaatttgtgtcctgccctatccatgtcttaaagatgagaagttggatccactgagttagtttcattggggcgggggaaagaactgtaattaaacttgtttaatccttattttgtattgtagctattttttgtaaaagcaacttaaaatcttttaaaaattttatagtgacattagagacaatggtcatacaaattatcacataaacatggacttgaaaaattaggcttttcataaaacacatcacatgtcattgactgctttttagaaatacacttccaaggcagtacatctgtattgctactgaaaagtgccatttcacagaacacagacttctttttgctctttgacatcttgaaaacatctgtttttcttttttaatacaaaactttgtgctcaagacaaatcttacatgaaactctcataaaccatgaaaatgtagctggccttcgggccttaggcatgaaataagcatgaggaacatattcccctaacttctacccccagcccagcaagttatcctttaagaaatctcctaggaattctggagtttgaaaacaattgctctatgttattcctgcttccagtctctaagtaacaagggcatttaaaagcatagtctcttaaggtccactatagtggttctttatttaaggaataactcagctgggtgcagtggctcacgcctgttatcccagcactttgagaggctgaggcaagcagatcacttgaggccaggagttcgagagtctggccaacatggtggaaacccatctctacaaaaaatacaaaaattagccaggtgtggtggcgtgcacctatggtcccagctatttgggaggctgaggcaggagaattgcttgaacctgggaggtggaggttgcagtgagccaagattgtgccgctgcactccagcctgggtgacagagtgagactctgtctcaaaaaaaaaaaaaaaag

SEQ ID NO: 26177 - DNA, 161 bp, Homo sapiens
aaatgctctagacagcaaacaaatattttactcactggaaacatacattctatgttatattccacagagactgtaactgtgaggataggaaattgttaatgacagctgtgtccctagttccttagaataatgcttcgcacaaagtaggttctttacaacta

SEQ ID NO: 26178 - DNA, 374 bp, Homo sapiens
tttacacatgaggcttcattataaaggaaaggtcattcaaagtaactgctgaagttgttggctttgactgagaaaatctaagcctgtcccgtttacttgcctcaatcatcaggagaatgcctaccccaaccacacacattatatagagggctgtgttcctaaaggagacttctggtactacagaggagaattaattcaaagcagatagaatgtggaccttgccttgagtgttcctggtgtcatgttgcaatctctggggagcagtgaatctatatctaatgtataacaaaggccaaggtcttgggaatcatggaaagaagcaattcaaatgttaaatatagcacatttttttgtgtgtgcattccctcatgtgt

SEQ ID NO: 26179 - DNA, 449 bp, Homo sapiens
gtccaaaagaaaagataaccccaaagattatgttttattgtcaccagtttgtttgttcattgaaatctaacctagccatcttactctagttctttttgggttttacgcatatatgtgtgtacaaacacacacacacccctaattcctcaaatgctcttggcataagttttatctcttactggtctcctcaaggcgtaaaataaatctttgaccttgatcattttaattttaaaaaaggtaaaagtcgtgagaaaaaggagtgttttatatgaaaagaataaagggacatataattaaggcaatacacaaacctgactggatcctggttcaaaaagaacagcttgatacaactgaggaaattagaacatgctctgggtatcagatgctactatggaattccccatcattctcctgggtgtggtaacagtcatggttatgtaggagaatgt

SEQ ID NO: 26180 - DNA, 416 bp, Homo sapiens
  misc_feature (2)..(2): n is a, c, g, or t
  misc_feature (187)..(187): n is a, c, g, or t
anttcggcacagcctcggataatgccactgaatagtcaggaattgactccaagctgttttgctgcttattcacctgtactaagttgttcgtttcttatagtcaatatccctcaatatcaactttctgagacatgggatcttgcctttcactaccatattcagattaaaggagtttatttatttattntattatttattttttttttgagacggattctcgctctgtcgcccaggctggagtgcaatggcgcaatctcggctcactgcaacctccgcctccagggttcaagcgattctcttgcctcagcctcccaagtagctgggattatagacacccgccaccacgcctggctaatttctgtatttttgtagagacagggtttcaccatgttggccgggctggtctcaaactcctg

SEQ ID NO: 26181 - DNA, 345 bp, Homo sapiens
ttgagatggagactcgccctgtcaccaacgctggagtgcagtggcgagatctcggctcactgcaacctctgcttcccgggttcaagatattctcctgcctcagcctcccgagtagctgggattacaggcgcacaccaccatgcctggctaattttttgtatttttagtagagacggggtttccccatgttggccaggctggtctagaattcctgacctcagatgatccacccacgtcatcctcccaaagtgctgggattactggcatgagctaccacaccaggccaaaaatatctttcaaaaacaaaagttaaatgaagaattgttcatacatacaaaagatgaa

SEQ ID NO: 26182 - DNA, 472 bp, Homo sapiens
tctcaagcgtcaaaatctaatggaatttgtcatgctatgtttctgacttgcttgggatacaagatccccttccttctaatttctttcatctgaaatgagaatgtctatcctttacctgtcacccattgtattttggaagcagataacttgtctgtttttcccaggttcacagctggagatgaacttctccccagcatgattcatacctgtaatcttacccattcttgatttagatgagatttggatttcgagttgatgctagaatgggttaatacttttgaggatgttgggttgggatgaatgtatttcttatgtgagaaggacatgacctttgtggggactgaggaaggaatgtggtatttacttgtgtcagccctggaaaacaatgagaaaagatgtttgccctgttttattaatttttcattgttttataataaagttttaactaatctagttcaaaatgctgccagaa

SEQ ID NO: 26183 - DNA, 419 bp, Homo sapiens
gctctctctgaactcccttaagtggctgaagatagagcctccaaaaagaaacacaattgtcataggtatcctccctgggaatctcatcagtgaaggaagattaactcacaggagacaccacactccagaaagactttgtcacaaactatccattacctcttcttctgatgagatccttggagacaacttttattacctgagagatgttatctgtataacaagacaacctttgttctccatgcattccctcctcttactcccctgcaacttgtatagacaccacccccgataaaccaccaacccctactcctttctttagctcaggatgctataaaaacttctatcatctggcccctcttcaagtcctctactttgtgggactcctgtgtgtaattaaaatagcttttctcctactaaac

SEQ ID NO: 26184 - DNA, 378 bp, Homo sapiens
ttttttttcaaaatgagggcaaagagaacagttcaaatcttgccacttaattctcatttctgggctaggagacctacctttctcacatttaacaactatagcattcttttacaagaatggcatgccctgctaaagaattctggaaacattcagataatacctagccaatgaagatcctaagattattgcaacagagaaacaactttagtccctagttacatgaccttgagcatgcatttgttttctctaagcctttgtttcctcatcatatgatgttagtaagattaacctcacatggttgttttaagtataaagtacaccagtgtaaatgaagggcctggcataatgtgtgctacctgcagaaacacatagtatgtc

SEQ ID NO: 26185 - DNA, 483 bp, Homo sapiens
gcttagttcttcttaattcttctgcaactgtaagaaaataattctttaatctaaaccatattctcttttagctcattcctctaaagtgaaaaaaatctcatttgtatggtgttccccttctgaagttcatgcattcctcaaagttttgcaagcaaaacaagaaaaactatttcttctacaagcatatcaggatttaaagtaattttctgcaatgttaggcaatgttttgtgcctttgtgttcatgttttcggttttagttttaattttctcaaattcttgaagtgtttatcttcaggaagcagtttctccaatagtatgcaaatcccaaacctgggtcgtgaatgtattgctcagaatcttcaagaatataggagatttttcaatgtgacagaaggtaaaactttgtcttaaaaaagaaaaaaagttaaaaccttataaattatgaatgatatctctctgtaaagctgttatttaaaaaaaaa

SEQ ID NO: 26186 - DNA, 2141 bp, Homo sapiens
gtgctgactggcaggcattgctgggatgggtttccactagaatagctttgtgatgtgggatgggtgttctttgtggtttggtttttcttggatgttgtttctagcttggtttatccaagtctggttctctggccctctgagagatctgtgaactaaatagtatcttttaatccctttttgcttcaaccagcccagtcacagccagctacataatttgtggagcccagagcaaaatgaaaacgtaaggcctcttgttccaacacaggggaaaatgtgctattatctgtattaaaatataaagctttttctttgttctgtcgtcgctctctccacttgtcatagtgtttttaaatttgctttttaatgtcattctatgagaagaaaaattaaattttttaattcttaggatgaattttaccattcatctttatattgtgtaatgccgttttaaaatgcaaatataagagcatttcaattgtatgtggaatcaccaaaattatacaattcatagcttgtaaatgcatatgtattttgtgctatcagagcagtgtaaactctgcacaaaacaaaactatttttgttttccttcttgatatgcacacattctaccaacattctccatcttctgcttactgatgagtaaggaaggatgaaaggaaagggagtgctgagttgccctactttccctttcattctttgtcatcattttttgtgtaaatggttggctaatagtggtaagtaacacatgagtaaggaaggatgtgatgtaatcacttgtgtttcttaaagatgctgttgccttctttctgcacctgaagcaagttcggatttgaatgaaaagtgtagcctcttggaactgtctatgcctccactaactcagtcatagatgttacatgcttgttttgtattaactttgttactctcttgagttcctgcacctcataggtccaccagaatcctttgtcatgaggcatcatggagaccatatgcaaatagaacggcaaggaagaaaggatacatacctctgcttgcatattatgctctgctataccactggacttacaaaacagatagtcaaacataaaagtattacaattttcaagacagtgactacagagcattaaaccaagcactgggccctgtgtgactatacttgtcgcatgttcatgaagttgatggctctgagcgcttgggtttctcaaatggggcttctggcatttttggtgaaacagtttttcattgtgcaggacatttaacatccctggcccccatgcactacatgccactgtaacaataaaaaattccccatgtatttctaaatgtccccaaagaggagttgctgctctccactaaactcctagagtgacctccactgtgtacagctatgaaccatgagcactacagagttgagttaaaaaggatttcaaattctcatatcccggaaagcagaattatgatgacttttttcgtattgtcaaataaataataccacctacattgatgatgaaacaaatatttgagataacaatttaaaggtggttagtgggttctatgtgtcacatataaatggtagttgactccagatagatggcaatttctgatagtttaaaaaaaaaaagaaaagagcagagcaccacagaaaagcaaagagaaccatcttaccttcattatcttcatcaggtagcccccaggaaaaactaagaaagttgtcataataagatatgctactcttattacattggatttggaatttagttttatcatatctatttttttttaaggtatagttcttcatttaagaatattaactgtcagggccaggcacagtggctcaactctgtaatcacagcactttgggagaccaatgcgggaggattgcctgagcccaggagttcgagaccaggctgggcaacgtggcaaaaatccatctctaccagaaatacaaaaattagctgggtgcgatggtgcatgcctgtagtcccagctacttgggggctgaggtggaaggatagcttgagcttggggaggtcaaggctgcagtgagccttgagcctcatgagcataggattctggtggacctatgaggtgcgagaactcaaaagagtaataaagttaatataagacaaacgtacatctatgac

SEQ ID NO: 26187 - DNA, 203 bp, Homo sapiens
gtcaataataaatttgaagaatggagaataatacattatcacgtgccagaccttatgctaaacactggatatgttatattgtgtttcatactcaggatgatgctacggtaggtaccattattatcttattttacttataagaaaacagaagcctggagaagttaaacaatttcctcagtatcagaaagaaccaagatcaaata

SEQ ID NO: 26188 - DNA, 515 bp, Homo sapiens
gcatccttatccttcagacggcggcaattctgcagctgctcattgaggacatgagctggcatctttcccggtaggactgcggcacgtctgtagccacgcactaaggacctgggtaggcgtcatgaccctgggagcagcggcacagctgcgactgcgtatggaggacccaggcaggctcctcactctgccgactgcagcgcgcctgtggttgtgcaccaaggacccacccagacaggcgttcttaccctgtggacagcggcacagctggggctgtgcaccccaagatccagctgggcattcttatcctgccgactgtggcacgtctgtggccaggagtttttatggtgtggacagcagcacagctgcggctgcacactacggacccagacgggcgttcttgccttgtagactgtggcagggcggtggcggggcacccacgatgcaggcgagtgtattaccctgcgactggcaacacaggctgcgcagccaggactcaggcgggagtccttactctg

SEQ ID NO: 26189 - DNA, 484 bp, Homo sapiens
tttagttacctttaccagtgctctttatttcttcatgtggtctcaaattactgtctcgtgttccttcatttcaagatggactccctttagtatttcttgtgtgacaggtttgctaatgacaaattgttggttttgttggacataaaattcttggttgacagtcttttttccagcactttgaatgtcatcctatggctttctggcctccatggttactgataagaagtcagctgttaatcatgtgaaggagctcttctaaatgattaattgcatttctctttcttcaagactcttttctttggattttgacagtttgattatgatgatgtgtataggtgtggatctttttaagtttgtcctagttggagttcattgagcttcttggatatggagataaatgtttttcagcaaatttattttgtttttcagcaaattgtttcttcaaatattatttctgtccttttctcttctactaggactctca

SEQ ID NO: 26190 - DNA, 615 bp, Homo sapiens
gtgaagacttatatgaaaaatcagctgttactatgtaaatatgtcagtttctgttaaccagatattgcagtgatgccttaaaggggctggtgcttaagcaaaaatgctttgtagagcagggaagaaggcagcactgtgaataaaagtgtctggtttttgtgtttctagaactgcctgatgctccatggggattcttcatgatgatttttttttgccttagagattatatatgcttatgttaatttatattagatggtatataaggggcttgataataacatgtctggtgcctcaggggctcataaataagaaagtacttaaacacacacaccaaaatttttgagagtgataattttaaaaataaataggaaaaaaagaaaggcttggtaaacactggctacttcggactggtgtcttcattgttgttactcagcagaggtagctgttaaacactgagtgggcatgagcccacaagggctgcggttggagcacatgacagtggttactatacatacgtggatcacttgttatgtaagtgattcatgcactcccagtgcccttggttgggcttattctcaataaaaccagtatcattgttctcctcaaattaaaaaa

SEQ ID NO: 26191 - DNA, 445 bp, Homo sapiens
agaccagctttctgggagtcatagtctgctacagctcttccttcacttccaacagataatcagtgatgtgctccttatcccttttattccccaaacagctgttataaccatgtctttgattattcttttttgctataataatttgtgttaccacttattctctcctgaccatactattttaacaactttcagctggtctcctttctgtcttagcctaattcacactgatgccaggatgatctttagaaaacacaagtatgatcctgaaaccccatctttactaaaaatacaaaaaattagccgggcacagtggcacacatctgtaatctcaggtgctcaggaggctgagacaggagaatcacttgaacctgggagtaggaggttgcagtgagccgagatcgcaccattgcactccagcctggggagcaagagtgaaactccatct

SEQ ID NO: 26192 - DNA, 636 bp, Homo sapiens
tcttagatgccacacagtcaggcctcatgacactggaattgcgatgatcactgttaggaaacagcatctgttccagtgtggcccaaaagtaactctaaagggatgtagttactgtctccttagaagggagcacgacttgctccctgctctattaactctctattaaaagaactctattcaaaattggatagcaaccaaccaaagcacacagatttttaaaatttttctccagggcattatgaaaatgtaccattcaaaggcaggactgtaaagtcagagtcagcagtacagagaagccaagaacagagggagtagctgggtctcaaagtaatctttgaatagaaaaggattattaggctgggtacagtggctcacgcctgtaatcccagcactttgggaggcaggcagatcacctaaggtcaggagttcaagaccagcctggccaacatggtgaaaccctgtctctgctaaaaatacaaaaaagttagccaggtgtggtggcacacacctgtaatcccagctactcgggaagctgaggcacgagaattgcttgaacctgggaggcggaggttgcagtgacccgagatcacgcccctgcacctcagcctgggcgacagagtgagactctgtctcaaa

SEQ ID NO: 26193 - DNA, 455 bp, Homo sapiens
aactcagtaatcaagataaattgtatcttaatgcaatatttttaaaaatcaaaattaatgctaaaaaccatccataatgagcaaaatatcaacgttttaaagacagcatctgacagtgtcatactggctttgttgagcctgtggccaaaggaaaaacgtgccttcatatacatattttaatgtattctttaatggtaattttctcccaaatcgttgaagtagttgaaaaatatacactgaaaagttagaagtaagtgtattaaaactcacagcattacttatgttttattttatttataccccaaacagaatttgtatcaattttactttgctgggtttaatggaagcaaactcatcgctaatattttcaaaatctactcctggaaagaatttaactgtgaaaaaatagattatttatatgtatgaggctagccgggcatggttgcgaatgtctg

SEQ ID NO: 26194 - DNA, 415 bp, Homo sapiens
aataagtaagttaagctgactaagctttaatgacacatagttatgatgctgttcaataaataaaaatggccaaatattcatttaaatcactaaaattattatacgcaacatggtttaaagcattattgtggaatggcattattgagtttatttgtttgcctgttttttttttttttttttactttagttttgccattttagttcatggtaatggagctaataatggatcagttttgccacttcacatggtccccaaacatgaggcttaatgactgtgatggttaattttgtaagtcaatttgattaggccatgcagtttccaaaaatttggtccaacatcattgctgggtgtgtttgtgagagtgtttctggatgagattagcaggtgatttggaagactgaggaaagcagattg

SEQ ID NO: 26195 - DNA, 420 bp, Homo sapiens
actttagatttcaagtatgttagcagcagtaattagggatgttttcctctaaggaaaattatagttataaaattattatttgttagaaatgattcctgctacttcaaattatttatccttaaatgtagaggattaacaatgaacaacttgaaataacttggttatcacctcagaagtttagtttatcactgatttaatgaagaagggcaagaagaggaaggctttatgataatgaggagaatgccaggtgagcaagttgtcaccgtagaatcagaatggacgttatcatccgtagtgagaatggcaaatggataatcaacatcagcccaattgccagactaaaacatcattatgacagacttcatttgcaagaattcttaaaacggagaagctgaagaataaagtggccagtgcaaaaaa

SEQ ID NO: 26196 - DNA, 3317 bp, Homo sapiens
tcccaccccttgcgaggcccctccccgggccgcgcgccctggcgcgcgcacacgcgcacacactccccagtcgcctgtaccaaccaccttctcaagttgtagcggtcgctcgcctggggttctccgtgggcggccgacgggcgcgtgggggagggggttcgggccgcccagcgcggcaaggagcgagtgtgtgcacgcagagggccggggctacggggcagcgccccgggcgatgaggggccggcgttgaccgggaagagcgggcaccgcggcagtggctccgaggggacccgcgatggcagcgccctgagaggaggctccaggcagggcgggctgcgctggcagcggccgctgaggtgctggccggccggctggctggcgacgggggcagaagcgacgagaggcgcgctcggcacccgcacccccgtgcccccgcctcagttgtctaaacttcgggctctcttccacccgctctgcgcgcccagagtcaacaacttcttcacccccctccgcccccgcccttccctccgtcagccccgggagctcgccgcgcgccggggaccaggaacctccagcgctgagatgtggccgtgaggcgttggcgggcggcgaggagaagctcggcggcgtcccggggccggagggccgtggggccggggcgcaggggcgcgagcaccccgcgcctctcccccgcctcctcctgccgtctccgccgctgcccgtgccttgcaagcagcagccggagctgccaagcgtcagggccgcggagatgtcgtcgtcgtcgccgccggcgggggctgccagcgccgccatctcggcctcggagaaagtggacggcttcacccggaaatcggtccgcaaggcgcagaggcagaagcgctcccagggctcgtcgcagtttcgcagccagggcagccaggcagagctgcacccgctgccccagctcaaagatgccacttcaaatgaacaacaagagcttttctgtcagaagttgcagcagtgttgtatactgtttgatttcatggactctgtttcagacttgaagagcaaagaaattaaaagagcaacactgaatgaactggttgagtatgtttcaactaatcgtggtgtaattgttgaatcagcgtattctgatatagtaaaaatgatcagtgctaacatcttccgtacacttcctccaagtgataatccagattttgatccagaagaggatgaacccacgcttgaggcctcttggcctcacatacagttggtatatgaattcttcttgagatttttggagagccctgatttccagcctagcattgcaaaacgatacattgatcagaaattcgtacaacagctcctggagctttttgatagtgaagatcccagagaacgtgacttcctgaagactgttctgcaccgaatttatgggaaatttcttggattaagagcattcatcagaaaacaaattaacaacattttcctcaggtttatatatgaaacagaacatttcaatggtgttgctgaacttcttgaaatattaggaagtattatcaatggctttgcattgccactgaaagcagaacataaacaatttctaatgaaggttcttattcctatgcatactgcaaaaggattagctttgtttcatgctcagctagcatattgtgttgtacagttcctggagaaagatacaacactaacagagccagtgatcagaggactgctgaaattttggccaaaaacctgcagtcagaaagaggtgatgtttttaggagaaattgaagaaatcttagatgtcattgaaccaacacagttcaaaaaaattgaagagccacttttcaagcagatatccaagtgtgtatccagttctcattttcaggttgcagaaagggcattgtacttctggaataacgaatatattcttagtttgattgaggagaacattgataaaattctgccaattatgtttgccagtttgtacaaaatttccaaagaacactggaatccgaccattgtagcactggtatacaatgtgctgaaaaccctaatggaaatgaatggcaagcttttcgatgaccttactagctcatacaaagctgaaagacagagagagaaaaagaaggaattggaacgtgaagaattatggaaaaaattagaggagctaaagctaaagaaagctctagaaaaacagaatagtgcttacaacatgcacagtattctcagcaatacaagtgccgaataaaaaaaaagcctcccacctctgccggataggcagagttttgtatgcttttttgaaatatgtaaaaattacaaaacaaacctcatcagtataatataattaaaaggccaattttttctggcaactgtaaatggaaaaatatatggactaaacgtagccctgtgctgtatcatggccatagtatattgtaacctttgtctaatcattggatttattgtgtcacttctgaagtttcacagaaatgaatgaattttatcatctatgatatgagtgagataattatgggagtggtaagaattatgacttgaattcttctttgattgtgttgcacatagatatggtagtctgctctgtatatttttcccttttataatgtgcttttcacactgctgcaaaccttagttacatcctaggaaaaaatacttcctaaaataaaactaaggtatcatccttacccttctctttgtctcacccagaaatatgatggggggaattacctgccctaacccctccctcaataaatacattactgtactctggaatttaggcaaaaccttaaatctccaggctttttaaagcacaaaatataaataaaagctgggaaagtaaaccaaaattcttcagattgttcctcatgaatatcccccttcctctgcaattctccagagtggtaacagatgggtagaggcagctcaggtgaattacccagcttgcctctcaattcattcctcctcttcctctcaaaggctgaaggcagggcctttccagtcctcacaacctgtccttcacctagtccctcctgacccagggatggaggctttgagtcccacagtgtggtgatacagagcactagttgtcactgcctggctttatttaaaggaactgcagtaggcttcctctgtagagctctgaaaaggttgactatatagaggtcttgtatgtttttacttggtcaagtatttctcacatcttttgttatcagagtaccattccaatctcttaacttgcagttgtgtggaaaactgttttgtaatgaaagatcttcattgggggattgagcagcatttaataaagtctatgtttgtatttt

SEQ ID NO: 26197 - DNA, 465 bp, Homo sapiens
ttaaaacaccgcaatctctgccgcctgagttcaagcgattctcctgcctcagcctcccgagttgctgggattacaggtgtgagccacttcgcctggccccctctttctttttaagcaaaattcggaaagaacaatttataatttaaagaagatgaatccagaggttatctgtaatcttcaggagcttaggtctgaggaagtcagagttattggatagagaaaagagagaaacaaacacctgctttctttgtatcttgaagaggtttacagattttgaactaagcttacagctataacttttttctgaaagtgatctttaaaatacttcgttttgaattgtccaattcaattacacatacaacaacgaacgtaaaattattttttctttacagatcagtgctaacatcttccgtacacttcctccaagtgataatccagattgcggtgtttggggtaccgagctcg

SEQ ID NO: 26198 - DNA, 410 bp, Homo sapiens
tcccaccccttgcgaggcccctccccgggccgcgcgccctggcgcgcgcacacgcgcacacactccccagtcgcctgtaccaaccaccttctcaagttgtagcggtcgctcgcctggggttctccgtgggcggccgacgggcgcgtgggggagggggttcgggccgcccagcgcggcaaggagcgagtgtgtgcacgcagagggccggggctacggggcagcgccccgggcgatgaggggccggcgttgaccgggaagagcgggcaccgcggcagtggctccgaggggacccgcgatggcagcgccctgagaggaggctccaggcagggcgggctgcgggtgccgagcgcgcctctcgtcgcttctgcccccgttgccagccaaccggccggccagcacctcagcggccg

SEQ ID NO: 26199 - DNA, 1870 bp, Homo sapiens
tgcggaccgtagccgatcaacctcaggtttatatatgaaacagaacatttcaatggtgttgctgaacttcttgaaatattaggaagtattatcaatggctttgcattgccactgaaagcagaacataaacaatttctaatgaaggttcttattcctatgcatactgcaaaaggattagctttgtttcatgctcagctagcatattgtgttgtacagttcctggagaaagatacaacactaacagagccagtgatcagaggactgctgaaattttggccaaaaacctgcagtcagaaagaggtgatgtttttaggagaaattgaagaaatcttagatgtcattgaaccaacacagttcaaaaaaattgaagagccacttttcaagcagatatccaagtgtgtatccagttctcattttcaggttgcagaaagggcattgtacttctggaataacgaatatattcttagtttgattgaggagaacattgataaaattctgccaattatgtttgccagtttgtacaaaatttccaaagaacactggaatccgaccattgtagcactggtatacaatgtgctgaaaaccctaatggaaatgaatggcaagcttttcgatgaccttactagctcatacaaagctgaaagacagagagagaaaaagaaggaattggaacgtgaagaattatggaaaaaattagaggagctaaagctaaagaaagctctagaaaaacagaatagtgcttacaacatgcacagtattctcagcaatacaagtgccgaataaaaaaaaagcctcccacctctgccggataggcagagttttgtatgcttttttgaaatatgtaaaaattacaaaacaaacctcatcagtataatataattaaaaggccaattttttctggcaactgtaaatggaaaaatatatggactaaacgtagccctgtgctgtatcatggccatagtatattgtaacctttgtctaatcattggatttattgtgtcacttctgaagtttcacagaaatgaatgaattttatcatctatgatatgagtgagataattatgggagtggtaagaattatgacttgaattcttctttgattgtgttgcacatagatatggtagtctgctctgtatatttttcccttttataatgtgcttttcacactgctgcaaaccttagttacatcctaggaaaaaatacttcctaaaataaaactaaggtatcatccttacccttctctttgtctcacccagaaatatgatggggggaattacctgccctaacccctccctcaataaatacattactgtactctggaatttaggcaaaaccttaaatctccaggctttttaaagcacaaaatataaataaaagctgggaaagtaaaccaaaattcttcagattgttcctcatgaatatcccccttcctctgcaattctccagagtggtaacagatgggtagaggcagctcaggtgaattacccagcttgcctctcaattcattcctcctcttcctctcaaaggctgaaggcagggcctttccagtcctcacaacctgtccttcacctagtccctcctgacccagggatggaggctttgagtcccacagtgtggtgatacagagcactagttgtcactgcctggctttatttaaaggaactgcagtaggcttcctctgtagagctctgaaaaggttgactatatagaggtcttgtatgtttttacttggtcaagtatttctcacatcttttgttatcagagtaccattccaatctcttaacttgcagttgtgtggaaaactgttttgtaatgaaagatcttcattgggggattgagcagcatttaataaagtctatgtttgtatttt

SEQ ID NO: 26200 - DNA, 3265 bp, Homo sapiens
tcccaccccttgcgaggcccctccccgggccgcgcgccctggcgcgcgcacacgcgcacacactccccagtcgcctgtaccaaccaccttctcaagttgtagcggtcgctcgcctggggttctccgtgggcggccgacgggcgcgtgggggagggggttcgggccgcccagcgcggcaaggagcgagtgtgtgcacgcagagggccggggctacggggcagcgccccgggcgatgaggggccggcgttgaccgggaagagcgggcaccgcggcagtggctccgaggggacccgcgatggcagcgccctgagaggaggctccaggcagggcgggctgcgctggcagcggccgctgaggtgctggccggccggctggctggcgacgggggcagaagcgacgagaggcgcgctcggcacccgcacccccgtgcccccgcctcagttgtctaaacttcgggctctcttccacccgctctgcgcgcccagagtcaacaacttcttcacccccctccgcccccgcccttccctccgtcagccccgggagctcgccgcgcgccggggaccaggaacctccagcgctgagatgtggccgtgaggcgttggcgggcggcgaggagaagctcggcggcgtcccggggccggagggccgtggggccggggcgcaggggcgcgagcaccccgcgcctctcccccgcctcctcctgccgtctccgccgctgcccgtgccttgcaagcagcagccggagctgccaagcgtcagggccgcggagatgtcgtcgtcgtcgccgccggcgggggctgccagcgccgccatctcggcctcggagaaagtggacggcttcacccggaaatcggtccgcaaggcgcagaggcagaagcgctcccagggctcgtcgcagtttcgcagccagggcagccaggcagagctgcacccgctgccccagctcaaagatgccacttcaaatgaacaacaagagcttttctgtcagaagttgcagcagtgttgtatactgtttgatttcatggactctgtttcagacttgaagagcaaagaaattaaaagagcaacactgaatgaactggttgagtatgtttcaactaatcgtggtgtaattgttgaatcagcgtattctgatatagtaaaaatgatcagtgctaacatcttccgtacacttcctccaagtgataatccagattttgatccagaagaggatgaacccacgcttgaggcctcttggcctcacatacagttggtatatgaattcttcttgagatttttggagagccctgatttccagcctagcattgcaaaacgatacattgatcagaaattcgtacaacagctcctggagctttttgatagtgaagatcccagagaacgtgacttcctgaagactgttctgcaccgaatttatgggaaatttcttggattaagagcattcatcagaaaacaaattaacaacattttcctcaggtttatatatgaaacagaacatttcaatggtgttgctgaacttcttgaaatattaggaagtattatcaatggctttgcattgccactgaaagcagaacataaacaatttctaatgaaggttcttattcctatgcatactgcaaaaggattagctttgtttcatgctcagctagcatattgtgttgtacagttcctggagaaagatacaacactaacagagccagtgatcagaggactgctgaaattttggccaaaaacctgcagtcagaaagaggtgatgtttttaggagaaattgaagaaatcttagatgtcattgaaccaacacagttcaaaaaaattgaagagccacttttcaagcagatatccaagtgtgtatccagttctcattttcaggttgcagaaagggcattgtacttctggaataacgaatatattcttagtttgattgaggagaacattgataaaattctgccaattatgtttgccagtttgtacaaaatttccaaagaacactggaatccgaccattgtagcactggtatacaatgtgctgaaaaccctaatggaaatgaatggcaagcttttcgatgaccttactagctcatacaaagctgaaagacagagagagaaaaagaaggaattggaacgtgaagaattatggaaaaaattagaggagctaaagctaaagaaagctctagaaaaacagaatagtgcttacaacatgcacagtattctcagcaatacaagtgccgaataaaaaaaaagcctcccacctctgccggataggcagagttttgtatgcttttttgaaatatgtaaaaattacaaaacaaacctcatcagtataatataattaaaaggccaattttttctggcaactgtaaatggaaaaatatatggactaaacgtagccctgtgctgtatcatggccatagtatattgtaacctttgtctaatcattggatttattgtgtcacttctgaagtttcacagaaatgaatgaattttatcatctatgatatgagtgagataattatgggagtggtaagaattatgacttgaattcttctttgattgtgttgcacatagatatggtagtctgctctgtatatttttcccttttataatgtgcttttcacactgctgcaaaccttagttacatcctaggaaaaaatacttcctaaaataaaactaaggtatcatccttacccttctctttgtctcacccagaaatatgatggggggaattacctgccctaacccctccctcaataaatacattactgtactctggaatttaggcaaaaccttaaatctccaggctttttaaagcacaaaatataaataaaagctgggaaagtaaaccaaagtggtaacagatgggtagaggcagctcaggtgaattacccagcttgcctctcaattcattcctcctcttcctctcaaaggctgaaggcagggcctttccagtcctcacaacctgtccttcacctagtccctcctgacccagggatggaggctttgagtcccacagtgtggtgatacagagcactagttgtcactgcctggctttatttaaaggaactgcagtaggcttcctctgtagagctctgaaaaggttgactatatagaggtcttgtatgtttttacttggtcaagtatttctcacatcttttgttatcagagtaccattccaatctcttaacttgcagttgtgtggaaaactgttttgtaatgaaagatcttcattgggggattgagcagcatttaataaagtctatgtttgtatttt

SEQ ID NO: 26201 - DNA, 3691 bp, Homo sapiens
tcccaccccttgcgaggcccctccccgggccgcgcgccctggcgcgcgcacacgcgcacacactccccagtcgcctgtaccaaccaccttctcaagttgtagcggtcgctcgcctggggttctccgtgggcggccgacgggcgcgtgggggagggggttcgggccgcccagcgcggcaaggagcgagtgtgtgcacgcagagggccggggctacggggcagcgccccgggcgatgaggggccggcgttgaccgggaagagcgggcaccgcggcagtggctccgaggggacccgcgatggcagcgccctgagaggaggctccaggcagggcgggctgcgctggcagcggccgctgaggtgctggccggccggctggctggcgacgggggcagaagcgacgagaggcgcgctcggcacccgcacccccgtgcccccgcctcagttgtctaaacttcgggctctcttccacccgctctgcgcgcccagagtcaacaacttcttcacccccctccgcccccgcccttccctccgtcagccccgggagctcgccgcgcgccggggaccaggaacctccagcgctgagatgtggccgtgaggcgttggcgggcggcgaggagaagctcggcggcgtcccggggccggagggccgtggggccggggcgcaggggcgcgagcaccccgcgcctctcccccgcctcctcctgccgtctccgccgctgcccgtgccttgcaagcagcagccggagctgccaagcgtcagggccgcggagatgtcgtcgtcgtcgccgccggcgggggctgccagcgccgccatctcggcctcggagaaagtggacggcttcacccggaaatcggtccgcaaggcgcagaggcagaagcgctcccagggctcgtcgcagtttcgcagccagggcagccaggcagagctgcacccgctgccccagctcaaagatgccacttcaaatgaacaacaagagcttttctgtcagaagttgcagcagtgttgtatactgtttgatttcatggactctgtttcagacttgaagagcaaagaaattaaaagagcaacactgaatgaactggttgagtatgtttcaactaatcgtggtgtaattgttgaatcagcgtattctgatatagtaaaaatgatcagtgctaacatcttccgtacacttcctccaagtgataatccagattttgatccagaagaggatgaacccacgcttgaggcctcttggcctcacatacagttggtatatgaattcttcttgagatttttggagagccctgatttccagcctagcattgcaaaacgatacattgatcagaaattcgtacaacagctcctggagctttttgatagtgaagatcccagagaacgtgacttcctgaagactgttctgcaccgaatttatgggaaatttcttggattaagagcattcatcagaaaacaaattaacaacattttcctcaggtttatatatgaaacagaacatttcaatggtgttgctgaacttcttgaaatattaggaagtattatcaatggctttgcattgccactgaaagcagaacataaacaatttctaatgaaggttcttattcctatgcatactgcaaaaggattagctttgtttcatgctcagctagcatattgtgttgtacagttcctggagaaagatacaacactaacagagccagtgatcagaggactgctgaaattttggccaaaaacctgcagtcagaaagaggtgatgtttttaggagaaattgaagaaatcttagatgtcattgaaccaacacagttcaaaaaaattgaagagccacttttcaagcagatatccaagtgtgtatccagttctcattttcaggttgcagaaagggcattgtacttctggaataacgaatatattcttagtttgattgaggagaacattgataaaattctgccaattatgtttgccagtttgtacaaaatttccaaagaacactggaatccgaccattgtagcactggtatacaatgtgctgaaaaccctaatggaaatgaatggcaagcttttcgatgaccttactagctcatacaaagctgaaagacagagagagaaaaagaaggaattggaacgtgaagaattatggaaaaaattagaggagctaaagctaaagaaagctctagaaaaacagaatagtgcttacaacatgcacagtattctcagcaatacaagtgccgaataaaaaaaaagcctcccacctctgccggataggcagagttttgtatgcttttttgaaatatgtaaaaattacaaaacaaacctcatcagtataatataattaaaaggccaattttttctggcaactgtaaatggaaaaatatatggactaaacgtagccctgtgctgtatcatggccatagtatattgtaacctttgtctaatcattggatttattgtgtcacttctgaagtttcacagaaatgaatgaattttatcatctatgatatgagtgagataattatgggagtggtaagaattatgacttgaattcttctttgattgtgttgcacatagatatggtagtctgctctgtatatttttcccttttataatgtgcttttcacactgctgcaaaccttagttacatcctaggaaaaaatacttcctaaaataaaactaaggtatcatccttacccttctctttgtctcacccagaaatatgatggggggaattacctgccctaacccctccctcaataaatacattactgtactctggaatttaggcaaaaccttaaatctccaggctttttaaagcacaaaatataaataaaagctgggaaagtaaaccaaaattcttcagattgttcctcatgaatatcccccttcctctgcaattctccagagtggtaacagatgggtagaggcagctcaggtgaattacccagcttgcctctcaattcattcctcctcttcctctcaaaggctgaaggcagggcctttccagtcctcacaacctgtccttcacctagtccctcctgacccagggatggaggctttgagtcccacagtgtggtgatacagagcactagttgtcactgcctggctttatttaaaggaactgcagtaggcttcctctgtagagctctgaaaaggttgactatatagaggtcttgtatgtttttacttggtcaagtatttctcacatcttttgttatcagagtaccattccaatctcttaacttgcagttgtgtggaaaactgttttgtaatgaaagatcttcattgggggattgagcagcatttaataaagtctatgtttgtattttaaaaaaaaaaaaaaaaaaaaaaaaaaaaaaaaaaaaaaaaaaaaaaaaaaaaaaaaaaaaaaaaaaaaaaaaaaaaaaaaaaaaaaaaaaaaaaaaaaaaaaaaaaaaaaaagagggggggggggccgcgtaagaaaaatactctccacggcggggggcggcccactaaagtatgcgcgacgcaggccttttgttttgtaaaggaagggaggccctcacccaagagaagaagcgatcgactatcttatacaagagcagcaggccggccgcgctataaaacagcgcgctcatgacagaaacaccgctagtgcggactatttgtcgagaaggagcacccaactgtggtggggggcaacagccaggcgagcaacacc

SEQ ID NO: 26202 - DNA, 624 bp, Homo sapiens
cggtacaaccccctcctaatactaactacctggactcctacccctccctcaataaatacattactgtactctggaatttaggcaaaaccttaaatctccaggctttttaaagcacaaaatataaataaaagctgggaaagtaaaccaaaattcttcagattgttcctcatgaatatcccccttcctctgcaattctccagagtggtaacagatgggtagaggcagctcaggtgaattacccagcttgcctctcaattcattcctcctcttcctctcaaaggctgaaggcagggcctttccagtcctcacaacctgtccttcacctagtccctcctgacccagggatggaggctttgagtcccacagtgtggtgatacagagcactagttgtcactgcctggctttatttaaaggaactgcagtaggcttcctctgtagagctctgaaaaggttgactatatagaggtcttgtatgtttttacttggtcaagtatttctcacatcttttgttatcagagtaccattccaatctcttaacttgcagttgtgtggaaaactgttttgtaatgaaagatcttcattgggggattgagcagcatttaataaagtctatgtttgtatttt

SEQ ID NO: 26203 - DNA, 1652 bp, Homo sapiens
gcaacttctgcctcctggttcaagcaattctcctacctcagtcttctgagtagctgggattacagatgccacttcaaatgaacaacaagagcttttctgtcagaagttgcagcagtgttgtatactgtttgatttcatggactctgtttcagacttgaagagcaaagaaattaaaagagcaacactgaatgaactggttgagtatgtttcaactaatcgtggtgtaattgttgaatcagcgtattctgatatagtaaaaatgatcagtgctaacatcttccgtacacttcctccaagtgataatccagattttgatccagaagaggatgaacccacgcttgaggcctcttggcctcacatacagttggtatatgaattcttcttgagatttttggagagccctgatttccagcctagcattgcaaaacgatacattgatcagaaattcgtacaacagctcctggagctttttgatagtgaagatcccagagaacgtgacttcctgaagactgttctgcaccgaatttatgggaaatttcttggattaagagcattcatcagaaaacaaattaacaacattttcctcaggtttatatatgaaacagaacatttcaatggtgttgctgaacttcttgaaatattaggaagtattatcaatggctttgcattgccactgaaagcagaacataaacaatttctaatgaaggttcttattcctatgcatactgcaaaaggattagctttgtttcatgctcagctagcatattgtgttgtacagttcctggagaaagatacaacactaacagagccagtgatcagaggactgctgaaattttggccaaaaacctgcagtcagaaagaggtgatgtttttaggagaaattgaagaaatcttagatgtcattgaaccaacacagttcaaaaaaattgaagagccacttttcaagcagatatccaagtgtgtatccagttctcattttcaggttgcagaaagggcattgtcacttctggaataacgaatatattcttagtttgattgaggagaacattgataaaattctgccaattatgtttgccagtttgtacaaaatttccaaagaacactggaatccgaccattgtagcactggtatacaatgtgctgaaaaccctaatggaaatgaatggcaagcttttcgatgaccttactagctcatacaaagctgaaagacagagagagaaaaagaaggaattggaacgtgaagaattatggaaaaaattagaggagctaaagctaaagaaagctctagaaaaacagaatagtgcttacaacatgcacagtattctcagcaatacaagtgccgaataaaaaaaaagcctcccacctctgccggataggcagagttttgtatgcttttttgaaatatgtaaaaattacaaaacaaacctcatcagtataatataattaaaaggccaattttttctggcaactgtaaatggaaacctttgtctaatcattggatttattgtgtcacttctgaagtttcacagaaatgaatgaattttatcatctatgatatgagtgagatattatgggagtggtaagattatgacttgattcttcttgatttgttgccatagatcggtagtctgctctgatattttccctttataa

SEQ ID NO: 26204 - DNA, 2019 bp, Homo sapiens
actttagatttcaagtatgttagcagcagtaattagggatgttttcctctaaggaaaattatagttataaaattattatttgttagaaatgattcctgctacttcaaattatttatccttaaatgtagaggattaacaatgaacaacttgaaataacttggttatcacctcagaagtttagtttatcactgatttaatgaagaagggcaagaagaggaaggctttatgataatgagtggtctgtgaattcctgcacaacaccatgtggttttaattactaaatgtgatgccacttcaaatgaacaacaagagcttttctgtcagaagttgcagcagtgttgtatactgtttgatttcatggactctgtttcagacttgaagagcaaagaaattaaaagagcaacactgaatgaactggttgagtatgtttcaactaatcgtggtgtaattgttgaatcagcgtattctgatatagtaaaaatgatcagtgctaacatcttccgtacacttcctccaagtgataatccagattttgatccagaagaggatgaacccacgcttgaggcctcttggcctcacatacagccctgacaactaccaatctgctttctgtctctggatttgcctattttggatacttcatataagtgaaattatttggtatatgaattcttcttgagatttttggagagccctgatttccagcctagcattgcaaaacgatacattgatcagaaattcgtacaacagctcctggagctttttgatagtgaagatcccagagaacgtgacttcctgaagactgttctgcaccgaatttatgggaaatttcttggattaagagcattcatcagaaaacaaattaacaacattttcctcaggtttatatatgaaacagaacatttcaatggtgttgctgaacttcttgaaatattaggaagtattatcaatggctttgcattgccactgaaagcagaacataaacaatttctaatgaaggttcttattcctatgcatactgcaaaaggattagctttgtttcatgctcagctagcatattgtgttgtacagttcctggagaaagatacaacactaacagagccagtaagtgttctatttattttcatgtttttggtctgcattaatagcatttcattgtagctttcgttttatagcctttatagttattaagtagaataatgtacgttaagctaaaatcatttagaagaagaaatgtgagattaatctacattaaaagaaggggttaggaggggagagttctcgtgagttatgtcttgaataaccgaaatatagactactattaatatgtagtagttaagatgtacgatgataggatcagatgaccacagtgaaattttatatgcatactgtcttcaccaataatcttttaaatcttcattcaccttttggaattaaagcatacttcgagggtcccaaaactactactcccttgaattttgttttgtttttaataatagaatttttgccactcattaacaataaaccacttgatagggatagaaaacatttccttgcttttggtgattaagatataagatgtaatcttggaataaaagtagtttatgaaccagcaaggcaacttaggctttgaattctactgttatttgcctctagaatgaaaattcaggagagagtgaaaacataattagttatgaaaatttactgaggattcaagaaaaacaaaagatgaagtagggtgaaacagaaaagtataaaagcatagaaaacattttaaccttggtgaagtaagtattttgagagaatgctttctaggcatgttcagtctaaatatttacctagtattaggttggtacaaaagtgattgcggcttttgccattacttttaatggcaaaaaccacaatcactttagcagcaacctaataaatatttagtaaatagcaaagggtttgaaaaactaaaatatatatgtatttttactatattatgaaccttctcaggctatccgtagggatgct

SEQ ID NO: 26205 - DNA, 355 bp, Homo sapiens
taatttctgattacaaaaattttggtttatctacagagagaaaaagaaggaattggaacgtgaagaattatggaaaaaattagaggagctaaagctaaagaaagctctagaaaaacagaatagtgcttacaacatgcacagtattctcagcaatacaagtgccgaataaaaaaaaagcctcccacctctgccggataggcagagttttgtatgcttttttgaaatatgtaaaaattacaaaacaaacctcatcagtataatataattaaaaggccaattttttctggcaactgtaaatggaaaaatatatggactaaacgtagccctgtgctgtatcatggccatagtatattgt

SEQ ID NO: 26206 - DNA, 510 bp, Homo sapiens
gaagaattatggaaaaaattagaggagctaaagctaaagaaagctctagaaaaacagaatagtgcttacaacatgcacagtattctcagcaatacaagtgccgaataaaaaaaaagcctcccacctctgccggataggcagagttttgtatgcttttttgaaatatgtaaaaattacaaaacaaacctcatcagtataatataattaaaaggccaattttttctggcaactgtaaatggaaaaatatatggactaaacgtagccctgtgctgtatcatggccatagtatattgtaacctttgtctaatcattggatttattgtgtcacttctgaagtttcacagaaatgaatgaattttatcatctatgatatgagtgagataattatgggagtggtaagaattatgacttgaattcttctttgattgtgttgcacatagatatggtagtctgctctgtatatttttcccttttataatgtgcttttcacactgctgcaaaccttagtta

SEQ ID NO: 26207 - DNA, 238 bp, Homo sapiens
ttcattgcctgatattcaatgtcttcacaaccattgttttatatattttgttttaggctcaagggaatcttatcctttatactctgtcttggacaaaagccccatttgggggaaaaatgtgtgtgtgcatgtacaggcgttggaggggagtctaaaatataaaccaaactgttaactctggtgagtaagattacaggagacttccattttcttttgtttttttttgttttttttgaga

SEQ ID NO: 26208 - DNA, 121 bp, Homo sapiens
tctttcctgatgaaatcagacacaaaatctccatttcataaagcgaatagcaggacactgctctggtggaaccgggacagatagccgggactcctgcccacctggctcccccacctttctg

SEQ ID NO: 26209 - DNA, 443 bp, Homo sapiens
tacaggcaagtaaagaaataagggagaaagtgaaaaaggaggaaaaataggggtatgactaaagctagcaaggaaaatagctgccatacatacttaagaaaggagggctggttgctttattttggctgaaggccaagttgatttatccagactgctgatagacttttattttatatttcacttattaaatattaagtttaggtttttctaccctaccttcccagggatttgatggataaagtactaactggtattgtgacttgtatgttacaataaacaatctgtcaatttcaatttttttaataatcgagagagttttgaacatcacatgaagttttttggcaagtcagatataaaatacacgaaaagacaaaaaatgtggcagctatgctattcacctttcacattttgcctatctttttatctgaagtttatagaaaagg

SEQ ID NO: 26210 - DNA, 316 bp, Homo sapiens
gtccaaggaaacatatattctagatttagactcataggctgcccaatctaaaattttgatgataacttctattagatacacacttattttaatcctcctgttgtgatttggaaatgtattttgttaatatttcagaattatttatttgtaaaatgagtatactttttagaatgtattattttgaatcatagccattatttgatacagagatttttttctattgcttctattaacataaccatctaacacttttgaattccacaagcatcattttaagactagcttcagtaatataatttgataaatcttaagacca

SEQ ID NO: 26211 - DNA, 183 bp, Homo sapiens
agtaagcactaggccagtgagtccaatgcctgctacagcttactctctccactgctcggtctgggtatgaatttacagactacactgggtgcataaaaacagagcagaaacctgggtgattcttttactcccagagagagatgcccaactctgttttggaacaggcaatgtggtggattttca

SEQ ID NO: 26212 - DNA, 419 bp, Homo sapiens
atcagccaccatgtacataaataataatgaaaaagaatatatttgcggtaacaacatcaacaacaaaaaaattctgagcatcactgttttttttcttttcttttctttttgagacagttttgctctcgttgcccaggctggagtgcagtagcaccatcacggctcactgcaacctctgcctctcgggttcaaacgattctcctcctgcgacctcccaaagtgttgggattacaggcgtgagccaccgtgcctggccaagcattacttttttaagatatgtgcaaaatgttgaaacaactcaatacccaaaaagataaaattgcattcatttctcacactccaggacaaattccaaagaaattaaagttataataaatgtaaaatatgaaaccaagtactacaggaaaacatgggtgaat

SEQ ID NO: 26213 - DNA, 420 bp, Homo sapiens
caaatgaaatcttataggaaatcatagagaaatgaaacataaaacaagaatgattgggctgaaagaatagcccccagttacttactttgctcccattcccttacctttccttggggctttgagcaacatttaaggctccagggaaaaaaaatcgagccacttacctatgccaatttcccaaaacatgagaaagtaaagccttttgaaattgacttgttagaagtctcatggcagattggtttagtggcagacagaactcaaatccagagcttttgtttccaaatctattcatttttctgctttgccatgatgtctaataggattgtcactaacaaatattaaactatccagttgtaagagttttgaaatgttttaagaatagtcttaggttgatgttcagccaacagctagaaacttggg

SEQ ID NO: 26214 - DNA, 458 bp, Homo sapiens
tcatggaacatctaaagggttgcatctgagagcatctctatatagagtttaagtcagcatgaagtcattggatcctttaggaaattggtctactgagaaatgtagagtttatttattcctaagattcctattgaggtatatctcagttcattttatgctgctataacaaaatacttgagactgggtaatttataaagaacagaaatttatttcctcacagttctggaggctggaatctaagatcaaggcactggcagttctgttgtcaggtggaggctgcttccagggtggcgcctcatggctgcaccctccagaggagagaaacactgcatcctcacatggtggaagactaagggaaagccagctgaaagctgcctgaaacctcttttataacagctttgtattattctgttctcacactgctgataaagacatacctgagactgggtagtttattt

SEQ ID NO: 26215 - DNA, 598 bp, Homo sapiens
cggcacgagggcggggtgaggaaaacagcaagaaatctgaaatactgagatagttgagaaacaggctctctctctctctcctgggtttttctccacccccagcacatgaaagaattgtaaggaaatttagatgattgataataaactataaaatataaaatctggattatcattatatattttatggtgatgggtagatttccatactcgccacaattactagcctttcctaaattagggacattttctgggaatgttcttctaataaaaactaagtcattatcattatacttagattttataacccaagaattcccaaagtcatattacccagtctactacgctttccccaatgaatccatccttgaagtctaatttcctaaatacacttgttgtccacaaggtggccctagaagcaatagaatacagttcacctccagagcagcccgaccgctaaaaggactcaatcctttttgttttcccatttatgagcaattaacggagtgagaacagaaaaaaaaagagcacaattaaacattgtactaataaactgataacgcgtcttcagtgttgtttttaccaaacagagcagaactat

SEQ ID NO: 26216 - DNA, 664 bp, Homo sapiens
ggtctcgagctcctgatctcaggtgatccgcccgcctccgtctcccaaagtgctggaattataggtgtgagccaccgcacccggctagttttgagtgtttgttactttttattgttgttacctttgttttaatgtttaatcgtaaacttatataatttaaaaaatgttttttattttttattttttagtagagacagggtttcaccatgttgtccaggctggtctcaaactcctgacctcaaatgatacactcccctcagcctcccaaagtgctgggattataggtgtgagccactgagcctggccttaacttttaataatagttgtctttaacaactggctcaaaaaattcctgaaaatttaataatgtacttgcctctaacataccacatctgaggctcccccagggcaggccctgtctttcctcatcagagtgatttgggctgtgccatcaggctgggaccttctcacttgccaagagggggaggataatgtctgccccttgaccccagggcctttcccaggcttggaggtggcacagtgcccaacagctgctctgagaggcagactgtgttgaacaatcagaaaacaggcagcgtgcatgagccagggtcagtgatgggttcacccaacctgcagttaggggcagcagctgctcctgaga

SEQ ID NO: 26217 - DNA, 434 bp, Homo sapiens
aagcaccactcaaaaaacaaagcaagttaccattatataaaacatttaaaggttggtggcccaaaacttatctcaggttgttctgtcattaattgcaatgctggactggcatgctaactagtaatagtgccttcttctctgcaaataaatgatgtctttgaaaatatattcttccagaaaatcactaaagacagatcatttcagagattagaaaagaagcagtaccatgatgcaaaaaaaaaaaaaaaaaaaagtgaataggaagcaacttttgggtctaaaatgtcacaatgaaagatttatctttctatgtttctaaatcggaaaactaagccttttgttcactaaggagcaagtaaaactgtgagaggccccagtgctgaggagagtggctggtacatggtggaaagtcaataaattattctgcagtgaag

SEQ ID NO: 26218 - DNA, 184 bp, Homo sapiens
tatttcgagtgacttggatccagtagggcgggtgtgggcaggttttgtatgtattcacatgttagcataaagattctaaagcatgagggctttccattgaaaaaggagccccgagaagctcactggaagtgagttgcaatagaacgttgtttcctggttccttgctcctttctccatctgtccc

SEQ ID NO: 26219 - DNA, 441 bp, Homo sapiens
aaaaagcaaaaaattgaattagatcttttttggcagggtggtaggtgggaaagacattaattattactcatcccattctgcatcaactgtatcttatcaggtttaagatgctattgattgtaagatggatctctatttcagtgatgttgaagtataaaaagtggttgaaatacggtaaatatagattctcggtgtcccaggacctttagagaacattgttttctgtagagtaatagcacatgctgggttcatgttagcccctttcaactttatgtatcattaattaagtgttgatgttctagatatttaatggacactaacatcaagatgaccttgtggtatgtgtccagagcattctagtgaagcctagtgatttagcttcagattatgagaatttaacagtctaatgtagggttagaaaatattcatgaaactggaata

SEQ ID NO: 26220 - DNA, 499 bp, Homo sapiens
actccagcctgggtaacagagccgagaccctgtctctaaaaacaaaacaaaaaagtaatatttaatggatgagaaaagagtaaatgactaaggtgatatgtaagcattaaactctgtctaaaaggtatctacttggtttctttatcttgaataaaccaaatgtcagaataatattttgggctactttatagaacaaaaaggtcaacaacgtgaaagtaattaaactaatatcggaaggcatcaccagcatgtttgttttaaacaagtgtggtttactgctctccaaatgctatttacctaaaatgaataacacatatgagaacagtggaacagaaacagcagcacacaagttgaagacagcgttatattctttctaagaatggaaatgagtgggaggctgaggtaggagaatcgcttgaacctgggaggcggaggttgctgtgagccaagatcgcgccattgcactccagcctgggcaacaagactgaaactccgtctc

SEQ ID NO: 26221 - DNA, 629 bp, Homo sapiens
gaggcggaggttgcagtgagctgagctcatgctactgcattccagcctgggtgacacagcgagactccatctcaaaaaaaaaaaaaaaaaaaaaaaagatcctgaagcatttcttcaaataactgtaacgggaacaggagatgaaacagggcttttaccagtgcgatcctgaagacaaagcacaattaaagcaatggctaccaagaggtgaaagtcagagcaaaagtggaccagtcaagagtgaagatcagctgggggcagtggctcatgcctgtaatcccagcactctgggaggccaaggtgggtggatcgcttgagctcgggggttcgagaccagcctgggcaacatggcgaaatcccatctctacaaagaatacaaaaattagccaggcatggtggcatgtgcctgtagtcccagctactcgggaggctgaggtgggaggatcacttgagcctgggaagtcaaggctacagtgaaccatgttcgtgccactgcactccagcctgggtgacaaagtgagacattgtctcaaaaaataaaaataaaagagcagtcaggtgcggtggctcatgcctgtaatcccagcactttgggaggccgaggcgggcggatcatctgaggtcaggag

SEQ ID NO: 26222 - DNA, 338 bp, Homo sapiens
aaagattgagatgtgtcctcctgagctttaggctttagaaatttttaatgagattttattttaactaacaagagccttaaaagtttagaaatgaaacttaaaattttacagtagagttattctattttagcccctgattttgctttttgatagaactttataaaatgcattaaatattaaatgaaaaaatgtctaaatgctatccaagtttcaaattcttaaagtttgatgttgtttgactccctcttaaggaaatgtttggtctcctataaagaagccaggctccaacctttaactcagattgatctgctatcagtctatcagaagtatcctataat

SEQ ID NO: 26223 - DNA, 514 bp, Homo sapiens
tcacccaggctggagtgcagtggtgcgatctcacctcacttcagcctctgcctcccaggttcaagtgattctcctgtctcagcctcctgagtagctgaggcaggagaattgcttgaacctgtcggggggaggcttcagtgagccaagatcatgccacttcactcggcaaaatagcgagattctgtctcaaaaaaaaaacaaaaaagaaagacacttttatttcctacagagcagtggcttcagttcccacagggcaagagaccctatttgttttgttttattttaagttccaggatacatgtgcaggatgtgcagatttgttacacaggtaaacatgtgccatggtggtttgctgcaccaagcgaccctatttgtatttgttgattgtaagccagatgttataaagcaggagacagccctatatttcatttcccttcgttagaaggcctatagccacactgtttattatggtagcctctagcagcatgtgctacctaagcacttgaaatgtagc

SEQ ID NO: 26224 - DNA, 365 bp, Homo sapiens
tcacccaggctggagtgcagtggtgcgatctcacctcacttcagcctctgcctcccaggttcaagtgattctcctgtctcagcctcctgagtagctgggattacaggcgtgccaccacgcccagctatttttgtaatttcattaaagacagggtttccccatgttggtgaggctggtcttgaactcctggcctcaagtgatccacctgcttcagcctcccaaagtgcagggattacaggcatgagccactgtgcctggcctcagctatcttgaatgctggagaattaaatccttttctgtctagggtgtcagctccctaagggctgggccaaaacagttggatttataagacactagagtcttgc

SEQ ID NO: 26225 - DNA, 390 bp, Homo sapiens
acaaggatgtatttatatattctgagttaaaaaaaatgcttttaaagaaggtgtgagcaaagataaaaattatttcttacagctaaagaaaagtagtctcttcatctttatccatgagggaataactcattgacacttataaaagagcgtcctagcccaagatatcatgtggtgggaaatttgattggaagaatctcttccactaacttgtgcatgagaatatttgttccagctccaaagccttagaagctgttagagaaaggtgggagggtatttggctggccttgggaaatggtaacctaacactggaagccccttgcttttgttctccttattgtacataagaagatgagattttatttccagatttcaaaacacggaccaacttgc

SEQ ID NO: 26226 - DNA, 408 bp, Homo sapiens
ttttcagaatttgtggggcttagaaatagatactgagcttgctttgcctttttaaaaaagaagttaaaagtttaaatttaaaagtagctctggaattctggtgcttaataattacagatgctttgatatagctagcatcatcctgtggacacctagggcagggaaagaggaacttgattcacttcataaggtaccggtgaagagcctgtgcatctggcactgctgcggggggctggtggccggagtggaatattgttgctgtgttcctactttgaaaacaagtaagcagggtttgccagttcccaccctcattctgcacccccatctcacatgcacagtttttatcaccctccttgtccaataaagtttacacggatactaaaatgagaagaatccgcactttttggt

SEQ ID NO: 26227 - DNA, 390 bp, Homo sapiens
cctagcccagctgttctctctgctacttctgggccacttgggggcacatgaaaataccccacagctcctgcaccttgtggggtgggcactctctgccattctcttggatccaacagccaaccaggcaggggctgcgaacgcacatgtctgaaggggcgaggcgaggacataatgggtgaacgggcccgttgggggtggcagtgaactggcaggaaggtaccatgtaaagggacggccactccccaggtctggctaattgttatgtgaaggaagcaaggccctttgaaacttaattctttgcttttgcaagaaaccaggggttattctatgaagtctcctgatttttaagtattgctaaaagtccgttttaaaagcaccatgtgggccaaa

SEQ ID NO: 26228 - DNA, 529 bp, Homo sapiens
atttcttcagctgaccctcaatacctgtgatgggtgctggcaggaggcactcagacctctctccttagaaatgccctactattcacagtggcactgggaggggctggaagagctgtttagggggccctcgggcccagcccctgtgtttagggggccctcgcgcccagcccctgtgtttagtgggccctcgggctcatttcctgtatttagcaggcactcaggctcagcccctgggtttagtgggccctcgggctcagggcctgtgctgacactgaaagggagtgagtgtgctttccaaaagttagtgagtgagaatatccttgccaaggccctaagtgacaggcactattgttctgcaccacagatggtacatcaggagctgtttgtgcaggtcgcagagcggcagggctgcattaccttcacgccagcttttgtttttgtcagctggatcgcattgcgctccctccagagaccatgtgttatggagggaaggaaaagtgcaaggttttaataagtcccttgcaaagag

SEQ ID NO: 26229 - DNA, 972 bp, Homo sapiens
  misc_feature (291)..(291): n is a, c, g, or t
atgatgggacaaaatcaaaccagcatctcagacttcctgctcctgggcctgcccatccaaccagagcagcaaaacctgtgctatgccctgttcttggccatgtatcttaccaccctcctggggaacctcctcatcattgtcctcattcgactggactcccatctccacacgcctgtgtatttgtttctcagcaacttgtccttctctgacctctgcttttcctcagtcacaatgcccaaattgctgcagaacatgcagaaccaagacccatccatcccctatgcagactgnctgacccaaatgtacttcttcttgtatttttcggatctagagagcttcctccttgtggccatggcctatgaccgctatgtggccatctgcttccccatgcactacaccgccatctgcttcctcctgcactacaccgccatcatgagccccatgctctgtctctccgtggtggcgctgtcctgggtgctgaccaccttccatgccatgttacacactttactcatggccaggttgtgtttttgtgcagacaatgtgatcccccactttttctgtgatatgtctgctctgctgaagctggcctgctctgacactcgagttaatgaatgggtgatatttatcatgggagggctcattcttgtcatcccattcctactcatccttgggtcctatgcaagaattgtctcctccatcctcaaggtcccttcttctaagggtatctgcaaggccttctctacttgtggctcccacctctctgtggtgtcactgttctatgggaccgttattggtctctacttatgcccatcagctaatagttctactctaaaggacactgtcatggctatgatgtacactgtggtgacccctatgctgacccccttcatctacagcctgaggaacagagacatgaagggagccctggaaagggtcatttgtaaaaggaaaaatcccttccttctatga

SEQ ID NO: 26230 - DNA, 491 bp, Homo sapiens
  misc_feature (304)..(304): n is a, c, g, or t
aattgttaaggtccatccgcgttgttgcatctcattatagtttattcaggtttggagaattgaggtagaatttacaagcaatgaagtgcaggatttccgtgtgaaaattgtgtacaacatggataatgtgtgttttgaacagctcacacgcctgtgtaactcacaccccagtcaaggtgcagagacttctgtccctcggaacggcctgcatgctcccggctccggtccccacggcagccactgccctgacttggagccccagggcttctgttgccagctcttgaatttcatgcgtacgtgaaanccgacgctgtgccctcgtgtttctctttccactcagccggatggtcatgcgttacagcttgtgtattggtggctgtgtattggtggctccttactgtttgctcatccttctgtgactgcaccgagattgtttcgatgctgtagtttccagttcgggttactagaataaagacgtccattaacattct

SEQ ID NO: 26231 - DNA, 494 bp, Homo sapiens
attctcccacttcagcctccagagtagctggggttacaggcactcgtcaccatgcccagctaatttttttgtatttttagtagagatggggtttcaccatgttggccaggctggtctcgaactcctgacctgaagcgatctgcccaccttggcctcccaaagtgctggaattacaggcgtgagccaccgtgcccagcccaaaagagatagtcttataagtaaagtgcgtcaaaagacattagaagagtcacctaggttgtctaatttacctacaaaacctggtcacactaggaaaacgataaaccatgaacacatagttgtgagcacccagaataattctttaagtctacctaattatatctacatttctattaacacatagtttttttcttttatccccctctttaagagtaagataactcttcagctgtaatgagaccaaatgctagtgaacttatccatggtggcaaaagcttttagccatttttgcctgt

SEQ ID NO: 26232 - DNA, 167 bp, Homo sapiens
cagcctcttaagtagctggggctacaggtatgagccactgtgctaggcaacaataaagtattttttaaattaagttatatatattgttttttaagacataatgctactgtgcacttaatagactacagtataatataaacataacttgtatgcgctaggaaataaaa

SEQ ID NO: 26233 - DNA, 2712 bp, Homo sapiens
  misc_feature (1176)..(1176): n is a, c, g, or t
  misc_feature (1284)..(1284): n is a, c, g, or t
ggaacagcgcagggaggtgggtagccgggctcccaggcacgtgggtctctgcggctgcggcgggacccgggcactggcacccgggagcggcggcgacggcaccccgagaggagaagcgcagcgcagtggcgagaggagccccttgtggcagcagcactacctgcccagaaaaatgctggaggctgggcgtggccccaggcctggggacctgtttttcctgtttcccgcagagttccctgcagcccggtccaggtccaggcgtgtgcattcatgagtgaggaacccgtgcaggcgctgagcatcctgacctggagagcaggggctggtcaggttccagagcttggaggttccaggtccagatccaagtcagatggcaatgaaagccctggtcaggtggctgtgtcaggtcccctaggggcgctccggccacaaccctgatggccccacccctcccttccctgcagggcgatggcagcagacctgggcccctggaatgacaccatcaatggcacctgggatggggatgagctgggctacaggtgccgcttcaacgaggacttcaagtacgtgctgctgcctgtgtcctacggcgtggtgtgcgtgcttgggctgtgtctgaacgccgtggcgctctacatcttcttgtgccgcctcaagacctggaatgcgtccaccacatatatgttccacctggctgtgtctgatgcactgtatgcggcctccctgccgctgctggtctattactacgcccgcggcgaccactggcccttcagcacggtgctctgcaagctggtgcgcttcctcttctacaccaacctttactgcagcatcctcttcctcacctgcatcagcgtgcaccggtgtctgggcgtcttacgacctctgcgctccctgcgctggggccgggcccgctacgctcgccgggtggccggggccgtgtgggtgttggtgctggcctgccaggcccccgtgctctactttgtcaccaccagcgcgcgcgggggccgcgtaacctgccacgacacctcggcacccgagctcttcagccgcttcgtggcctacagctcagtcatgctgggcctgctcttcgcggtgccctttgccgtcatccttgtctgttacgtgctcatggctcggcgactgctaaagccagcctacgggacctcgggcggcctncctagggccaagcgcaagtccgtgcgcaccatcgccgtggtgctggctgtcttcgccctctgcttcctgccattccacgtcacccgcaccctctactactccttccgntcgctggacctcagctgccacaccctcaacgccatcaacatggcctacaaggttacccggccgctggccagtgctaacagttgccttgaccccgtgctctacttcctggctgggcagaggctcgtacgctttgcccgagatgccaagccacccactggccccagccctgccaccccggctcgccgcaggctgggcctgcgcagatccgacagaactgacatgcagaggatagaagatgtgttgggcagcagtgaggactctaggcggacagagtccacgccggctggtagcgagaacactaaggacattcggctgtaggagcagaacacttcagcctgtgcaggtttatattgggaagctgtagaggaccaggacttgtgcagacgccacagtctccccagatatggaccatcagtgactcatgctggatgaccccatgctccgtcatttgacaggggctcaggatattcactctgtggtccagagtcaactgttcccataacccctagtcatcgtttgtgtgtataagttgggggaattaagtttcaagaaaggcaagagctcaaggtcaatgacacccctggcctgactcccatgcaagtagctggctgtactgccaaggtacctaggttggagtccagcctaatcaagtcaaatggagaaacaggcccagagaggaaggtggcttaccaagatcacataccagagtctggagctgagctacctggggtgggggccaagtcacaggttggccagaaaaccctggtaagtaatgagggctgagtttgcacagtggtctggaatggactgggtgccacggtggacttagctctgaggagtacccccagcccaagagatgaacatctggggactaatatcatagacccatctggaggctcccatgggctaggagccagtgtgaggctgtaacttatactaaaggttgtgttgcctgctgaactgtgccctattgtgtggtcgggggatgaggatatggcagggaagctttcaccagccacacaagggtcctttctccaatccgttcccttctgccacctgccttctcactagctgtctcaggagtagtctcatatcagggatcctctctccaggccccaggtcatcccccactgtaaagccagttggcttctgtgcctgactctgtgctgagcacagagaaaagtcaggtgcagtcccagtccttgagatttcccagtttaggtgatggccagtcatgtgctggtaaatgttaagccatttaactggagctccgatttaactgggaaccccttctttgtagaactgcccatttccatggtgcaaaaactcttatggccaaattcaaactataaacatgatgtcaacttccttgtaaaattcctgaaaatttaacaattggttcttgcaagcaggtacaagtcactctag

SEQ ID NO: 26234 - DNA, 2578 bp, Homo sapiens
  misc_feature (1042)..(1042): n is a, c, g, or t
  misc_feature (1150)..(1150): n is a, c, g, or t
ggaacagcgcagggaggtgggtagccgggctcccaggcacgtgggtctctgcggctgcggcgggacccgggcactggcacccgggagcggcggcgacggcaccccgagaggagaagcgcagcgcagtggcgagaggagccccttgtggcagcagcactacctgcccagaaaaatgctggaggctgggcgtggccccaggcctggggacctgtttttcctgtttcccgcagagttccctgcagcccggtccaggtccaggcgtgtgcattcatgagtgaggaacccgtgcaggcgctgagcatcctgacctggagagcaggggctggtcagggcgatggcagcagacctgggcccctggaatgacaccatcaatggcacctgggatggggatgagctgggctacaggtgccgcttcaacgaggacttcaagtacgtgctgctgcctgtgtcctacggcgtggtgtgcgtgcttgggctgtgtctgaacgccgtggcgctctacatcttcttgtgccgcctcaagacctggaatgcgtccaccacatatatgttccacctggctgtgtctgatgcactgtatgcggcctccctgccgctgctggtctattactacgcccgcggcgaccactggcccttcagcacggtgctctgcaagctggtgcgcttcctcttctacaccaacctttactgcagcatcctcttcctcacctgcatcagcgtgcaccggtgtctgggcgtcttacgacctctgcgctccctgcgctggggccgggcccgctacgctcgccgggtggccggggccgtgtgggtgttggtgctggcctgccaggcccccgtgctctactttgtcaccaccagcgcgcgcgggggccgcgtaacctgccacgacacctcggcacccgagctcttcagccgcttcgtggcctacagctcagtcatgctgggcctgctcttcgcggtgccctttgccgtcatccttgtctgttacgtgctcatggctcggcgactgctaaagccagcctacgggacctcgggcggcctncctagggccaagcgcaagtccgtgcgcaccatcgccgtggtgctggctgtcttcgccctctgcttcctgccattccacgtcacccgcaccctctactactccttccgntcgctggacctcagctgccacaccctcaacgccatcaacatggcctacaaggttacccggccgctggccagtgctaacagttgccttgaccccgtgctctacttcctggctgggcagaggctcgtacgctttgcccgagatgccaagccacccactggccccagccctgccaccccggctcgccgcaggctgggcctgcgcagatccgacagaactgacatgcagaggatagaagatgtgttgggcagcagtgaggactctaggcggacagagtccacgccggctggtagcgagaacactaaggacattcggctgtaggagcagaacacttcagcctgtgcaggtttatattgggaagctgtagaggaccaggacttgtgcagacgccacagtctccccagatatggaccatcagtgactcatgctggatgaccccatgctccgtcatttgacaggggctcaggatattcactctgtggtccagagtcaactgttcccataacccctagtcatcgtttgtgtgtataagttgggggaattaagtttcaagaaaggcaagagctcaaggtcaatgacacccctggcctgactcccatgcaagtagctggctgtactgccaaggtacctaggttggagtccagcctaatcaagtcaaatggagaaacaggcccagagaggaaggtggcttaccaagatcacataccagagtctggagctgagctacctggggtgggggccaagtcacaggttggccagaaaaccctggtaagtaatgagggctgagtttgcacagtggtctggaatggactgggtgccacggtggacttagctctgaggagtacccccagcccaagagatgaacatctggggactaatatcatagacccatctggaggctcccatgggctaggagccagtgtgaggctgtaacttatactaaaggttgtgttgcctgctgaactgtgccctattgtgtggtcgggggatgaggatatggcagggaagctttcaccagccacacaagggtcctttctccaatccgttcccttctgccacctgccttctcactagctgtctcaggagtagtctcatatcagggatcctctctccaggccccaggtcatcccccactgtaaagccagttggcttctgtgcctgactctgtgctgagcacagagaaaagtcaggtgcagtcccagtccttgagatttcccagtttaggtgatggccagtcatgtgctggtaaatgttaagccatttaactggagctccgatttaactgggaaccccttctttgtagaactgcccatttccatggtgcaaaaactcttatggccaaattcaaactataaacatgatgtcaacttccttgtaaaattcctgaaaatttaacaattggttcttgcaagcaggtacaagtcactctag

SEQ ID NO: 26235 - DNA, 2548 bp, Homo sapiens
  misc_feature (1042)..(1042): n is a, c, g, or t
  misc_feature (1150)..(1150): n is a, c, g, or t
ggaacagcgcagggaggtgggtagccgggctcccaggcacgtgggtctctgcggctgcggcgggacccgggcactggcacccgggagcggcggcgacggcaccccgagaggagaagcgcagcgcagtggcgagaggagccccttgtggcagcagcactacctgcccagaaaaatgctggaggctgggcgtggccccaggcctggggacctgtttttcctgtttcccgcagagttccctgcagcccggtccaggtccaggcgtgtgcattcatgagtgaggaacccgtgcaggcgctgagcatcctgacctggagagcaggggctggtcagggcgatggcagcagacctgggcccctggaatgacaccatcaatggcacctgggatggggatgagctgggctacaggtgccgcttcaacgaggacttcaagtacgtgctgctgcctgtgtcctacggcgtggtgtgcgtgcttgggctgtgtctgaacgccgtggcgctctacatcttcttgtgccgcctcaagacctggaatgcgtccaccacatatatgttccacctggctgtgtctgatgcactgtatgcggcctccctgccgctgctggtctattactacgcccgcggcgaccactggcccttcagcacggtgctctgcaagctggtgcgcttcctcttctacaccaacctttactgcagcatcctcttcctcacctgcatcagcgtgcaccggtgtctgggcgtcttacgacctctgcgctccctgcgctggggccgggcccgctacgctcgccgggtggccggggccgtgtgggtgttggtgctggcctgccaggcccccgtgctctactttgtcaccaccagcgcgcgcgggggccgcgtaacctgccacgacacctcggcacccgagctcttcagccgcttcgtggcctacagctcagtcatgctgggcctgctcttcgcggtgccctttgccgtcatccttgtctgttacgtgctcatggctcggcgactgctaaagccagcctacgggacctcgggcggcctncctagggccaagcgcaagtccgtgcgcaccatcgccgtggtgctggctgtcttcgccctctgcttcctgccattccacgtcacccgcaccctctactactccttccgntcgctggacctcagctgccacaccctcaacgccatcaacatggcctacaaggttacccggccgctggccagtgctaacagttgccttgaccccgtgctctacttcctggctgggcagaggctcgtacgctttgcccgagatgccaagccacccactggccccagccctgccaccccggctcgccgcaggctgggcctgcgcagatccgacagaactgacatgcagaggatagaagatgtgttgggcagcagtgaggactctaggcggacagagtccacgccggctggtagcgagaacactaaggacattcggctgtaggagcagaacacttcagcctgtgcaggtttatattgggaagctgtagaggaccaggacttgtgcagacgccacagtctccccagatatggaccatcagtgactcatgctggatgaccccatgctccgtcatttgacaggggctcaggatattcactctgtggtccagagtcaactgttcccataacccctagtcatcgtttgtgtgtataagttgggggaattaagtttcaagaaaggcaagagctcaaggtcaatgacacccctggcctgactcccatgcaagtagctggctgtactgccaaggtacctaggttggagtccagcctaatcaagtcaaatggagaaacaggcccagagaggaaggtggcttaccaagatcacataccagagtctggagctgagctacctggggtgggggccaagtcacaggttggccagaaaaccctggtaagtaatgagggctgagtttgcacagtggtctggaatggactgggtgccacggtggacttagctctgaggagtacccccagcccaagagatgaacatctggggactaatatcatagacccatctggaggctcccatgggctaggagccagtgtgaggctgtaacttatactaaaggttgtgttgcctgctgaactgtgccctattgtgtggtcgggggatgaggatatggcagggaagctttcaccagccacacaagggtcctttctccaatccgttcccttctgccacctgccttctcactagctgtctcaggagtagtctcatatcagggatcctctctccaggccccaggtcatcccccactgtaaagccagttggcttctgtgcctgactctgtgctgagcacagagaaaagtcaggtgcagtcccagtccttgagatttcccagtttaggtgatggccagtcatgtgctggtaaatgttaagccatttaactggagctccgatttaactgggaaccccttctttgtagaactgcccatttccatggtgcaaaaactcttatggccaaattcaaactataaacatgatgtcaactggctttacagtgggggatgacctggggcctgg

SEQ ID NO: 26236 - DNA, 2643 bp, Homo sapiens
  misc_feature (1107)..(1107): n is a, c, g, or t
  misc_feature (1215)..(1215): n is a, c, g, or t
caaggcgctgggagaggcccggggaagcggcgggccagactggcgcaggtgcggactgggcgcggggcaggggagggcgctgtggagcggctgtcgccccggggcacagttgcgagccggcgtgtagcgcataactggacggcttgaacgcgcctgtgggtccgtggttgaactttgtctccacgggagcgtcggtctcggagccccttgtggcagcagcactacctgcccagaaaaatgctggaggctgggcgtggccccaggcctggggacctgtttttcctgtttcccgcagagttccctgcagcccggtccaggtccaggcgtgtgcattcatgagtgaggaacccgtgcaggcgctgagcatcctgacctggagagcaggggctggtcagggcgatggcagcagacctgggcccctggaatgacaccatcaatggcacctgggatggggatgagctgggctacaggtgccgcttcaacgaggacttcaagtacgtgctgctgcctgtgtcctacggcgtggtgtgcgtgcttgggctgtgtctgaacgccgtggcgctctacatcttcttgtgccgcctcaagacctggaatgcgtccaccacatatatgttccacctggctgtgtctgatgcactgtatgcggcctccctgccgctgctggtctattactacgcccgcggcgaccactggcccttcagcacggtgctctgcaagctggtgcgcttcctcttctacaccaacctttactgcagcatcctcttcctcacctgcatcagcgtgcaccggtgtctgggcgtcttacgacctctgcgctccctgcgctggggccgggcccgctacgctcgccgggtggccggggccgtgtgggtgttggtgctggcctgccaggcccccgtgctctactttgtcaccaccagcgcgcgcgggggccgcgtaacctgccacgacacctcggcacccgagctcttcagccgcttcgtggcctacagctcagtcatgctgggcctgctcttcgcggtgccctttgccgtcatccttgtctgttacgtgctcatggctcggcgactgctaaagccagcctacgggacctcgggcggcctncctagggccaagcgcaagtccgtgcgcaccatcgccgtggtgctggctgtcttcgccctctgcttcctgccattccacgtcacccgcaccctctactactccttccgntcgctggacctcagctgccacaccctcaacgccatcaacatggcctacaaggttacccggccgctggccagtgctaacagttgccttgaccccgtgctctacttcctggctgggcagaggctcgtacgctttgcccgagatgccaagccacccactggccccagccctgccaccccggctcgccgcaggctgggcctgcgcagatccgacagaactgacatgcagaggatagaagatgtgttgggcagcagtgaggactctaggcggacagagtccacgccggctggtagcgagaacactaaggacattcggctgtaggagcagaacacttcagcctgtgcaggtttatattgggaagctgtagaggaccaggacttgtgcagacgccacagtctccccagatatggaccatcagtgactcatgctggatgaccccatgctccgtcatttgacaggggctcaggatattcactctgtggtccagagtcaactgttcccataacccctagtcatcgtttgtgtgtataagttgggggaattaagtttcaagaaaggcaagagctcaaggtcaatgacacccctggcctgactcccatgcaagtagctggctgtactgccaaggtacctaggttggagtccagcctaatcaagtcaaatggagaaacaggcccagagaggaaggtggcttaccaagatcacataccagagtctggagctgagctacctggggtgggggccaagtcacaggttggccagaaaaccctggtaagtaatgagggctgagtttgcacagtggtctggaatggactgggtgccacggtggacttagctctgaggagtacccccagcccaagagatgaacatctggggactaatatcatagacccatctggaggctcccatgggctaggagccagtgtgaggctgtaacttatactaaaggttgtgttgcctgctgaactgtgccctattgtgtggtcgggggatgaggatatggcagggaagctttcaccagccacacaagggtcctttctccaatccgttcccttctgccacctgccttctcactagctgtctcaggagtagtctcatatcagggatcctctctccaggccccaggtcatcccccactgtaaagccagttggcttctgtgcctgactctgtgctgagcacagagaaaagtcaggtgcagtcccagtccttgagatttcccagtttaggtgatggccagtcatgtgctggtaaatgttaagccatttaactggagctccgatttaactgggaaccccttctttgtagaactgcccatttccatggtgcaaaaactcttatggccaaattcaaactataaacatgatgtcaacttccttgtaaaattcctgaaaatttaacaattggttcttgcaagcaggtacaagtcactctag

SEQ ID NO: 26237 - DNA, 494 bp, Homo sapiens
tacaaacaacaggaatataaaatgtgggacaccttctgtggcctggacatccctgctgcctcgagctccccgcagctgctgatgttcgctagcgcctctcgtcaccccagtaccacgctctgaccttctgttcctgctgcacctgttccccaccccagcatctttgcccgagggaaggcttcgtccaatcccgttcccgccctggatgaccacgccagctgtgggcctgcctggccgaacgcaggtctccatcagaggggcccgtctgcatgggggtgcctgcacacctgtcgtgtcgacatcactgaggaccccttgggggctcaggccagcttgagggcctctttgtctcctaaataactgggacagtatctggggcttagatgagcagtcagcatagcaataagtgaccggaaatacagagatgtgtggactaagactgttgaggttgactcggatgtgtgcaaaggccccaaagtgacctccctccacgg

SEQ ID NO: 26238 - DNA, 422 bp, Homo sapiens
agggagccatgagcctcgtgacataactgttgttaaaaaccctttttcagaatctcgttattatatgtgcttgccagaagcttacatattttagttcagtgaagtcatccacacagggctgtgtaccaccacacagttggtttggaacaccagtgctgaaggttgaaggcttttagggccggcagacctaagggaaaaatcgaaaccaaaagatgggattaacagtgaaaagctcagttgggttgagatcgaaccccctggaagctcagcttagattgacttaaaatcagttaacagggcctgtagtttatgtgtagccctgaggacttctagaaccacatacgtctttgactttgaaagtgcgtggcctctcttgcccccttcagttttggctgattcactttctagtaggtgctcttacc

SEQ ID NO: 26239 - DNA, 368 bp, Homo sapiens
atgaatgtcagaataatttctctttcacagtactttatacaaattatctccttttgtgcacaaaccctacaaggctgggacttgactttcctcatttcacagggggtcagactgaggcaccaagaggttgaggtggagcagggattccaacctgcatgggcttagccgtggcaccccagcacgtctgtgctctgtcctgttctcacacttaccctcctgggcttgtactccctgtgtctcagcttccacgggagttcctgttctctgggcagatgaggtctgcttgtctggagttggagaactgaatctgttttcagaaattgtatctgctaaagagttgttaagtgctttgttagcagcgaagaaga

SEQ ID NO: 26240 - DNA, 388 bp, Homo sapiens
acagaggggtcggaccctttccaagtacttcacatggattagctcgttgaatcttcacaggacctatgagatattataccaatttttcaggtgaagaaatagagacataagagacatcaagagtttaaataacttgcccaagatcacatggctagaaagtggcagagccaggatttgaattcaggaagtctggctgcaggcccacacccttagagaaactgtcagggctgggtgtggtagttcatgcctgtaatcctagcactttgagagactgaggttggcagatcacttgagctcaagagttctaaaccagcctgggcaacatggtgaaacctcatctctacaaaaattagctaggcgtggtggcatgtatctgtagtcccagcta

SEQ ID NO: 26241 - DNA, 385 bp, Homo sapiens
ttttttgagacacaatctcactctgttgcccaggctggagggcagtggcatgatcttggctcaatgcagtctcgacctcttcgggttcaggtgatcctcctgcctcagcctcctcacctcagtcttatgggtaactgagactataggtgcatgccaccacgcctagctaatttttgtatttcttgtagagacaggggttcaccatgttgtccaggttggtctggaactcctggactcaagcaatccacctgcctcggcttcccaaaatggtgagattacaggcatgagccaccgtacctggcaagcatcttttcatttacctgttggctatttgtgtgtcttctttggaaaagtgtctattaaggtcctttgccccacctccact

SEQ ID NO: 26242 - DNA, 558 bp, Homo sapiens
gactgttaagtgtgagccaccatgcccagctaatttttgtagtttttgtagagacagggttttaccatgttgtccaggctggttttgaactcctgggctcaagtgacctgtctgtcttggcctcccacagtgctgggattgcaggtgtgagccaccatgcctggcatagggggctgtatttcagtgaaattagaaaagttttgaggcatcgaatggataaatggatggatatatcaaattgtaaggtattaagtgggtgaatgtatggacatttgtagaatcccacagataatttatctttttgtgtaaaataaggcttttaaaactagactttctgaaccaatacagtttttttttttttgaggtgaactaggtttgcctagctttaagctagcaatatctgatagatacttgcatctaattttagggatttggtgccaaataagagaagggtagttgaagactagataaatttggatactatctaggagtctgtatttacttagcaggcttttgaaagccgttttgcttaggagttcaaattttaaggataatagg

SEQ ID NO: 26243 - DNA, 514 bp, Homo sapiens
ggtaaagatggtgtacatgcattttagagatttttgtggacattgaagaatttttaaatgtaaccctttgaccaggcagcttaagtggcacctattgtcaccccattgtgagtctgacgaagtatagctctttctttatttgaggtttctaggtattcagtttacttacccagatccatcctgcttgccaagtatgaaattattccttgtttcaaaggacagctaatgaagctctatgactttaaagggaaaaaagtattatacacacactaaaaatattattcatttttattttacatctttgcctctgtgaagctgctgttattgcaacttcttttttttttttcagatcagttgcaggattggacttggtagtttatgtaaaacaattaattggctgggcacagtggctcaagcctgtaatcccagcactttaggaggtcgaggtgagtggatcacctgaggtcaggagtttgagaccagtctggccaacatggtgaaacctcgtctgtac

SEQ ID NO: 26244 - DNA, 1100 bp, Homo sapiens
gtaaagggggctgctaattacgctggggcaggcggggcaaaccaggaccctgccaggcgagtctaggccatggccccacaccagaagatgagggctggagactcctggagaggaatctgagtggcgagaccacctgcattcattatgtgtcaactctgccaggtgacagtccccagtgagcccatcaaacatgaacctaggtgctgttgggaaggtctttggatgccattaacatctacaatcagttggttttcagtagaggagattatcctcaagaatgtgggcgggcctcatccagtgagctgaaaggccttgagagcagaactaggattttggaggaggatgaagtgttgcctccggaccgcagcgtcacctcttgcctgggaatttccagcttccttttcagacttcggacttgcctccaagctccctgaatcttttcatatatttatgtcctattgcagattgtgtttctctggctggactgtaactgatgaggaggactaaaattccaggcttggttgtatagcatataagtgaggtcatttgggtctggggagctgggggggggtccttcagctgcatgagtgtgacctgcaccaaggtgcctggctacctggggcgagggggctgccatctagcccacaccccactcctaggccgtgcaccctggcatgggtctatgtctggctcaaggaagggttccctcctccctccaatgtgcacagagaccttgagatcccatccacctaaccctgtgccctcagaagcctcctctgagagggggcaccttttcctaattctcacaaaggctagtggctaccttgtagatagccttggatgtgttaggacacttttctgaacatcagttccttatctgtaagatgggagttgtgtcctcaatgggtaattagagattattcatgggaaatcctatcacggtatctaccacggggagactcacaagtgctgatctttgctggtgttgctgcatttgttattgaatgcattcgttaggagtcttgttagtaagtgacaaaaatccaactcaaattggcttacactaaacaagtttcctgcatctgggagtataaagggtg

SEQ ID NO: 26245 - DNA, 421 bp, Homo sapiens
ttgggttctgagcagtgtagattctactgctaaggcttggactacaagccatcgatgcttacttgttcctggcattcataccatagggattcaaacacccaagctgagaatttaatttaggcatatcccaggctggttttgtgcccctgagcacccggtagaaacaaatacaagtcatctctggaaaagaagcttcattttacacctcaacaaattgccacagctaaaatatccccccaaaaatgcacaaggagcttcacaatctaaattaaacatcatgaaactagaagtatgactaatgaaaacaaaagcaacagacaatgggagctgggcgtggtggctaatgcctgtaatcccagcacttcgggaggctgaggctggaggattgcttgaggccaaaagtttgagatcctgtctctga

SEQ ID NO: 26246 - DNA, 506 bp, Homo sapiens
caaactcctgaccttgtgatccacccgccttggcctcccaaagtgttgggattacaggcgttgagccatggcgcctggcccacagctttttctagttgtgtttaggtgcttaggctcaggatatggggtttagtaaataagccttccatatgcatattgtcagacccaaatcagtccacagctatcttactggaagtggggtcacaaggcaatttctagaaagcaagttctgataaaggtaaattgattcactggaagatcttaagatatataaaatatctccaataccatgtgtttaattttagtgaataagaataatatagtttctttttaaagctagcacaaatcaagtaataaaacccagcaaagcacacacaaaaatataggctagccaggtgtggtggcacatgcctgtaatctcagctatatgggaggctaaggcaggaagattgctagagcccaagagttcaagaccagcctagtcaacatagcgagattccgtctca

SEQ ID NO: 26247 - DNA, 395 bp, Homo sapiens
aattctttttttaaaaaaagtattataatcaaacctaaaagaaaaatttaagaatagtgtcaatataatgagatatccaattaatgtttacattttcctgatttggtaatgtctggagatgtttgaacttgaaggaggtgtgttgatggcgtctagtgggtggaagccaaggatgttaaaaactatggtattcagaacagctttctgcaacaaataattacctggttgaaatgtcagtggtgctaatgttgagaaacattggtctgtaacctcaccactggttttagataccttagtattcttttaatttgctttttaaaattatgagtgaagtcaaacatcttttgggctttaaggatcatttacatatatatttctctgtactgcctctacat

SEQ ID NO: 26248 - DNA, 382 bp, Homo sapiens
ttttcctgcttccaccataacatgagcaggtcaaggggtcagactgtgtagaccagttccgagccatgcaggaaggcaggcaggaatatccagatctctatccccaagaaggggaggaagaggtagaggagaagccagcagaacatgtagaagaaacagctcccaatgaggctactgcaaccaaagaaaaggaagggtcaagttaatgaaggccacatggccctgggctccagtccttccacttcaaagtaatacaaatcttttgcaaaagaccttttagtcactctccaagagagcctctttccctctgttgtcctgtgcactgtaatatacaaaattgcttattttgatgatcagaggttttggcctcttgacatataca

SEQ ID NO: 26249 - DNA, 275 bp, Homo sapiens
gtcagggtttcatctgttgcccaggcttgagtgcagtagcacgatcacagctcgctgcagcctcagccttcctgggctcaggtgatcctcctacctcaggcccccgagtagttgggactacaggtgtgtgccaccatgcctggctaatttttgtatatttttgtagagacaaggttttgccatgttgcacaggttggaactgttttgaaggttgatatttttaatggtttaaaattttagatttgaaaatgaaaaatttattctctagtttatcc

SEQ ID NO: 26250 - DNA, 587 bp, Homo sapiens
ggttgatacttttgattgtcacaatgattggcttttgattgtcacaatgattgggagcgttattaccactcacatatagtaaatgaaggatgggatagtcctacacaaaaaattatctagctccaaatgtcctcagtgtctctgatgagaaacactgatctagtccatagtcagggctgccaggtatgggtgtgcaggttgcccactgtacaactcttaagggaaccattcacctggtggctaagtgtgtcaattctgaaaccatactgcctgagttccagtgccaactggaactgccccccaccccctacttctttttttttttttgagaccgagtctttctccaccacccaggctgcagtccagtggcacagtcacagctcactgcagactctacctcccgggctcaagtgattctcctacctcagcctcttgaatagctgggcgcctgtagtcgcagctactcgggaggatgaggcaggagaatggcatgaaaacccaggaggcggagcttgcagtgagccgagactgagccactgcactccagcttaggcgacagagccagactccacctcaaaaaaaaaaaa

SEQ ID NO: 26251 - DNA, 588 bp, Homo sapiens
agtttgtaaattacttgacaaatcctttgctttgccaattctacactaagaaaaggaagccagctgacatcggaaatgcagggggttaaatgctgccttcttcagtgtccagttcaatattagggcattaggaagaaaaattaagaattcttttttccttataaaatttcaaggtaaattgaaattttaccgtgcgtaaaaccctcactagcaatgcatgaaccagggtctcagatagcattggtgaagtgtaaagaggaaccccaagcagatgagcctaaagagaaatcagacaaggcttggtttgttttgggtcttgagtttcagctccacttctgtcctcaaggcccatttcctagcctggtgtggggtggttgcatgtgggcttgagagttcaactgcccaagtttgcagctctgccctgtctcttattagttgtgtattggtaccctattttgggcacattaactattctgcacctcagtttttctatcagtaaaaagggacaacagattctaatcaaaatcccagggaggctattgctttttaatttcgtgaaacttaggcggattctcaaatttatatgca

SEQ ID NO: 26252 - DNA, 171 bp, Homo sapiens
aaaacaaaaaagacacaaaataaatcgaagccagtcacacttaaaagttgggtacaccagactcccactgtagattcagaataaatagcagacaggaagaacagacagacagacacactcctgccacacatatgcacatatcaacatactgcaatgatgctttaataatgc

SEQ ID NO: 26253 - DNA, 642 bp, Homo sapiens
gcaaaggagaaatgcttgttaatatacaaactctagtcagttacctgtgaggatgagatgtgtcagaggactcagactttggtatagttagaaaaataatatttttctcacttgattctgtgtgaatgtctcttctgatactgttttttaatcagaaagttacagagcaactttcccacaaacaaaccaataaaacaaaaccccacaaaaaccaagagcatgaagaaaagtttaaatccctaattatatactcttttggtttttaggtagaaactggagctatcaatattttcatgtaagtatttcaaggagtagctctttaaaaatggtttctaaattagattttaaaaattcattgtcatctaaatgcatgtttagtcacaatgtatcagtattgtgtttaaaggtgctcagcatcactttttgaaaactatgtttacatatttaaaatgtttaattattttgaaatgtatagggtattaaatacaagcttctaaaattttcagtatctatattggctttctctaacagctctacagcaaagtttgacatgttttttgtgtgtgtcatgtattgtaagttgtaatatctgtaggagtgagttggacattctaaattagcagtaaaaaattcacaattaca

SEQ ID NO: 26254 - DNA, 376 bp, Homo sapiens
cgttaaattccactcaagacagtttctttactgaaaaggtatgaaattacgtgagaagaagtacaaatttcaggcccctagaatctgtctattaatataacatttgaatttctgggaaatctggggcacacattcacggtagaataacaaggaggcattgcttgcaggggagcgtactcagaacagtgctgtggatcctggcttgacacccttttctggaaaattggggtcactctctggctcagctacagaatggcctgtctttgtcaggagggacactaacttctcattaaggccatgctcttcaggaacagagaggatgatttggtttttggtttcaggtttttatttttatttttgttttgagacagtctca

SEQ ID NO: 26255 - DNA, 929 bp, Homo sapiens
ccggtgaggatgcgacgtgcaagggccatcgtggaagaggagaacccaaccttggcctccagacggggaggcaggaagtctctgttgataaactgctgtctgatgttctgttgtggcctcactcaaaccgtggcggggagcggttgctaacaggcacaggacgtcttctgcggatgatgaacgtgttccggagtgagatgagtggggatggttgcacaacttcgtgaacatgctaaaaaccactgaattgtacactgtaaagagtgacttgtgagcatgtgaatttcatctcaatgaagctgttttgcgggagccaggtgaagcactgtggaggccacggctcaagaaggcagcaccggcgtgagccaccgcacctggcctgatttttaatttttaaatgagggagcagaggcataactaggtttacaatcatgtcatcaacaaaataaattgtcttatttttctgatatttgtgccatttatttggtttttctattaagtttgccagaacctccgagaaaatgctggacaattatgacagcagcaggccccacgagtcgaccctggatttgtgacatttgtgttttccacgtagaacgatcttggccactattgtggacagagacttttgcacttttttctattttactagaaatagtgcttttattcataaagattgctgaatttggtcagttttcttttcagtacctgtcggtgaggttctctgaattttctgtgctaattggctaatgaaatgacgtctctgatgactgcgctgccctcgtaagcctggccttcatctgcttggccataacacgatgctgccgacgctgtgttgggtcctatttgctgttctcttgtgtagaatccgccgacgctgcgttggttcctatttgctgttctcttgtgtagaatccgctgatgctgca

SEQ ID NO: 26256 - DNA, 1002 bp, Homo sapiens
gaaactgcgcgcggacctcagtgtggcaggcactcccggggtgcagacggggtgaaggcagccttctctgtggtcacgtgcatgtaacggcaccttctctctcagggcctcctccctccctgcgtggtttgggggctgttcctgatagcacagatgccctgatcacaaacacctgcctgcattgctgaccacaggcctggcctggagaaacccacagcctcttcagggaagcgagcaaggggcttggaagtgcctgaagccagtgggctggggactcacggccgggacactcagggcaggccatgcgccgtttctcctggaataactggaggtgatttcatggaacctggaggctgggcttcaggctggggggagaggctccagactgggtcttctccgtggctctgccccccgctctccttgcttgagtggtgggggccctgcatcctctcatgcccacccccacctttctcgccaaattgtcggaggcttttgtcacctggagacactgttcctgccagctccggtcttggaaaacatggcctctcctctcctgccctggccccggcccctcctgccagctggacgtgggcatttctgcacccagtagaaccccacagccaggaaagatgcctggaaggctagagaagaggcgtgatggggggaccccatgtgtggcgacagagcagcacacccagctattctcagccaccatgtgggagagaaatgacgcctctgtcgagctccccatggccggagctgctccatacagcatcctaaccttcacccccaactactcagttgccatggcaaagggaatattttgactccctttttttaaaatttccaggtgattattgctagaggagtgggaagttactaatttttgtatatttatcttgtattaaaatgtttttactgatttttaattttaattttaatattttttgagatcacgccactgcactatagcctgggtgacagagcaagactctgtctcca

SEQ ID NO: 26257 - DNA, 956 bp, Homo sapiens
gaaactgcgcgcggacctcagtgtggcaggcactcccggggtgcagacggggtgaaggcagccttctctgtggtcacgtgcatgtaacggcaccttctctctcagggcctcctccctccctgcgtggtttgggggctgttcctgatagcacagatgccctgatcacaaacacctgcctgcattgctgaccacaggcctggcctggagaaacccacagcctcttcagggaagcgagcaaggggcttggaagtgcctgaagccagtgggctggggactcacggccgggacactcagggcaggccatgcgccgtttctcctggaataactggaggtgatttcatggaacctggaggctgggcttcaggctggggggagaggctccagactgggtcttctccgtggctctgccccccgctctccttgcttgagtggtgggggccctgcatcctctcatgcccacccccacctttctcgccaaattgtcggaggcttttgtcacctggagacactgttcctgccagctccggtcttggaaaacatggcctctcctctcctgccctggccccggcccctcctgccagctggacgtgggcatttctgcacccagtagaaccccacagccaggaaagatgcctggaaggctagagaagaggcgtgatggggggaccccatgtgtggcgacagagcagcacacccagctattctcagccaccatgtgggagagaaatgacgcctctgtcgagctccccatggccggagctgctccatacagcatcctaaccttcacccccaactactcagttgccatggcaaagggaatattttgactccctttttttaaaatttccaggtgattattgctagaggagtgggaagttactaatttttgtatatttatcttgtattaaaatgtttttactgatttttaatacggattgccagatacaagcagacaa

SEQ ID NO: 26258 - DNA, 1149 bp, Homo sapiens
ccggtgaggatgcgacgtgcaagggccatcgtggaagaggagaacccaaccttggcctccagacggggaggcaggaagtctctgttgataaactgctgtctgatgttctgttgtggcctcactcaaaccgtggcggggagcggttgctaacaggcacaggacgtcttctgcggatgatgaacgtgttccggagtgagatgagtggggatggttgcacaacttcgtgaacatgctaaaaaccactgaattgtacactgtaaagagtgacttgtgagcatgtgaatttcatctcaatgaagctgttttgcgggagccaggtgaagcactgtggaggccacggctcaagaaggcagcaccggctgggcgaggtggctcacgcctgtaatcccagcactttgggaggctgaggtggctggatcacgaggtcaggagatcgagaccatcctgactaacacagtgaaaccccgtctctactaaaaatacaaaaaaattagccgggcgtggcaaccggcgcctgtaatcccagctactcaggaggctgaggcaggaggatggcgtgaacccaggaggcggagcttgcagtgagccgagatcacgccactgcactatagcctgggtgacagagcaagactctgtctccaaaaaaaaaaaaaacaaaaaggtcggaccctcgacaaaacccgaaacaacgtgggccggggaatacctcacaccaaagctgtgccaggaacaacacctcccggggctacacacacgcggcgacaaaggagcacgccctatcgcacatgatgcgtcagcacagccgtctgtatacacgcgggaaaccccattctctacgcaccaaggagccaatctaccacttaccaagaggaagaatataagggaggaagatagacacgccgagataacagacaaaggaggcgcccggtagacacaacagaacaaccgcccggagaccacggccgcacgacggagtgacacgcacaggggcacgaggcgcacgcgggaagaaacaagccacaaacgagaccaatcgcagggagcaagcgacgaaacacagaggcggcacaatgcaaaccgtctgcccctgaaacaacacagaaccggatgtcgagagacatcaccacgagacacgcgaaacaacgacag

SEQ ID NO: 26259 - DNA, 1779 bp, Homo sapiens
gaaactgcgcgcggacctcagtgtggcaggcactcccggggtgcagacggggtgaaggcagccttctctgtggtcacgtgcatgtaacggcaccttctctctcagggcctcctccctccctgcgtggtttgggggctgttcctgatagcacagatgccctgatcacaaacacctgcctgcattgctgaccacaggcctggcctggagaaacccacagcctcttcagggaagcgagcaaggggcttggaagtgcctgaagccagtgggctggggactcacggccgggacactcagggcaggccatgcgccgtttctcctggaataactggaggtgatttcatggaacctggaggctgggcttcaggctggggggagaggctccagactgggtcttctccgtggctctgccccccgctctccttgcttgagtggtgggggccctgcatcctctcatgcccacccccacctttctcgccaaattgtcggaggcttttgtcacctggagacactgttcctgccagctccggtcttggaaaacatggcctctcctctcctgccctggccccggcccctcctgccagctggacgtgggcatttctgcacccagtagaaccccacagccaggaaagatgcctggaaggctagagaagaggcgtgatggggggaccccatgtgtggcgacagagcagcacacccagctattctcagccaccatgtgggagagaaatgacgcctctgtcgagctccccatggccggagctgctccatacagcatcctaaccttcacccccaactactcagttgccatggcaaagggaatattttgactccctttttttaaaatttccaggtgattattgctagaggagtgggaagttactaatttttgtatatttatcttgtattaaaatgtttttactgatttttaattttaattttaatattttttgagatggagtttcactcttctggcctaggctggagtgcagtggtgtgatttcggctcgctgcaacctccacccatgggttcaagcgattctcgtgcctcagacccccgagtagctgggattacaggcatgcaccaccacgcccggctaattttgtgtttttagtagagacaggatttcactatgttggtcaggctggtctcgaactcctgatctcaggtgatctgcccaccttggcctcccaaagtgctgggattacaggcgtgagccaccgcacctggcctgatttttaatttttaaatgagggagcagaggcataactaggtttacaatcatgtcatcaacaaaataaattgtcttatttttctgatatttgtgccatttatttggtttttctattaagtttgccagaacctccgagaaaatgctggacaattatgacagcagcaggccccacgagtcgaccctggatttgtgacatttgtgttttccacgtagaacgatcttggccactattgtggacagagacttttgcacttttttctattttactagaaatagtgcttttattcataaagattgctgaatttggtcagttttcttttcagtacctgtcggtgaggttctctgaattttctgtgctaattggctaatgaaatgacgtctctgatgactgcgctgccctcgtaagcctggccttcatctgcttggccataacacgatgctgccgacgctgtgttgggtcctatttgctgttctcttgtgtagaatccgccgacgctgcgttggttcctatttgctgttctcttgtgtagaatccgctgatgctgca

SEQ ID NO: 26260 - DNA, 507 bp, Homo sapiens
taaaaaaatgctttaaaatggaagtgaacagaaggcaagggcaacttagggtgacatactgttaaacacataaatcattttaaatggctgaattaatccataaaacaaatatacacctagaaaaaccagagctggaatttctagtaaactatttttaaacattgtaaaatatgtcttttaggctgggcacagtggctcacgcctataatcccagcactttgcggggctgaggagggcagatttcttgaggtcaggagttcgagaccagcctggccaacacggcaaaaccctgtctctactaaaaaaaacacaaaaattcgccaggtgtggtgacacacacctgcaatcccagctacttgggaggccaaggcacaagaactgtttgaacctgggaggtggaggctgcactgagctgagatcacgccactgcactccagcctgggcgacagagtaagactctgtctcaaaataagaataataataataaattacgttttttaaaggggt

SEQ ID NO: 26261 - DNA, 258 bp, Homo sapiens
aatatcggaaaaaccttctagagagtggcttaggcagagacttcaggactaagaacccaaaagcaaatgcaacaaaaacaaagatgaatagatggaacttaattaagctaaaaagcttctgcgtagcaagggaaataatcagtaaacagacaacccacagagtgggagaaaatattcacaaactatgcatctgacaaaggactaatatccagaatctatgaggaactcaagcaaatcatcaagaaaaaaacaaatata

SEQ ID NO: 26262 - DNA, 429 bp, Homo sapiens
  misc_feature (262)..(262): n is a, c, g, or t
  misc_feature (306)..(306): n is a, c, g, or t
  misc_feature (375)..(375): n is a, c, g, or t
  misc_feature (388)..(388): n is a, c, g, or t
  misc_feature (422)..(422): n is a, c, g, or t
aaaaaaaaaaaaaaatgcaataatgaaaaaaaaaagttatgcaacaatgtcttaacccaagcatgttctgcctcagggcctttgcacttgttggcctctgtctggaatatgcttttctcagatctgcctgcctcaacttcccaaagtgctgggaatacaggtatgagccactgcgctttaagtcttttttttttttttttttttgagatggattttcactcttgtcacctaggaatggagtgcaatggctcaatctcggctnactgctatctccacctcccagggttcaagcagttctcctgcctnagctactcagggaggctgaggcagggaggaatcacctggaacttagggagggtaggagacttgaagtgnagcttgaggatcnccagttttgggggtgacagagtgaggactctgtntccaaaa

SEQ ID NO: 26263 - DNA, 357 bp, Homo sapiens
ttagtagtgtttcataaaataaaggggcatattacaaaaatatagactgtagaaaaatttgaaaaaaactatttttacagggaggagtaatttcattaatataagatggtattcttagcaacagtcatcatggaaaccaggaaaataagccttaaattttatgactttgtcccttcctattgatttcaggttatgtttgtatggataatcataggctacactgccacactgtccaacatgatagccactcgccaattgtggttatttacattaattaaaattaaataggccaggtgcagtggcatgcacctatagtcccagctacttgggaggctgaggtgggaggatcgcttgagc

SEQ ID NO: 26264 - DNA, 1006 bp, Homo sapiens
gtgtggtcaacactttcgttactttagtatacatcaccccaattgtttgtcttcaccacacactttggagttaggtagtagtatctatttttacaaataagaaaacccaggcacaaaggggttgattagcaattatcttttgaaaagcctgtagttgctcatctgaagaagtgacggaccacctcttatttagtggacagacagtaactagttgagaagacaggggattttgttggcggaaaaaaaaatttatcaaaagtcgtcttctatcagggagttttatgagaaaccctagctcctcagttccacagtgggtaactgtaattcattctaggtctgcgatatttcctgcctatccattttgttaactcttcaatgcattccacaaatacctaagtattctttaataatggtgggttttttttttttttgcatctatgaagttttttcaaattctttttaagtgacaaaacttgtacatgtgtatcgctcaatatttctagtcgacagcactgctttcgagaatgtaaaccgtgcactcccaggaaaatgcagacacagcacgcctctttgggaccgcggtttatactttcgaagtgctcggagcccttcctccagaccgttctcccacaccccgctccagggtctctcccggagttacaagcctcgctgtaggccccgggaacccaacgcggtgtcagagaagtggggtcccctacgagggaccaggagctccgggcgggcagcagctgcggaagagccgcgcgaggcttcccagaacccggcaggggcgggaagacgcaggagtggggaggcggaaccgggaccccgcagagcccgggtccctgcgccccacaagccttggcttccctgctagggccgggcaaggccgggtgcagggcgcggctccagggaggaagctccggggcgagcccaagacgcctcccgggcggtcggggcccagcggcggcgttcgcagtggagccgggcaccgggcagcggccgc

SEQ ID NO: 26265 - DNA, 362 bp, Homo sapiens
tcattaaaaagtttacaaaaaattgtattactcgatatacatcttatttgaactagccttttccattcagtagctatgttgtttgatagctagagtctgttgattgatatttgggttctgaataactaatgttttcaagtatcctttaaaaactattatttttatattataggagatatttcaatgtgtatattaggaaaactctaactgcattctgaaaaaataagttcctgagatttccgttcagcaatacttttgaaacacagataaaattacttcctgtctcttagcttcctgtatccatggcaacctctgttttacacattgactgtaaaggaaccaatgtgaagagtggtgtttcc

SEQ ID NO: 26266 - DNA, 2133 bp, Homo sapiens
  misc_feature (1306)..(1306): n is a, c, g, or t
ggagcagtcgtgcattcccagcctcgcctcgggtgtagggattgcatagaaaagcaaaactacacagtcttgactgtgtagttttgtttttaggattagaggctcaccgattcatgtcggagatggtcagaaaaaccaactctccataggacgtcgtttcagaagcaaccttgggcttagtcccaccctttttaggcactcttgagaaatcagagtgcctagaaagatgacaactcaagcaccgacgtttacgcagccgttacaaagcgttgtggtactggagggtagtaccgcaacctttgaggctcacattagtggttttccagttcctgaggtgagctggtttagggatggccaggtgatttccacttccactctgcccggcgtgcagatctcctttagcgatggccgcgctaaactgacgatccccgccgtgactaaagccaacagtggacgatattccctgaaagccaccaatggatctggacaagcgactagtactgctgagcttctcgtgaaagctgagacagcaccacccaacttcgttcaacgactgcagagcatgaccgtgagacaaggaagccaagtgagactccaagtgagagtgactggaatccctacacctgtggtggaagttctaccggggatggagccgaaatccagagctcccttgatttccaaatttcacaagaaggcgacctctacagcttactgattgcagaagcataccctgaggactcagggacctattcagtaaatgccaccaatagcgttggaagagctacttcgactgctgaattactggttcaaggtgaagaagaagtacctgctaaaaagacaaagacaattgtttcgactgctcagatctcagaatcaagacaaacccgaattgaaaagaagattgaagcccactttgatgccagatcaattgcaacagttgagatggtcatagatggtgccgctgggcaacagctgccacataaaacacctcccaggattcctccgaagccaaagtcaagatccccaacaccaccgtctattgctgccaaagcacagctggctcggcagcagtccccatcgcccataagacactccccttccccggtcagacacgtgcgggcaccgaccccatctccggtcaggtaaagctgccatagagagagcagattattgcacattttggaactaggttttgaaacgagaaagattcccttgtccccctcgcagggcatgcgacgcggagagtggttcgcttcttcagtgtcccgctgctcaaacctctaggggagcatacaaacgggcaggntgtggggctccgtgttcctctggacatccagccgcttgtgtgtctgcctactagggtctcaggggtttttataggcatagggtgtgggcgtggcaggtcagggtgatcttgggaaatgcaacatttgggcgggaaggcaggagtgtttgtcctcacctaggtccatgggcacaggcctcgctagggaccacgcacttctcttcccagcacttccctgccctcctcccgtgtaagtttcatgcactcaaaaatgtagcaggtgacaaaggaggtaaaccaagaagttactgaatatgattttcacaaatcctcactgtccacaggtaaattgaagacccttataaacttctgaattcttatttatatttcatgtaataaatatctactttaggggccaaaatatggcacagtgaaaggagaagagcacagaagttagagttcaaagccctaaggacaaatcagcctgatcacttaacagtttgatttagggcaataagtataaataataaaataattgttattatatatggatcacttcctctatcagattggaactatacatacattatctcattaaatgttcacaacctgtaagaattattatcctcaatgttattgataggtaactggaattaaagaagttaagcagtttatttaaggtttcagttgtgtcatctgtaaattaaagagagtcacaataagaatgatctcaagctgcattttggggcttcaatgagataattagttgaaagtgccttgtaaatagaaaataattatgccaatattcttatattcagatggtaagtaaaaccttttaaatattttgc

SEQ ID NO: 26267 - DNA, 3359 bp, Homo sapiens
gccacccgggagcctgaggtgggaggattgcttgagtctgcgaggttggggctgccgtgagcccagattgcgccattgtgctccagcctgggtgacaaagcaaggccctgtctcaaaaaagaagaagagaaagggccaggggcttttgctttaaaaaactttttttaaaacagaagtgaaaccacgggtgctttgttcttccttctgcacctccttcttaaactagatagctaattagttattttaagaaaaaagaaatttaaaaaaaagcctgctttatttgttagtgggctagaatacacaagacatacccacccatgaagagtttatgaattgtaacttattgacattatcataggaatttactaccagttaaagagggagaacggaggaagagaaaaatacttcagataaaggaaaaagttttcttctcacaaaaacacagacacgtgattgttttcacaggttccattaattaactcaggtctggaagacataggacaaaatggagtttctgaagaagtccaggtgaattcagctttggagtcacttatgttcattttttttccttttcttttactattatcctaaaggttatttttcttgttgatatagagatttttgtaaaagattgctacattatttcaggattatatcctacatttcgattgctctcaaatgttttatccctaaagagtgagttttccacagactgtttggaagcaactagaaaaatctttgtgaaaaatctgaacaaattatcataatggctctcttgaaattttgcactttcacccttattaaggaaattataattagttactaacctttaaaaatagatatattctaataggatagaaagttaacttcctggcaaacaaaatactaagatctcaggggctactgcaggaaaatacctttttcgcacattaaaatgtttataaaattttcccctctcatttcaaatgcatggcaggaataacatttttggtggtctttaatgtgatggacagatttactgtcacttattgattttatggaaaataaattggctatcttatttttataacaatcttatttttctcaaaacaaaaatcctaaccaaaaagttgtcattaaaaaaaaaaaattcaggtagactgaatgtttttctgctctaaccttaaatgttattaggtttggtttttgtttctaagctacttcaagactacctgaggtaataatggtaaactttattattcagaattcgattaaactaacttcagcatttccacagttctattaaacaatgactgatgttcacaatgacaacctacctgagatggctgcaaggccctaatgttccattatacattatagtcttttcagcatagtttagtgttgagtgcaattctaatgcattctacgtttttgaaaatcgataatccatggaaggtccatgggttgatacctcaggtcaaaaatgtgtttactctgttgattgctgtttcactttacttgtatatcagatatataagctatgaacacaagtttgtagtaaaagtatcttctgtctgggcaatggctcacacctgtaattccaacactttggggggctcaggtgggaggatttctagtccccaggagtttgagaccagcctgggcaataaactagaccccatgtctctaaaaaatgtaaaaaacatcaagaggctgagtcaggaggatcatttgagcttaggagttcaaggctgcagtaagttatgattgtgccactgcattccagcctgggtgacaagagtgagaccctgacccaaaaaagtatcttctgataaagtggcatttgaaaattgcagaaattttaatattttttcttttaatattaagaactttattgatctctctaggacaccttggtgaggaaattaatggcacttttcttgacatccaacctgggactctggtgattctgtgttctggtgaatttaagtttcagacatttctttgtgtcaccttttacaaggtgtttgcccttggtacgttatgaccaggtcaaaggttcccaaacacaaggctcattgtgtaccctggacaggaaattgaactgatgttgacatgtatgcatgcccaggaggaagactgggaaagatttaatgagttgaagtatgctgagaaacaatgaaatatttgaaaactgtctacataaaagttactgatgcacatgcattaaaaaaaaaaatgttgttgcaaatctaacactaaaaaatttttgactgggtgcagtggctcacacctgtaatcccagcactttgggaggctgaggcgggtagatcacaaggacaggagttcaagaccagcctggccaacatggtgaaaccccgtctctactaaaaatacaaaaattagccaggcatggttgcgggtgcctataatcccaactaccccggaggctgaggcagggaattgcttgaagcaaggaggggcaggttgcagtgagccaagattgtgccaccacactccagcctgggtaacagcaagactccgtctcaaaaaaaaaaaaaattcccaaataggaagatattttctaaggaagaataaaatgctggacccctatattcagactattagtcttaactggtagtttatgtatatattttaatactttgtcatcatgtacatatcttaagatttattatgtgaatatctgcatgtgtgttattaaggattacaaagttgtgctcacacaggacaaatggaaagattttcctacttctgtaaagataagtttcattatacttttgtcttacaattttattcttaggtcaatggttatttattataagttcagattgcacaattttcataagaccctttggatttagcacatgaaattaacacatattttaaagtattaaatacatggaaagcatctggcattatgcctgataataggcacttagtaaaatgtacttttctttgaatcaacatttgaattcttacagtcttgtcactagagacttaaaaggaccattgagtgcctatttttatacattcatcttttctcaatttgtcacattatctcattttaaataatgcaagtgaaagtgaattcatcatactatctcaacaccaatacaaaattattccaataaaaatatttttcttaataaaaccagaaaaactgaactaaatgctatttagccccgccaacaaagctttgtggaaaaatatatgaatatatgaaatgttctcaaatattttgaataaactgttcatgaagccttatattttgcaagtgtttttactgttgattttagaaagtttataaatcttaaatgtttgtatatttttcatttgcaataaaatgttatttaattatg

SEQ ID NO: 26268 - DNA, 3231 bp, Homo sapiens
tctcccttctgcacctccttcttaaactagatagcttaattagttattttaagaaggaggtgcagaaggaagaacaaagcacctccttcttaaactagatagctaattagttattttaagaaaaaagaaatttaaaaaaaagcctgctttatttgttagtgggctagaatacacaagacatacccacccatgaagagtttatgaattgtaacttattgacattatcataggaatttactaccagttaaagagggagaacggaggaagagaaaaatacttcagataaaggaaaaagttttcttctcacaaaaacacagacacgtgattgttttcacaggttccattaattaactcaggtctggaagacataggacaaaatggagtttctgaagaagtccaggtgaattcagctttggagtcacttatgttcattttttttccttttcttttactattatcctaaaggttatttttcttgttgatatagagatttttgtaaaagattgctacattatttcaggattatatcctacatttcgattgctctcaaatgttttatccctaaagagtgagttttccacagactgtttggaagcaactagaaaaatctttgtgaaaaatctgaacaaattatcataatggctctcttgaaattttgcactttcacccttattaaggaaattataattagttactaacctttaaaaatagatatattctaataggatagaaagttaacttcctggcaaacaaaatactaagatctcaggggctactgcaggaaaatacctttttcgcacattaaaatgtttataaaattttcccctctcatttcaaatgcatggcaggaataacatttttggtggtctttaatgtgatggacagatttactgtcacttattgattttatggaaaataaattggctatcttatttttataacaatcttatttttctcaaaacaaaaatcctaaccaaaaagttgtcattaaaaaaaaaaaattcaggtagactgaatgtttttctgctctaaccttaaatgttattaggtttggtttttgtttctaagctacttcaagactacctgaggtaataatggtaaactttattattcagaattcgattaaactaacttcagcatttccacagttctattaaacaatgactgatgttcacaatgacaacctacctgagatggctgcaaggccctaatgttccattatacattatagtcttttcagcatagtttagtgttgagtgcaattctaatgcattctacgtttttgaaaatcgataatccatggaaggtccatgggttgatacctcaggtcaaaaatgtgtttactctgttgattgctgtttcactttacttgtatatcagatatataagctatgaacacaagtttgtagtaaaagtatcttctgtctgggcaatggctcacacctgtaattccaacactttggggggctcaggtgggaggatttctagtccccaggagtttgagaccagcctgggcaataaactagaccccatgtctctaaaaaatgtaaaaaacatcaagaggctgagtcaggaggatcatttgagcttaggagttcaaggctgcagtaagttatgattgtgccactgcattccagcctgggtgacaagagtgagaccctgacccaaaaaagtatcttctgataaagtggcatttgaaaattgcagaaattttaatattttttcttttaatattaagaactttattgatctctctaggacaccttggtgaggaaattaatggcacttttcttgacatccaacctgggactctggtgattctgtgttctggtgaatttaagtttcagacatttctttgtgtcaccttttacaaggtgtttgcccttggtacgttatgaccaggtcaaaggttcccaaacacaaggctcattgtgtaccctggacaggaaattgaactgatgttgacatgtatgcatgcccaggaggaagactgggaaagatttaatgagttgaagtatgctgagaaacaatgaaatatttgaaaactgtctacataaaagttactgatgcacatgcattaaaaaaaaaaatgttgttgcaaatctaacactaaaaaatttttgactgggtgcagtggctcacacctgtaatcccagcactttgggaggctgaggcgggtagatcacaaggacaggagttcaagaccagcctggccaacatggtgaaaccccgtctctactaaaaatacaaaaattagccaggcatggttgcgggtgcctataatcccaactaccccggaggctgaggcagggaattgcttgaagcaaggaggggcaggttgcagtgagccaagattgtgccaccacactccagcctgggtaacagcaagactccgtctcaaaaaaaaaaaaaattcccaaataggaagatattttctaaggaagaataaaatgctggacccctatattcagactattagtcttaactggtagtttatgtatatattttaatactttgtcatcatgtacatatcttaagatttattatgtgaatatctgcatgtgtgttattaaggattacaaagttgtgctcacacaggacaaatggaaagattttcctacttctgtaaagataagtttcattatacttttgtcttacaattttattcttaggtcaatggttatttattataagttcagattgcacaattttcataagaccctttggatttagcacatgaaattaacacatattttaaagtattaaatacatggaaagcatctggcattatgcctgataataggcacttagtaaaatgtacttttctttgaatcaacatttgaattcttacagtcttgtcactagagacttaaaaggaccattgagtgcctatttttatacattcatcttttctcaatttgtcacattatctcattttaaataatgcaagtgaaagtgaattcatcatactatctcaacaccaatacaaaattattccaataaaaatatttttcttaataaaaccagaaaaactgaactaaatgctatttagccccgccaacaaagctttgtggaaaaatatatgaatatatgaaatgttctcaaatattttgaataaactgttcatgaagccttatattttgcaagtgtttttactgttgattttagaaagtttataaatcttaaatgtttgtatatttttcatttgcaataaaatgttatttaattatg

SEQ ID NO: 26269 - DNA, 2900 bp, Homo sapiens
gccacccgggagcctgaggtgggaggattgcttgagtctgcgaggttggggctgccgtgagcccagattgcgccattgtgctccagcctgggtgacaaagcaaggccctgtctcaaaaaagaagaagagaaagggccaggggcttttgctttaaaaaactttttttaaaacagaagtgaaaccacgggtgctttgttcttccttctgcacctccttcttaaactagatagctaattagttattttaagaaaaaagaaatttaaaaaaaagcctgctttatttgttagtgggctagaatacacaagacatacccacccatgaagagtttatgaattgtaacttattgacattatcataggaatttactaccagttaaagagggagaacggaggaagagaaaaatacttcagataaaggaaaaagttttcttctcacaaaaacacagacacgtgattgttttcacaggttccattaattaactcaggtctggaagacataggacaaaatggagtttctgaagaagtccaggtgaattcagctttggagtcacttatgttcattttttttccttttcttttactattatcctaaaggttatttttcttgttgatatagagatttttgtaaaagattgctacattatttcaggattatatcctacatttcgattgctctcaaatgttttatccctaaagagtgagttttccacagactgtttggaagcaactagaaaaatctttgtgaaaaatctgaacaaattatcataatggctctcttgaaattttgcactttcacccttattaaggaaattataattagttactaacctttaaaaatagatatattctaataggatagaaagttaacttcctggcaaacaaaatactaagatctcaggggctactgcaggaaaatacctttttcgcacattaaaatgtttataaaattttcccctctcatttcaaatgcatggcaggaataacatttttggtggtctttaatgtgatggacagatttactgtcacttattgattttatggaaaataaattggctatcttatttttataacaatcttatttttctcaaaacaaaaatcctaaccaaaaagttgtcattaaaaaaaaaaaattcaggtagactgaatgtttttctgctctaaccttaaatgttattaggtttggtttttgtttctaagctacttcaagactacctgaggtaataatggtaaactttattattcagaattcgattaaactaacttcagcatttccacagttctattaaacaatgactgatgttcacaatgacaacctacctgagatggctgcaaggccctaatgttccattatacattatagtcttttcagcatagtttagtgttgagtgcaattctaatgcattctacgtttttgaaaatcgataatccatggaaggtccatgggttgatacctcaggtcaaaaatgtgtttactctgttgattgctgtttcactttacttgtatatcagatatataagctatgaacacaagtttgtagtaaaagtatcttctgtctgggcaatggctcacacctgtaattccaacactttggggggctcaggtgggaggatttctagtccccaggagtttgagaccagcctgggcaataaactagaccccatgtctctaaaaaatgtaaaaaacatcaagaggctgagtcaggaggatcatttgagcttaggagttcaaggctgcagtaagttatgattgtgccactgcattccagcctgggtgacaagagtgagaccctgacccaaaaaagtatcttctgataaagtggcatttgaaaattgcagaaattttaatattttttcttttaatattaagaactttattgatctctctaggacaccttggtgaggaaattaatggcacttttcttgacatccaacctgggactctggtgattctgtgttctggtgaatttaagtttcagacatttctttgtgtcaccttttacaaggtgtttgcccttggtacgttatgaccaggtcaaaggttcccaaacacaaggctcattgtgtaccctggacaggaaattgaactgatgttgacatgtatgcatgcccaggaggaagactgggaaagatttaatgagttgaagtatgctgagaaacaatgaaatatttgaaaactgtctacataaaagttactgatgcacatgcattatttattatgtgaatatctgcatgtgtgttattaaggattacaaagttgtgctcacacaggacaaatggaaagattttcctacttctgtaaagataagtttcattatacttttgtcttacaattttattcttaggtcaatggttatttattataagttcagattgcacaattttcataagaccctttggatttagcacatgaaattaacacatattttaaagtattaaatacatggaaagcatctggcattatgcctgataataggcacttagtaaaatgtacttttctttgaatcaacatttgaattcttacagtcttgtcactagagacttaaaaggaccattgagtgcctatttttatacattcatcttttctcaatttgtcacattatctcattttaaataatgcaagtgaaagtgaattcatcatactatctcaacaccaatacaaaattattccaataaaaatatttttcttaataaaaccagaaaaactgaactaaatgctatttagccccgccaacaaagctttgtggaaaaatatatgaatatatgaaatgttctcaaatattttgaataaactgttcatgaagccttatattttgcaagtgtttttactgttgattttagaaagtttataaatcttaaatgtttgtatatttttcatttgcaataaaatgttatttaattatg

SEQ ID NO: 26270 - DNA, 433 bp, Homo sapiens
tcagcatataggaccatagcttatacagagcgatagtgtcaggggagatagaaagaagtggatggatttgggaaattttctggaagttgtcttgacagcactcagtgatggattggatgtaaagaatgtgggagaaaaaatgtcaaaaatgactccaagttttctagcttgagcactcccagaaggagagattagtggagatttagggacgagagctgagagttcagttcagggcatgtttatatttcagatgcttaaggagacatccaaatagagatgtcaggtgggcaactggagaaagaagttgggagctcaaaagcagctggattgctcttaatttgcctgcagtacgattttctgggttttgtttattggtttgtgtgttttttgagacggagtctcgctctttcgccaggatggagtgcagtggtgc

SEQ ID NO: 26271 - DNA, 488 bp, Homo sapiens
atcttctcaattcgcatgtttaatgcttaatttttaaataagacattgcttcacaactttgtgtttgaattgataatttgtgcaaatcaggaaaatacgtatttaattaggttgagccatatgagtttgctgatattcgaccattttgtaaaaacaggagtggcaatttcatatggttcaataaaataaaattgagaccgggcacagtggcttatgcctgtaatcccaacactttgggaggctgaggcaggaggatcacttgagctcaggagttcaagaccagactgggcaacatggcaaaaccctgtctctacagaaatacaaaaatgagccaggcatgatggcacatgcctgtagttctagctacttgggaggctgaggtgggaggattgcttgagcccaagaggcagaggttgcgatgagctgagatcatgccactgcaatccagtctgggcaacagaatgagaccctgcctcaaaaaaaaaaaa

SEQ ID NO: 26272 - DNA, 207 bp, Homo sapiens
aggaggtcaaggctgcagtgagccacgattgcaccactgcactccagcttgggagacagagctagactctgtctttaaaaaaaaaaaaaaaaactgccacctggtagaacatggttaattaagtggtagtaataagaattgttagaactcaaaagaataaactagctccacagggctgggttgacctgggaaagcttctcagaagaa

SEQ ID NO: 26273 - DNA, 141 bp, Homo sapiens
gtgtatctgcatggtgatgtctccgtgtgacagtgttttgtgtatctgtgtgacagtgtctgtgtgtccttgtgtccacatggcagtgtgtgtggtggtgtgacggtatggaggtgtgtccatgtgacagtgtggcagtgt

SEQ ID NO: 26274 - DNA, 821 bp, Homo sapiens
aggaaacatacaatcatgacagaagatgaaggggaagcaagcatatcttaccatggtgatggaggagagaaagaaggagtgagtggggagatgccacacacttttaaaccatcagatctcatgagaactccctgactatcacaagaggagcaagaaggaagtccactcccacgatttaatcacctctcaccaggcccctcctccaacactggggattacaatttgacatgatatttgggtggagacacagagccaaaccatatcagtgactgtagttaataatatatcgtatatttttaaattgctctaaaaattgaatttcaaatgttctcaccataaagacatgacaaatatgtgaagtgatgattattttaattagcctgatttgttaatgccacaatgtataaatgtataaaaatcacgttttaacccataaatacatgtaattgttatttgtcaattaaaaataaaaataaattgaaaactaaaaatagtaaagggagttccctccatgaaggatcaatgagtacatgccatagatttaattttgacagcaagaaacaagaaggttgcaacagtccaaacattgtgtgataaatggttgctcttaaaaatatttttatagtttgcctcaataagctaagacataagttataatctattaggtaggagtatattcattcagtggcttactgttatactcataaacagcttcatcctacttacccaaggttagttttcatgaagactgatcatctgaataaatttggttgcaaatactaattattgaaattaatggatacctactgtggatgtctatt

SEQ ID NO: 26275 - DNA, 795 bp, Homo sapiens
ggcgtgatctcagctcactgcaacctccgccttccaggttcaagtgattttccagcgtcagcctcccgagtagctgggattacaggcacccgctaccacacctggctaatttttgtatttttttttttttagtagagatggggtttcacccatgttggacaggctggtctcgaactcccgacctcaggtgatccgcctgcctgggcctcccaaattgttggggttacaggcgtgagccaccgtgcccagcctgcattctactttaatagctaggagacctccacagctattggttgaagtcagtcagagctgaaattgaacgtttaccttgggtatctgggcaactttgggcaagtgacaatccctctggggtttagtttcctctctaaaaaaggttgataacacattcaatcctgaacaacctgaaaacgaggcaaggtgaaaacacctggtccaatccataagtgatcaatacttgttacatcccctacttttttcttgtgtaatcagaaataccctttgcgtcgaggatcattcagcctaacccagttaatgaatgacatgttggtctctaggcaaccttcccattggccttgacatgtactttccccagcaggaggagccccttctgaatgtccagccttcctcattctgttagacccacctatagcttccttgtaagctaataaatcagcaacatggtttatcagtgtcctgaggttttgcttagcacaacctttggaatatggttatagtttggttgagtgaataaaactatgtctctaaacctgtaaa

SEQ ID NO: 26276 - DNA, 489 bp, Homo sapiens
gagccaagattgcagcactgcactccagcctgggcgacagagccagactccatctcaaaaaataaataaataaataaataattagctgggcgtagtggcatgtgcctgtagtcccagctaattggaggactgaggtgggaggattgtgtgagcccaggagtttgaggctgcagtgagtcgtgtttgtgccactgcactccagcctgggcgaccgagtgagaccctgtctcaaaaaagaaaaaagaaagaaatgaaagaaaagggaggcatcctgtatgacacacagacgagaagtgaaagagtaggcatgatttcggttctttttttgtttgttttttgagacagtttccctctgttacccaggctggaatgcagtggcgctatctcggctcactgcaacctccacctcccaggctcaagtgattctcatgcaccagctgctcaagaggctgaggtaggaggatcactttgagccaggagggttgaggg

SEQ ID NO: 26277 - DNA, 260 bp, Homo sapiens
gccgccctgtctggaaagtgaggagcacctctgcccagccccctcaccatttgtaagggaggagtgcctctgcccagcccctgcaccgtctgggaagtgaggagtgcccccacccggccccctcaccatctgggaagtgaggagggtctctgcctggctgctgtgcaaccttccaagtgtgaagtgacagccttgtgtgtgatctttctgccctccccaggtttgcattttcgacattaaagtttactttttaatttaaa

SEQ ID NO: 26278 - DNA, 888 bp, Homo sapiens
ttccttacgagcagaacatgttgtcttactacttgagtcatagcctgagatgtctggaaactgaatgtttctctttatgactcagtttcaccttttgctaggcataactccccaaaaggttgtactttgaaggcttccatgaagattgaaagataatactgtagactcttaacaacaaagacacaatcatatttttttaatgtgaatattcttaattttatagctgtggccagtggctgtcttgtgattttcatctggtttcatctacgtgtttctgtcccaacccaacaaaagtaaatattttccttttctttctcaagccccctttattgggtgaaactattattggggtgttgctctccattcttctttttttatcctctgctaacttttccactagcttcatctcttgcttcttactcgaaacacttcaaagttttcttctgatgagtgctaattggactatactcctcattttttctcatgcatcctggggagagtaacatttttctccccaagggaaaatgaaaacacgacagaagactgaagtagctattatgtaaacaagagaggaatcacagaacagacttcagtggcctttgtgcaaaaggaaagcggaagggagatgagcaattcaagtccagggcctggccacgtggactaccctttttcaaggatagcacggcatgagaaaaaaggagggcctgtctcagaggaagtgcatgtgggatggctgtgcatgtccttgttgttacagtcttcaggagactcgaggatgaatgagaaaagccctaaagaatctgtacctaagaatttgtgtaaattcaagagaatttacacaaattgaaatgaaatttattttttgaaataaataaatgggattctcaa

SEQ ID NO: 26279 - DNA, 465 bp, Homo sapiens
aaaaatgagctgggtatggtagcacacacttgtggtcccagctacttgggaggctgaggtgggggggttgcttgtgcctgggagtttgaggctgcaatgagctgtgattgtgccactgcactccagccctggataacagaatgagacccctgttcccaaaaataaaaaataaaatcaaagacacttaaaaagatggggaaaaggaaggacaggcacttaagcaagttataagctactttcctaactacacaagtggaatcttaagctgaggttcccaggagttgactggagccagagaagacagacctataggagcacccaactggagtcgccctccatagtagcccatatgtcttacatggatcagctttcgtggggcccttctactccgtctggggaagggcgtcagatctgtggctctcatgtactgctcagtacactgccattcccagttctttttttcaa

SEQ ID NO: 26280 - DNA, 419 bp, Homo sapiens
aaaaaaatgatgtagtctccaggcaataagcaaagtaacgtaggcttgaaggatagaagccgccaacccagaaggaaaagcaggccagggaccaagaagaaaaacaggctgagcaaatcgagtttgggttggttgaagtagggcctcccgggggagctgtccttcagaacctgggaatgtgggagctgcagtgactacagaggttgcttcctgatgacaaggtctgggccatttctgccaactctgcacctcgagcccaaccagcatggcagctggtgtggtctggagggattgctcgagtgggcactagggggatggggaggagaatggaaatctgatggtgaaagactgagtttaaaaatacatttctggctgggcatggtgcctcacgcctaatcccagcactttgggaggctgag

SEQ ID NO: 26281 - DNA, 521 bp, Homo sapiens
gtttcctcataaggtgagaacaaggctgtatctcagtgctctgggcctgctcacacatcctgctcatatgaatgtgagagccacaccagccctctgggaagtagtccctcaaacagcagcccagtgcagggggaaggatgcaaacactacaggcagatcagtttaatccacttttgggcagggtgaccttaggaaagcccatttccttctgcctcaattgtcacctctgtaaaatggaaacaataatatttatttccgtggctgtttggaggattacataaaataacaaatacagtggcattccatttttctgaggcaattatgttctataaagtcactgcaaacactgaattactggaatagtgagccattgctcttactggaaatacaggattaggttcctgaaaaatctctggtcacaacatctttgtcaactgatcaatacataaccatgatgtatgtgtgtttctttttaaaggtaccttatttaatatcattgttgattcattaatattaaactc

SEQ ID NO: 26282 - DNA, 227 bp, Homo sapiens
tttcaacagtttcattaggatatgccctactgtggttttattgtgcttattttgcttgattttctttgtgcttactaatttttggagctacctttacatgttgcattggtattttttatgttcatgttattacaagtaaaaaaggcagttaacccttataaatataattttacagtaataataacaacacaggaaactatcataatatctgtagtgggttaaagacg

SEQ ID NO: 26283 - DNA, 591 bp, Homo sapiens
  misc_feature (585)..(585): n is a, c, g, or t
  misc_feature (588)..(590): n is a, c, g, or t
gtgtatgtatgtatacatctatctatctaatcccaaaaatgttttaacctagcattaataatataagaaaaaatacatatggagggttgagtaggagctctgtgtgtatgtgtatgtcactatacataatgtgtgtgtgtgtgtgtgtgtgtgtgtgtgtagtatttaatgtaaatcttgaaaaggaatacctcattgacaaataactataacagaaatatgggagtagccacgacttcattgggaagctgaagagtaagttaaagattagccccattctagtcgcctcaggcacactgaacacttaaccagctggtcaaagttctaaattaggtttaaatttatacattctctgtctcctataatcattattgaaatttctcttaaacctattttatgttaagccaagaaactttccaagatgttcagatgttaaggacaaagtttcctgtttggtctcctagaaatatcatttctaacaaagggctataatgataccaaagcttgcaaaacatgtttcttatagaaattgtatgttagaatatttgctatggaaaattaaatttgttcaatttagccataaanaannna

SEQ ID NO: 26284 - DNA, 308 bp, Homo sapiens
atcgaaagccccagcaacttctcaggtggcagtcacgttgttgcgagggtaacctgaaaacagctgtcagctgggagtaggagccagggtttttttctcagtattcaccttcgggggctgttggagaagtaagcaaaacattttatgtaaacggtccagaagacttttgaaaaatatgccatgaatatttagaggttttatagctgtagcaaagtgagaggcatgttgtagaaacaggaaaatgaccttatgtaacccttattatgtttgcagcctggctataaggattagttggaagtcatccctga

SEQ ID NO: 26285 - DNA, 417 bp, Homo sapiens
tgcatcgacgcttctaaaacatgaggttctatgagattttgaatagtcataaatgatatatgtccactataagctacatttttgtagtttttaaattgtgaaataatttcccacacaaaagtattatgagtaccgtaaagaacacccaaatatctttactcaaattcccgttagcattttgccacgtttgccatatcatcttcttctccctcgcagtagataactttggccctgagactaagttgcagatgtgatgcaccttacccctaaatacatcagcatgtgcttcctaagaacaagggtgttctctttcatgaccacagtattcgctggaaaatgaattgggtttttttgaggcagggtcttgctcaccctggctggaatgcagtggtgcaatcacagcacactggtcgagcc

SEQ ID NO: 26286 - DNA, 372 bp, Homo sapiens
tgccagatatttgcacaatgtttctttaatgagaaatgtgctattttgcatttctaataacaatgtattaaaactgattttctactatatcctctactcatcagctcattctcatgcctctaatcccagcactttgggaggccaaggcgggcggatcatgaggtcaggagatcgagaccattctggctaacctggtgaaaccccgtctctactaaatatacaaaaaattagccaggtgtggtggcacacgcctgtaatcccagctactcgggaggctgaggcagaagaatcgcttgaatctggaaggtggaggttgcagaatctggtcgccactgcactccagcctgggtgacagagcaagactacatctca

SEQ ID NO: 26287 - DNA, 3636 bp, Homo sapiens
atggatccgccggcgggagccgctcgccgcctgctctgccccgcgctgctgctgctgctgctgctgctgccgccgccgctcctgccgccgccgccgccgcccgcgaacgccaggctcgccgccgccgccgaccccccaggcgggcccctggggcacggagcggagcgcatcctggcggtgcccgtgcgcactgacgcccagggccgcttggtgtcccacgtggtgtcggcagctacgtccagagcaggggtacgagcccgcagggccgccccggtccggaccccgagcttccccggaggcaacgaggaggagcctggcagtcacctcttctacaatgtcacggtctttggccgagacctgcacctgcggctgcggcccaacgcccgcctcgtggcgcccggggccactatggagtggcagggcgagaagggcaccacccgcgtggagcccctgctcgggagctgtctctacgtcggagacgtggccggcctagccgaagcctcctctgtggcgctcagcaactgcgatgggctggctggtctgatccggatggaggaggaggagttcttcatcgaacccttggagaaggggctggcggcgcaggaggctgagcaaggccgtgtgcatgtggtgtatcgccggccacccacgtcccctcctctcggggggccacaggccctggacacaggggcctccctggacagcctggacagcctcagccgcgccctgggcgtcctagaggagcacgccaacagctcgaggcggagggcacgcaggcatgctgcagacgatgactacaacatcgaggtcctgctgggcgtggatgactctgtggtgcagttccacgggaaggagcacgtacagaagtacctgctgacactcatgaacattgtcaatgaaatctaccatgacgagtccttgggtgcccacatcaacgtggtcctggtgcggatcatcctcctgagctatggaaagtccatgagcctcatcgagatcgggaacccctctcagagcctggagaatgtctgccgctgggcctacctccagcagaagccagacacgggccacgatgaataccacgatcacgccatcttcctcacacggcaggactttgggccttccggcatgcaaggctatgctcctgtcaccggcatgtgccatccggtccgcagctgcaccctgaaccatgaggacggcttctcctcagcgtttgtggtggcccatgagactggccacgtgctgggcatggagcacgacgggcagggcaaccgctgtggcgacgaggtgcggctgggcagcatcatggcgcccctggtgcaggccgccttccaccgcttccactggtcccgctgcagccagcaggagctgagccgctacctgcactcctatgactgcctgctggatgaccccttcgcccacgactggccggcgctgccccagctcccgggactgcactactccatgaacgagcaatgccgctttgacttcggcctgggctacatgatgtgcacggcgttccggacctttgacccctgcaagcagctgtggtgcagccatcctgacaacccctacttttgcaagaccaagaaggggccccccttggacgggactatgtgtgcacctggcaagcattgttttaaaggacactgcatctggctgacacctgacatcctcaaacgggacggcagctggggcgcttggagtccgtttggctcctgctcacgtacctgtggcacgggcgtgaagttcaggacccgccagtgtgacaacccacacccggccaacgggggccgcacctgctcgggccttgcctacgacttccagctctgcagccgccaggactgccccgactccctggctgacttccgcgaggagcagtgccgccagtgggacctgtacttcgagcacggcgacgcccagcaccactggctgccccacgagcaccgggatgccaaggagagatgccacctgtactgcgagtccagggagaccggggaggtggtgtccatgaagcgcatggtgcatgatgggacgcgctgctcctacaaggacgccttcagcctctgtgtgcgcggggactgcaggaaggtgggctgtgacggtgtgatcggctccagcaagcaggaagacaagtgtggcgtgtgcggaggggacaacagccactgcaaagtggtcaagggcacgttcacacggtcacccaagaagcatggttacatcaagatgtttgagatccctgcaggagccagacacctgctcattcaggaggtagacgccaccagccaccatctggccgtcaagaacctggagacaggcaagttcatcttaaatgaagagaatgacgtggatgccagttccaaaaccttcattgccatgggcgtggagtgggagtacagagacgaggacggccgggagacgctgcagaccatgggccccctccacggcaccatcaccgttctggtcatcccggtgggagacacccgggtctcactgacgtacaaatacatgatccatgaggactcactgaatgtcgatgacaacaacgtcctggaagaggactctgtggtctacgagtgggccctgaagaagtggtctccgtgctccaagccctgtggcggagggtcccagttcaccaagtatggctgccgccggaggctggaccacaagatggtacaccgtggcttctgtgccgccctctcgaagcccaaagccatccgcagagcgtgcaacccacaggaatgctcccagccagtgtgggtcacaggcgaatgggagccatgtagccagacctgtgggcggacaggcatgcaggtgcgctccgtgcgctgcattcagccgctacacgacaacaccacccgctccgtgcacgccaagcactgcaatgacgcccggcccgagagccgccgggcctgcagccgcgagctctgccctggtcgttggcgagccgggccctggtcccagtgctcagtaacctgtggcaacggcacccaggagcggccagtgccctgccgcaccgcggacgacagcttcggcatctgccaggaggagcgtcctgagacagcgaggacctgcaggcttggcccctgtccccgaaacatctcagatccctccaagaagagctacgtagttcagtggctgtcccgcccggaccccgactcgcccatccggaagatctcgtcaaagggccactgccaaggcgacaagtcaatattctgtaggatggaagtcttgtcccgctattgctccatcccaggctacaacaagctgtcctgcaagtcctgtaacctgtacaacaacctcaccaacgtggagggcaggatagagccaccgcctgggaagcacaacgacattgacgtgttcatgcctaccctcccagtgcccactgtagccatggaggtgcggccatcaccaagcacccccctggaggtccctctcaatgcctccagcaccaatgccacagaggatcacccagaaaccaatgccgtagatgaaccctacaaaatccatggcctggaagatgaagtccagccacccaacctaatccctcgacgaccgagcccctatgaaaagaccagaaaccaaagaatccaagagctcattgatgagatgcggaagaaagagatgctcggaaagttctaa

SEQ ID NO: 26288 - DNA, 1701 bp, Homo sapiens
atggatccgccggcgggagccgctcgccgcctgctctgccccgcgctgctgctgctgctgctgctgctgccgccgccgctcctgccgccgccgccgccgcccgcgaacgccaggctcgccgccgccgccgaccccccaggcgggcccctggggcacggagcggagcgcatcctggcggtgcccgtgcgcactgacgcccagggccgcttggtgtcccacgtggtgtcggcagctacgtccagagcaggggtacgagcccgcagggccgccccggtccggaccccgagcttccccggaggcaacgaggaggagcctggcagtcacctcttctacaatgtcacggtctttggccgagacctgcacctgcggctgcggcccaacgcccgcctcgtggcgcccggggccactatggagtggcagggcgagaagggcaccacccgcgtggagcccctgctcgggagctgtctctacgtcggagacgtggccggcctagccgaagcctcctctgtggcgctcagcaactgcgatgggctggctggtctgatccggatggaggaggaggagttcttcatcgaacccttggagaaggggctggcggcgcaggaggctgagcaaggccgtgtgcatgtggtgtatcgccggccacccacgtcccctcctctcggggggccacaggccctggacacaggggcctccctggacagcctggacagcctcagccgcgccctgggcgtcctagaggagcacgccaacagctcgaggcggagggcacgcaggcatgctgcagacgatgactacaacatcgaggtcctgctgggcgtggatgactctgtggtgcagttccacgggaaggagcacgtacagaagtacctgctgacactcatgaacattgtcaatgaaatctaccatgacgagtccttgggtgcccacatcaacgtggtcctggtgcggatcatcctcctgagctatggaaagtccatgagcctcatcgagatcgggaacccctctcagagcctggagaatgtctgccgctgggcctacctccagcagaagccagacacgggccacgatgaataccacgatcacgccatcttcctcacacggcaggactttgggccttccggcatgcaaggctatgctcctgtcaccggcatgtgccatccggtccgcagctgcaccctgaaccatgaggacggcttctcctcagcgtttgtggtggcccatgagactggccacgtgctgggcatggagcacgacgggcagggcaaccgctgtggcgacgaggtgcggctgggcagcatcatggcgcccctggtgcaggccgccttccaccgcttccactggtcccgctgcagccagcaggagctgagccgctacctgcactcctatgactgcctgctggatgaccccttcgcccacgactggccggcgctgccccagctcccgggactgcactactccatgaacgagcaatgccgctttgacttcggcctgggctacatgatgtgcacggcgttccggacctttgacccctgcaagcagctgtggtgcagccatcctgacaacccctacttttgcaagaccaagaaggggccccccttggacgggactatgtgtgcacctggcaagttcaggccgggcgcggtggctcatgcctgttatcccagcactttgggaggccaaggtaggtggatcgcctga

SEQ ID NO: 26289 - DNA, 488 bp, Homo sapiens
cgcaccgcctgccaccgccacccgagccgcgcgcgccgcgcctccgcacatgaggggccagagggccccccgccccccgggaaaacttataaatattcccacagatagacaaagtcaagcataaaactggagcttgagaaggaaatgaaaggccgtggcaccttcttataccctagaagaagacctccatacaggaagacttgtgtgtggggttgggacattagaatcatccacaagtcaccccaaaccttggaactgtcagggtcagaggggaaccaccatttattaagcatttgccatgtgccaggcactaacccagatgcattataaataccacgttgtttcacctgtgtgtggcatctacagaccttagatcatagctgtgagaacaacgtaagcactgccaaagttatcagctacccatatctcatgtttttgatgttatctactcttcctagaatcaaatattaaaataattttaaaaccaa

SEQ ID NO: 26290 - DNA, 603 bp, Homo sapiens
gctctgaaaaaatgacaatctgtgtctctgtcagtgaggcatccaccactcatcactgtgtggagactggaagccaggaagcatctgccatctacttcactagtgggaccagtggtcttcccaagatggcagaacattcctactcgagcctgggcctcaaggccaagatggatgctggttggacaggcctgcaagcctctgatataatgtggaccatatcagacacaggttggatactgaacatcttgggctcacttatggaaccttgggcattaggagcatgcacatttgttcatctcttgccaaagtttgacccactggttattctaaaggtctttagataaactcaaccaattgtcaaccagaaaaatttaaatctacctataagctggaagcccccgcttcaagttgccccacctttctggaccaaaccaatgtattttttaaatgtgtttgattgatgtcttatgtctccctaaaatgtataaaaccaaggtgcaccctgaccaatttgggcacgtgttctcaggacctcctgagggctctgtcatggccatggtcactcatgtttggctcagaataaatctcttcaaatgttttaca

SEQ ID NO: 26291 - DNA, 2533 bp, Homo sapiens
cacacaaattataaatactcaaggtgatggacaccccaagtatcctaacttgataattaccatatttgcgtgtaacaaaatgtcacttgtacccaatacatatgtacaaatattatgaaatgataaaaacttttagaaagtaaagtgcttggttgggaggctgaggcagatggatcacgaggtcaggagtccaagaccagcctggccaagatggtgaaaccccatctctactaaaaatacaaaaattggccaggcacggtggcaggcatctgtaatcccagctactcaagaggctgcggcaggagaatcacatgaacccggggggcggagtttgcagtgagccgagatcgtgcccctgcactctagcctgggtgacagagtgagactctgtctcaaaaaaaaaaaaaaaaaaaaagaaagaaagaaaaagaaaaaaagaaagtgaagtgcttggaacaaggcctagcacatagtaagtactatataatgtctattttgatgaggctggaaggattctatcctgctgtttggtatttgaatcagagtctgattcccgaccagaagaacagaggagggatttgagccaaaggacagagcccgtgtgccacagagttcgcagtgaaaataaagggaaaaagaaagacccctataaagccaggcttatagaaataggctcagatggggtctagtggactttgatgtgtgtgtaggaaaatattaaggtgggatgtgtggatcagtgtcctagcacattcccgcagggtgtaagcctggcactatcatacctctggtacgtacagaatacatcatacagaaaattatgggaaccactgagcagtgaggccatgggggatcccctgctgagaaaatcctgtgtgcccagctctgagctagccctgctgtatatgatttcattttatttaccgtaagttaaatttggcaattttatccccactttacagatgggaacactgaagtttggagaagttaacacattgtttagggttatggttttcagtctatttttctcttttctccccctgtatcttctttctccttatctgtctctattgttattggagtatgaggtgagcctagtctcaatcttttgtccacctgctcctccaataaatgacttcagagagagctgtaacctcattcatgtccccagttttctccttttcccttgacctggatcaccgggggtgcaaatgaggagatacaagggtgatggaagtcttaatgccaatttcacattattccaggagatgactacacactctaatcccttctctctggccttcatctttattgcaggtggtgaaggcatttgtggtcctggcctcgcagttcctgtcccatgacccagaacagctcaccaaggagctgcagcagcatgtgaagtcagtgacagccccatacaagtacccaagaaagatagagtttgtcttgaacctgcccaagactgtcacagggaaaattcaacgaaccaaacttcgagacaaggagtggaagatgtccggaaaagcccgtgcgcagtgagacatctaagagacattcatttggattcccctcttctttctctttcttttccctttgggcccttggccttcctatgatgatatgagattctttatggaagaacatgaatataagttttgtcttgccttggttattagcacaaaactttaccatgttagatgttgaaagaagaaagggaaggaatgagagagagtgaaaaggagagggtaacagaaaaaaaggaaagaaaagtaagtcagggaaatattaaaactgcaagggaaagcaattgaaaaagaaataaagtagggaaagaaggagagaggaagcaagggaaggaggaagaaaggaaagaggagatgaaagggggagaaaagatagaagaaaaataattgaagggagaatcagaaaaataaagagaagaaaggaaagaaataaagagagaaagagaaagaagaaagagcaaaagaacacaagaaagaaagagagggagaaagagagggagaaagggagagaaaaaaattgtaaaaataaaaatagtaaaagaaactgataaagaaaagtaatggaagacaggaagaaaagaagagaaggaagtaaagaggaaaacttataaatattcccacagatagacaaagtcaagcataaaactggagcttgagaaggaaatgaaaggccgtggcaccttcttataccctagaagaagacctccatacaggaagacttgtgtgtggggttgggacattagaatcatccacaagtcaccccaaaccttggaactgtcagggtcagaggggaaccaccatttattaagcatttgccatgtgccaggcactaacccagatgcattataaataccacgttgtttcacctgtgtgtggcatctacagaccttagatcatagctgtgagaacaacgtaagcactgccaaagttatcagctacccatatctcatgtttttgatgttatctactcttcctagaatcaaatattaaaataattttaaaaccaa

SEQ ID NO: 26292 - DNA, 2507 bp, Homo sapiens
gctctgaaaaaatgacaatctgtgtctctgtcagtgaggcatccaccactcatcactgtgtggagactggaagccaggaagcatctgccatctacttcactagtgggaccagtggtcttcccaagatggcagaacattcctactcgagcctgggcctcaaggccaagatggatgctggttggacaggcctgcaagcctctgatataatgtggaccatatcagacacaggttggatactgaacatcttgggctcacttatggaaccttgggcattaggagcatgcacatttgttcatctcttgccaaagtttgacccactggttattctaaagacactctccagttatccaatcaagagtatgatgggtgcccccattgtttaccggatgttgctacagcaggatctttccagttacaagttcccccatctacagaactgcgtcactgtaggggagtcccttcttccagaaactctggagaactggagggcccagacaggactggacatccgagaatcctatggccagacagaaacgggattaacttgcatggtttccaagacaatgaaaatcaaaccaggatacatgggaacggctgcttcctgttatgatgtacaggttatagatgataagggcaacgtcctgccccccggcacagaaggagacattggcatcagggtcaaacccatcaggcctataggcatcttctctggctatgtggaaaatcccgacaagacagcagccaacattcgaggagacttttggctccttggagaccggggaatcaaagatgaagatgggtatttccagtttatgggacgggcagatgatatcattaactccagcgggtaccggattggaccctcggaggtagagaatgcactgatgaagcaccctgctgtggttgagacggctgtgatcagcagcccagaccccgtccgaggagaggtggtgaaggcatttgtggtcctggcctcgcagttcctgtcccatgacccagaacagctcaccaaggagctgcagcagcatgtgaagtcagtgacagccccatacaagtacccaagaaagatagagtttgtcttgaacctgcccaagactgtcacagggaaaattcaacgaaccaaacttcgagacaaggagtggaagatgtccggaaaagcccgtgcgcagtgagacatctaagagacattcatttggattcccctcttctttctctttcttttccctttgggcccttggccttcctatgatgatatgagattctttatggaagaacatgaatataagttttgtcttgccttggttattagcacaaaactttaccatgttagatgttgaaagaagaaagggaaggaatgagagagagtgaaaaggagagggtaacagaaaaaaaggaaagaaaagtaagtcagggaaatattaaaactgcaagggaaagcaattgaaaaagaaataaagtagggaaagaaggagagaggaagcaagggaaggaggaagaaaggaaagaggagatgaaagggggagaaaagatagaagaaaaataattgaagggagaatcagaaaaataaagagaagaaaggaaagaaataaagagagaaagagaaagaagaaagagcaaaagaacacaagaaagaaagagagggagaaagagagggagaaagggagagaaaaaaattgtaaaaataaaaatagtaaaagaaactgataaagaaaagtaatggaagacaggaagaaaagaagagaaggaagtaaagaggaaaacttataaatattcccacagatagacaaagtcaagcataaaactggagcttgagaaggaaatgaaaggccgtggcaccttcttataccctagaagaagacctccatacaggaagacttgtgtgtggggttgggacattagaatcatccacaagtcaccccaaaccttggaactgtcagggtcagaggggaaccaccatttattaagcatttgccatgtgccaggcactaacccagatgcattataaataccacgttgtttcacctgtgtgtggcatctacagaccttagatcatagctgtgagaacaacgtaagcactgccaaagttatcagctacccatatctcatgtttttgatgttatctactcttcctagaatcaaatattaaaataattttaaaaccaaaaaaaaaaatacacaaaacaaaaaaacaaattttttggggccccttgggccccaaaaaatcttttaaaaaaacattgttggcgaccgggagccccacaaagaggatacagttgaaccaagtggtggacatgagggcgtgtccccggaggaggaaagcccagcgggacaaggaccaacaggggcgctgagagaagcgccgcgcccaatatgtaaaaacaaccccgcggggggaaaaaacggagagcgtcgtagaaaaaactcaccggaagagatctcgaggagccactaagacgagaggctacacaggaggggagccacaaagaggagctcgaaaagaataagcc

SEQ ID NO: 26293 - DNA, 2109 bp, Homo sapiens
gctctgaaaaaatgacaatctgtgtctctgtcagtgaggcatccaccactcatcactgtgtggagactggaagccaggaagcatctgccatctacttcactagtgggaccagtggtcttcccaagatggcagaacattcctactcgagcctgggcctcaaggccaagatggatgctggttggacaggcctgcaagcctctgatataatgtggaccatatcagacacaggttggatactgaacatcttgggctcacttatggaaccttgggcattaggagcatgcacatttgttcatctcttgccaaagtttgacccactggttattctaaagacactctccagttatccaatcaagagtatgatgggtgcccccattgtttaccggatgttgctacagcaggatctttccagttacaagttcccccatctacagaactgcgtcactgtaggggagtcccttcttccagaaactctggagaactggagggcccagacaggactggacatccgagaatcctatggccagacagaaacgggattaacttgcatggtttccaagacaatgaaaatcaaaccaggatacatgggaacggctgcttcctgttatgatgtacaggttatagatgataagggcaacgtcctgccccccggcacagaaggagacattggcatcagggtcaaacccatcaggcctataggcatcttctctggctatgtggaaaatcccgacaagacagcagccaacattcgaggagacttttggctccttggagaccggggaatcaaagatgaagatgggtatttccagtttatgggacgggcagatgatatcattaactccagcgggtaccggattggaccctcggaggtagagaatgcactgatgaagcaccctgctgtggttgagacggctgtgatcagcagcccagaccccgtccgaggagaggtggtgaaggcatttgtggtcctggcctcgcagttcctgtcccatgacccagaacagctcaccaaggagctgcagcagcatgtgaagtcagtgacagccccatacaagtacccaagaaagatagagtttgtcttgaacctgcccaagactgtcacagggaaaattcaacgaaccaaacttcgagacaaggagtggaagatgtccggaaaagcccgtgcgcagtgagacatctaagagacattcatttggattcccctcttctttctctttcttttccctttgggcccttggccttcctatgatgatatgagattctttatggaagaacatgaatataagttttgtcttgccttggttattagcacaaaactttaccatgttagatgttgaaagaagaaagggaaggaatgagagagagtgaaaaggagagggtaacagaaaaaaaggaaagaaaagtaagtcagggaaatattaaaactgcaagggaaagcaattgaaaaagaaataaagtagggaaagaaggagagaggaagcaagggaaggaggaagaaaggaaagaggagatgaaagggggagaaaagatagaagaaaaataattgaagggagaatcagaaaaataaagagaagaaaggaaagaaataaagagagaaagagaaagaagaaagagcaaaagaacacaagaaagaaagagagggagaaagagagggagaaagggagagaaaaaaattgtaaaaataaaaatagtaaaagaaactgataaagaaaagtaatggaagacaggaagaaaagaagagaaggaagtaaagaggaaaacttataaatattcccacagatagacaaagtcaagcataagaagacctccatacaggaagacttgtgtgtggggttgggacattagaatcatccacaagtcaccccaaaccttggaactgtcagggtcagaggggaaccaccatttattaagcatttgccatgtgccaggcactaacccagatgcattataaataccacgttgtttcacctgtgtgtggcatctacagaccttagatcatagctgtgagaacaacgtaagcactgccaaagttatcagctacccatatctcatgtttttgatgttatctactcttcctagaatcaaatattaaaataattttaaaaccaa

SEQ ID NO: 26294 - DNA, 1418 bp, Homo sapiens
taaagccagatgattggcagaggaggagctggggtccagagagtctgatgtcaaggctcagctggctgactgttgtgccatgtgtgtctgttatgctgctcctcctctgtctgaaaatatgtcaaatacctttatgcccaattctagccatcctcttattgtcctcatcccagagcaccttctgaagcttcttattgcacagggcggctaccctgaagtggctccagcctgaagaacttcccctcaccctacagcagttctgaaaaatgcaacccactgtcatcacagatcacccaccctggactgatttgtttttcaacagatagagtttgtcttgaacctgcccaagactgtcacagggaaaattcaacgaaccaaacttcgagacaaggagtggaagatgtccggaaaagcccgtgcgcagtgagacatctaagagacattcatttggattcccctcttctttctctttcttttccctttgggcccttggccttcctatgatgatatgagattctttatggaagaacatgaatataagttttgtcttgccttggttattagcacaaaactttaccatgttagatgttgaaagaagaaagggaaggaatgagagagagtgaaaaggagagggtaacagaaaaaaaggaaagaaaagtaagtcagggaaatattaaaactgcaagggaaagcaattgaaaaagaaataaagtagggaaagaaggagagaggaagcaagggaaggaggaagaaaggaaagaggagatgaaagggggagaaaagatagaagaaaaataattgaagggagaatcagaaaaataaagagaagaaaggaaagaaataaagagagaaagagaaagaagaaagagcaaaagaacacaagaaagaaagagagggagaaagagagggagaaagggagagaaaaaaattgtaaaaataaaaatagtaaaagaaactgataaagaaaagtaatggaagacaggaagaaaagaagagaaggaagtaaagaggaaaacttataaatattcccacagatagacaaagtcaagcataaaactggagcttgagaaggaaatgaaaggccgtggcaccttcttataccctagaagaagacctccatacaggaagacttgtgtgtggggttgggacattagaatcatccacaagtcaccccaaaccttggaactgtcagggtcagaggggaaccaccatttattaagcatttgccatgtgccaggcactaacccagatgcattataaataccacgttgtttcacctgtgtgtggcatctacagaccttagatcatagctgtgagaacaacgtaagcactgccaaagttatcagctacccatatctcatgtttttgatgttatctactcttcctagaatcaaatattaaaataattttaaaaccaa

SEQ ID NO: 26295 - DNA, 1973 bp, Homo sapiens
  misc_feature (1608)..(1608): n is a, c, g, or t
gctctgaaaaaatgacaatctgtgtctctgtcagtgaggcatccaccactcatcactgtgtggagactggaagccaggaagcatctgccatctacttcactagtgggaccagtggtcttcccaagatggcagaacattcctactcgagcctgggcctcaaggccaagatggatgctggttggacaggcctgcaagcctctgatataatgtggaccatatcagacacaggttggatactgaacatcttgggctcacttatggaaccttgggcattaggagcatgcacatttgttcatctcttgccaaagtttgacccactggttattctaaagacactctccagttatccaatcaagagtatgatgggtgcccccattgtttaccggatgttgctacagcaggatctttccagttacaagttcccccatctacagaactgcgtcactgtaggggagtcccttcttccagaaactctggagaactggagggcccagacaggactggacatccgagaatcctatggccagacagaaacgggattaacttgcatggtttccaagacaatgaaaatcaaaccaggatacatgggaacggctgcttcctgttatgatgtacaggttatagatgataagggcaacgtcctgccccccggcacagaaggagacattggcatcagggtcaaacccatcaggcctataggcatcttctctggctatgtggaaaatcccgacaagacagcagccaacattcgaggagacttttggctccttggagaccggggaatcaaagatgaagatgggtatttccagtttatgggacgggcagatgatatcattaactccagcgggtaccggattggaccctcggaggtagagaatgcactgatgaagcaccctgctgtggttgagacggctgtgatcagcagcccagaccccgtccgaggagaggtggtgaaggcatttgtggtcctggcctcgcagttcctgtcccatgacccagaacagctcaccaaggagctgcagcagcatgtgaagtcagtgacagccccatacaagtacccaagaaagatagagtttgtcttgaacctgcccaagactgtcacagggaaaattcaacgaaccaaacttcgagacaaggagtggaagatgtccggaaaagcccgtgcgcagtgagacatctaagagacattcatttggattcccctcttctttctctttcttttccctttgggcccttggccttcctatgatgatatgagattctttatggaagaacatgaatataagttttgtcttgccttggttattagcacaaaactttaccatgttagatgttgaaagaagaaagggaaggaatgagagagagtgaaaaggagagggtaacagaaaaaaaggaaagaaaagtaagtcagggaaatattaaaactgcaagggaaagcaattgaaaaagaaataaagtagggaaagaaggagagaggaagcaagggaaggaggaagaaaggaaagaggagatgaaagggggagaaaagatagaagaaaaataattgaagggagaatcagaaaaataaagagaagaaaggaaagaaataaaaaaaaaaaaaaaacttgnggccttgtatccagaaggtccgaagctctgtgggacctctctggtggcccgaggggtgaggacagggagtaagaaggtcaggcggattctgtgcccacagagcaggagaggtgccagatatgtccatttaccatgttgcttgggccccgtagcccacgggtctggggatgccataatagcccccaccgttgggcctagggctgcagcaggtactcggcctctgggaggcttacctcgcccgcccttgggcccccacattagacctccctttctgcagcctaacttggaaccttggcctgcggattttggggccctgttgacggggctgggatgaccccgggggggggttcattccagaccccctt

SEQ ID NO: 26296 - DNA, 1624 bp, Homo sapiens
cacacaaattataaatactcaaggtgatggacaccccaagtatcctaacttgataattaccatatttgcgtgtaacaaaatgtcacttgtacccaatacatatgtacaaatattatgaaatgataaaaacttttagaaagtaaagtgcttggttgggaggctgaggcagatggatcacgaggtcaggagtccaagaccagcctggccaagatggtgaaaccccatctctactaaaaatacaaaaattggccaggcacggtggcaggcatctgtaatcccagctactcaagaggctgcggcaggagaatcacatgaacccggggggcggagtttgcagtgagccgagatcgtgcccctgcactctagcctgggtgacagagtgagactctgtctcaaaaaaaaaaaaaaaaaaaaagaaagaaagaaaaagaaaaaaagaaagtgaagtgcttggaacaaggcctagcacatagtaagtactatataatgtctattttgatgaggctggaaggattctatcctgctgtttggtatttgaatcagagtctgattcccgaccagaagaacagaggagggatttgagccaaaggacagagcccgtgtgccacagagttcgcagtgaaaataaagggaaaaagaaagacccctataaagccaggcttatagaaataggctcagatggggtctagtggactttgatgtgtgtgtaggaaaatattaaggtgggatgtgtggatcagtgtcctagcacattcccgcagggtgtaagcctggcactatcatacctctggtacgtacagaatacatcatacagaaaattatgggaaccactgagcagtgaggccatgggggatcccctgctgagaaaatcctgtgtgcccagctctgagctagccctgctgtatatgatttcattttatttaccgtaagttaaatttggcaattttatccccactttacagatgggaacactgaagtttggagaaaagatagaagaaaaataattgaagggagaatcagaaaaataaagagaagaaaggaaagaaataaagagagaaagagaaagaagaaagagcaaaagaacacaagaaagaaagagagggagaaagagagggagaaagggagagaaaaaaattgtaaaaataaaaatagtaaaagaaactgataaagaaaagtaatggaagacaggaagaaaagaagagaaggaagtaaagaggaaaacttataaatattcccacagatagacaaagtcaagcataaaactggagcttgagaaggaaatgaaaggccgtggcaccttcttataccctagaagaagacctccatacaggaagacttgtgtgtggggttgggacattagaatcatccacaagtcaccccaaaccttggaactgtcagggtcagaggggaaccaccatttattaagcatttgccatgtgccaggcactaacccagatgcattataaataccacgttgtttcacctgtgtgtggcatctacagaccttagatcatagctgtgagaacaacgtaagcactgccaaagttatcagctacccatatctcatgtttttgatgttatctactcttcctagaatcaaatattaaaataattttaaaaccaa

SEQ ID NO: 26297 - DNA, 1134 bp, Homo sapiens
gctctgaaaaaatgacaatctgtgtctctgtcagtgaggcatccaccactcatcactgtgtggagactggaagccaggaagcatctgccatctacttcactagtgggaccagtggtcttcccaagatggcagaacattcctactcgagcctgggcctcaaggccaagatggatgctggttggacaggcctgcaagcctctgatataatgtggaccatatcagacacaggttggatactgaacatcttgggctcacttatggaaccttgggcattaggagcatgcacatttgttcatctcttgccaaagtttgacccactggttattctaaagacactctccagttatccaatcaagagtatgatgggtgcccccattgtttaccggatgttgctacagcaggatctttccagttacaagttcccccatctacagaactgcgtcactgtaggggagtcccttcttccagaaactctggagaactggagggcccagacaggactggacatccgagaatcctatggccagacagaaacgggattaacttgcatggtttccaagacaatgaaaatcaaaccaggatacatgggaacggctgcttcctgttatgatgtacaggttatagatgataagggcaacgtcctgccccccggcacagaaggagacattggcatcagggtcaaacccatcaggcctataggcatcttctctggctatgtggtatcatccccatgatctatgccgttgatcttctttagagccatgccaggcactttacgttgagacttcaccatctagttggaggaatccctatcttcagatcttgggaaggtaaagacagataatccttgaatctggccacctcacttgacaggtgaggatggtggagccagagattacaagacttgctcaagctcacaaccattagaaagtggacagagaagaccccaagggcatgccttctgatccctgagagaattgattaataaactaaataaataataaatcaaataataatagtttctaccatttattgaatgcataccatgaggcaagcattgtcctataaacacatttaatctttaaactttaaactcatttaaactttaaactcgtttaatcctcccagccaccc

SEQ ID NO: 26298 - DNA, 763 bp, Homo sapiens
gctctgaaaaaatgacaatctgtgtctctgtcagtgaggcatccaccactcatcactgtgtggagactggaagccaggaagcatctgccatctacttcactagtgggaccagtggtcttcccaagatggcagaacattcctactcgagcctgggcctcaaggccaagatggatgctggttggacaggcctgcaagcctctgatataatgtggaccatatcagacacaggttggatactgaacatcttgggctcacttatggaaccttgggcattaggagcatgcacatttgttcatctcttgccaaagtttgacccactggttattctaaagacactctccagttatccaatcaagagtatgatgggtgcccccattgtttaccggatgttgctacagcaggatctttccagttacaagttcccccatctacagaactgcgtcactgtaggggagtcccttcttccagaaactctggagaactggagggcccagacaggactggacatccgagaatcctatggccagacagaaacggtacctgttcccaggggaaccatgggctgggtgcactttttgggcttcaaaattctctttgacaataaaaattgttagccaccatgtatcattcatctattcgagaagtatttattgagcctctatgaagggacaggtactgagtattgagaaattccgcacagaacaaaaaaggcaaaggtcctgttttctgggagattacattccagtgagaattggggagagag

SEQ ID NO: 26299 - DNA, 447 bp, Homo sapiens
gatgttgctacagcaggatctttccaggtgatggggctttgaggattggtaagagagtctggccccatccccctgactccctcacatacattcatgcctatctatctgaatctctcgcacacagagagccccatgaagccatttgcatcatcaaagcacccagaaacccagtctagtcctgagtggactttggttccagggaggctgagggcaaacatttatttctcttcttcagttacaagttcccccatctacagaactgcgtcactgtaggggagtcccttcttccagaaactctggagaactggagggcccagacaggactggacatccgagaatcctatggccagacagaaacggtacctgttcccaggggaaccatgggctgggtgcactttttgggcttcaaaattctctttgacaataaaaattgttagccaccatgta

SEQ ID NO: 26300 - DNA, 2163 bp, Homo sapiens
gctctgaaaaaatgacaatctgtgtctctgtcagtgaggcatccaccactcatcactgtgtggagactggaagccaggaagcatctgccatctacttcactagtgggaccagtggtcttcccaagatggcagaacattcctactcgagcctgggcctcaaggccaagatggatgctggttggacaggcctgcaagcctctgatataatgtggaccatatcagacacaggttggatactgaacatcttgggctcacttatggaaccttgggcattaggagcatgcacatttgttcatctcttgccaaagtttgacccactggttattctaaagacactctccagttatccaatcaagagtatgatgggtgcccccattgtttaccggatgttgctacagcaggatctttccagttacaagttcccccatctacagaactgcgtcactgtaggggagtcccttcttccagaaactctggagaactggagggcccagacaggactggacatccgagaatcctatggccagacagaaacgggattaacttgcatggtttccaagacaatgaaaatcaaaccaggatacatgggaacggctgcttcctgttatgatgtacaggttatagatgataagggcaacgtcctgccccccggcacagaaggagacattggcatcagggtcaaacccatcaggcctataggcatcttctctggctatgtggaaaatcccgacaagacagcagccaacattcgaggagacttttggctccttggagaccggggaatcaaagatgaagatgggtatttccagtttatgggacgggcagatgatatcattaactccagcgggtaccggattggaccctcggaggtagagaatgcactgatgaagcaccctgctgtggttgagacggctgtgatcagcagcccagaccccgtccgaggagaggtggtgaaggcatttgtggtcctggcctcgcagttcctgtcccatgacccagaacagctcaccaaggagctgcagcagcatgtgaagtcagtgacagccccatacaagtacccaagaaagatagagtttgtcttgaacctgcccaagactgtcacagggaaaattcaacgaaccaaacttcgagacaaggagtggaagatgtccggaaaagcccgtgcgcagtgagacatctaagagacattcatttggattcccctcttctttctctttcttttccctttgggcccttggccttcctatgatgatatgagattctttatggaagaacatgaatataagttttgtcttgccttggttattagcacaaaactttaccatgttagatgttgaaagaagaaagggaaggaatgagagagagtgaaaaggagagggtaacagaaaaaaaggaaagaaaagtaagtcagggaaatattaaaactgcaagggaaagcaattgaaaaagaaataaagtagggaaagaaggagagaggaagcaagggaaggaggaagaaaggaaagaggagatgaaagggggagaaaagatagaagaaaaataattgaagggagaatcagaaaaataaagagaagaaaggaaagaaataaagagagaaagagaaagaagaaagagcaaaagaacacaagaaagaaagagagggagaaagagagggagaaagggagagaaaaaaattgtaaaaataaaaatagtaaaagaaactgataaagaaaagtaatggaagacaggaagaaaagaagagaaggaagtaaagaggaaaacttataaatattcccacagatagacaaagtcaagcataaaactggagcttgagaaggaaatgaaaggccgtggcaccttcttataccctagaagaagacctccatacaggaagacttgtgtgtggggttgggacattagaatcatccacaagtcaccccaaaccttggaactgtcagggtcagaggggaaccaccatttattaagcatttgccatgtgccaggcactaacccagatgcattataaataccacgttgtttcacctgtgtgtggcatctacagaccttagatcatagctgtgagaacaacgtaagcactgccaaagttatcagctacccatatctcatgtttttgatgttatctactcttcctagaatcaaatattaaaataattttaaaaccaa

SEQ ID NO: 26301 - DNA, 1803 bp, Homo sapiens
gctctgaaaaaatgacaatctgtgtctctgtcagtgaggcatccaccactcatcactgtgtggagactggaagccaggaagcatctgccatctacttcactagtgggaccagtggtcttcccaagatggcagaacattcctactcgagcctgggcctcaaggccaagatggatgctggttggacaggcctgcaagcctctgatataatgtggaccatatcagacacaggttggatactgaacatcttgggctcacttatggaaccttgggcattaggagcatgcacatttgttcatctcttgccaaagtttgacccactggttattctaaagacactctccagttatccaatcaagagtatgatgggtgcccccattgtttaccggatgttgctacagcaggatctttccagttacaagttcccccatctacagaactgcgtcactgtaggggagtcccttcttccagaaactctggagaactggagggcccagacaggactggacatccgagaatcctatggccagacagaaacgggattaacttgcatggtttccaagacaatgaaaatcaaaccaggatacatgggaacggctgcttcctgttatgatgtacaggttatagatgataagggcaacgtcctgccccccggcacagaaggagacattggcatcagggtcaaacccatcaggcctataggcatcttctctggctatgtggaaaatcccgacaagacagcagccaacattcgaggagacttttggctccttggagaccggggaatcaaagatgaagatgggtatttccagtttatgggacgggcagatgatatcattaactccagcgggtaccggattggaccctcggaggtagagaatgcactgatgaagcaccctgctgtggttgagacggctgtgatcagcagcccagaccccgtccgaggagaggtggtgaaggcatttgtggtcctggcctcgcagttcctgtcccatgacccagaacagctcaccaaggagctgcagcagcatgtgaagtcagtgacagccccatacaagtacccaagaaagatagagtttgtcttgaacctgcccaagactgtcacagggaaaattcaacgaaccaaacttcgagacaaggagtggaagatgtccggaaaagcccgtgcgcagtgagacatctaagagacattcatttggattcccctcttctttctctttcttttccctttgggcccttggccttcctatgatgatatgagattctttatggaagaacatgaatataagttttgtcttgccttggttattagcacaaaactttaccatgttagatgttgaaagaagaaagggaaggaatgagagagagtgaaaaggagagggtaacagaaaaaaaggaaagaaaagtaagtcagggaaatattaaaactgcaagggaaagcaattgaaaaagaaataaagtagggaaagaaggagagaggaagcaagggaaggaggaagaaaggaaagaggagatgaaagggggagaaaagatagaagaaaaataattgaagggagaatcagaaaaataaagagaagaaaggaaagaaataaagagagaaagagaaagaagaaagagcaaaagaacacaagaaagaaagagagggagaaagagagggagaaagggagagaaaaaaattgtaaaaataaaaatagtaaaagaaactgataaagaaaagtaatggaagacaggaagaaaagatagaagaaaaataattgaagggagaatcagaaaaataaagagaagaaaggaaagaaataaagagag

SEQ ID NO: 26302 - DNA, 1468 bp, Homo sapiens
gctctgaaaaaatgacaatctgtgtctctgtcagtgaggcatccaccactcatcactgtgtggagactggaagccaggaagcatctgccatctacttcactagtgggaccagtggtcttcccaagatggcagaacattcctactcgagcctgggcctcaaggccaagatggatgctggttggacaggcctgcaagcctctgatataatgtggaccatatcagacacaggttggatactgaacatcttgggctcacttatggaaccttgggcattaggagcatgcacatttgttcatctcttgccaaagtttgacccactggttattctaaagacactctccagttatccaatcaagagtatgatgggtgcccccattgtttaccggatgttgctacagcaggatctttccagttacaagttcccccatctacagaactgcgtcactgtaggggagtcccttcttccagaaactctggagaactggagggcccagacaggactggacatccgagaatcctatggccagacagaaacgggattaacttgcatggtttccaagacaatgaaaatcaaaccaggatacatgggaacggctgcttcctgttatgatgtacaggttatagatgataagggcaacgtcctgccccccggcacagaaggagacattggcatcagggtcaaacccatcaggcctataggcatcttctctggctatgtggtgagaaactgtgctcctcctcctctgttccccagtgaggatgggagcactaaacgggatgagggaggccaaatgttctgaaacttccaagaggcactagatgtggagacaaagactgtccagttttcaagaatgtatgctttgccagtggaagaaaagtggctattcagccttgccatcctcagcctatcactgtgatctcattggaagacttatttttcttcagttagcccttagactcctcaagaactctctgtttcatgcccaaaatattattgaccctgaactatacacagcaccattcccccaagggctgcctttccctctcccctaggtatcatccccatgatctatgccgttgatcttctttagagccatgccaggcactttacgttgagacttcaccatctagttggaggaatccctatcttcagatcttgggaaggtaaagacagataatccttgaatctggccacctcacttgacaggtgaggatggtggagccagagattacaagacttgctcaagctcacaaccattagaaagtggacagagaagaccccaagggcatgccttctgatccctgagagaattgattaataaactaaataaataataaatcaaataataatagtttctaccatttattgaatgcataccatgaggcaagcattgtcctataaacacatttaatctttaaactttaaactcatttaaactttaaactcgtttaatcctcccagccaccc

SEQ ID NO: 26303 - DNA, 815 bp, Homo sapiens
gcggatggcttcaggcgcatcacgacaccggcgcgtcacgcgacccgccctacgggcacctcccgcgcttttcttagcgccgcagacggtggccgagcgggggaccgggaagcatggcccgggggtcggcggttgcctgggcggcgctcgggccgttgttgtggggctgcgcgctggggctgcagggcgggatgctgtacccccaggagagcccgtcgcgggagtgcaaggagctggacggcctctggagcttccgcgccgacttctctgacaaccgacgccggggcttcgaggagcagtggtaccggcggccgctgtgggagtcaggccccaccgtggacatgccagttccctccagcttcaatgacatcagccaggactggcgtctgcggcattttgtcggctgggtgtggtacgaacgggaggtgatcctgccggagcgatggacccaggacctgcgcacaagagtggtgctgaggattggcagtgcccattcctatgccatcgtgctccgtatgtggatgtgatctgtttgaacagctactactcttggtatcacgactacgggcacctggagttgattcagctgcagctggccacccagtttgagaactggtataagaagtatcagaagcccattattcagagcgagtatggagcagaaacgattgcaggttttcaccaggatccacctctgatgttcactgaaggagtaccagaaaagtctgctagagcaggtaccatctgggtctggatcaaaaaccgccggaaaatatgtggttggggagctcatttggaatttgccgatttcatgc

SEQ ID NO: 26304 - DNA, 860 bp, Homo sapiens
  misc_feature (777)..(777): n is a, c, g, or t
gcgatctcggggcagggccgggaggcgcccgaaagcccggcggtgggagtaggggagcccgggccccccgcagacttcttcccctgggcgtctccgagctggggcccgcaggaggttaaagtcaggccccaccgtggacatgccagttccctccagcttcaatgacatcagccaggactggcgtctgcggcattttgtcggctgggtgtggtacgaacgggaggtgatcctgccggagcgatggacccaggacctgcgcacaagagtggtgctgaggattggcagtgcccattcctatgccatcgtgtgggtgaatggggtcgacacgctagagcatgaggggggctacctccccttcgaggccgacatcagcaacctggtccaggtatcccaagggttactttgtccagaacacatattttgactttttcaactacgctggactgcagcggtctgtacttctgtacacgacacccaccacctacatcgatgacatcaccgtcaccaccagcgtggagcaagacagtgggctggtgaattaccagatctctgtcaagggcagtaacctgttcaagttggaagtgcgtcttttggatgcagaaaacaaagtcgtggcgaatgggactgggacccagggccaacttaaggtgccaggtgtcagcctctggtggccgtacctgatgcacgaacgccctgcctatctgtattcatcggaggtgcagctgactgccaagacgtcactggggcctgtgtctgacttctacacactccctgtgngatccggacttgtgctgtcaccaagaagcagttcctcatcaattgggaaaccttctatttttcccgtgtcccaaagcatgagg

SEQ ID NO: 26305 - DNA, 422 bp, Homo sapiens
gcgatctcggggcagggccgggaggcgcccgaaagcccggcggtgggagtaggggagcccgggccccccgcagacttcttcccctgggcgtctccgagctggggcccgcaggaggttaaaggtcaacgggcttgggggcgccggcttgggggacgggggaacaggagcaccctggagggccggggcggattaggcaggaggagaaaaggctcttgccgagccctttcccgaggtaaaggctgagtctgtgcagtatccttcctttcaatatttatttttaatttttaaaaatttttttgagactgggtttgcacctgtttcccaggctggggcggagtggcgccagcctaacttctgagctcaagcgattctcccgccccagccttgcaatttagggggtgccaacacgcctggctaattga

SEQ ID NO: 26306 - DNA, 1168 bp, Homo sapiens
  misc_feature (1085)..(1085): n is a, c, g, or t
gcggatggcttcaggcgcatcacgacaccggcgcgtcacgcgacccgccctacgggcacctcccgcgcttttcttagcgccgcagacggtggccgagcgggggaccgggaagcatggcccgggggtcggcggttgcctgggcggcgctcgggccgttgttgtggggctgcgcgctggggctgcagggcgggatgctgtacccccaggagagcccgtcgcgggagtgcaaggagctggacggcctctggagcttccgcgccgacttctctgacaaccgacgccggggcttcgaggagcagtggtaccggcggccgctgtgggagtcaggccccaccgtggacatgccagttccctccagcttcaatgacatcagccaggactggcgtctgcggcattttgtcggctgggtgtggtacgaacgggaggtgatcctgccggagcgatggacccaggacctgcgcacaagagtggtgctgaggattggcagtgcccattcctatgccatcgtgtgggtgaatggggtcgacacgctagagcatgaggggggctacctccccttcgaggccgacatcagcaacctggtccaggtggggcccctgcctcccggctccgaatcactatcgccatcaacaacacactcacccccaccaccctgccaccagggaccatccaatacctgactgacacctccaagtatcccaagggttactttgtccagaacacatattttgactttttcaactacgctggactgcagcggtctgtacttctgtacacgacacccaccacctacatcgatgacatcaccgtcaccaccagcgtggagcaagacagtgggctggtgaattaccagatctctgtcaagggcagtaacctgttcaagttggaagtgcgtcttttggatgcagaaaacaaagtcgtggcgaatgggactgggacccagggccaacttaaggtgccaggtgtcagcctctggtggccgtacctgatgcacgaacgccctgcctatctgtattcatcggaggtgcagctgactgccaagacgtcactggggcctgtgtctgacttctacacactccctgtgngatccggacttgtgctgtcaccaagaagcagttcctcatcaattgggaaaccttctatttttcccgtgtcccaaagcatgagg

SEQ ID NO: 26307 - DNA, 984 bp, Homo sapiens
  misc_feature (901)..(901): n is a, c, g, or t
gcggatggcttcaggcgcatcacgacaccggcgcgtcacgcgacccgccctacgggcacctcccgcgcttttcttagcgccgcagacggtggccgagcgggggaccgggaagcatggcccgggggtcggcggttgcctgggcggcgctcgggccgttgttgtggggctgcgcgctggggctgcagggcgggatgctgtacccccaggagagcccgtcgcgggagtgcaaggagctggacggcctctggagcttccgcgccgacttctctgacaaccgacgccggggcttcgaggagcagtggtaccggcggccgctgtgggagtcaggccccaccgtggacatgccagttccctccagcttcaatgacatcagccaggactggcgtctgcggcattttgtcggctgggtgtggtacgaacgggaggtgatcctgccggagcgatggacccaggacctgcgcacaagagtggtgctgaggattggcagtgcccattcctatgccatcgtggtatcccaagggttactttgtccagaacacatattttgactttttcaactacgctggactgcagcggtctgtacttctgtacacgacacccaccacctacatcgatgacatcaccgtcaccaccagcgtggagcaagacagtgggctggtgaattaccagatctctgtcaagggcagtaacctgttcaagttggaagtgcgtcttttggatgcagaaaacaaagtcgtggcgaatgggactgggacccagggccaacttaaggtgccaggtgtcagcctctggtggccgtacctgatgcacgaacgccctgcctatctgtattcatcggaggtgcagctgactgccaagacgtcactggggcctgtgtctgacttctacacactccctgtgngatccggacttgtgctgtcaccaagaagcagttcctcatcaattgggaaaccttctatttttcccgtgtcccaaagcatgagg

SEQ ID NO: 26308 - DNA, 1062 bp, Homo sapiens
  misc_feature (979)..(979): n is a, c, g, or t
gcggatggcttcaggcgcatcacgacaccggcgcgtcacgcgacccgccctacgggcacctcccgcgcttttcttagcgccgcagacggtggccgagcgggggaccgggaagcatggcccgggggtcggcggttgcctgggcggcgctcgggccgttgttgtggggctgcgcgctggggctgcagggcgggatgctgtacccccaggagagcccgtcgcgggagtgcaaggagctggacggcctctggagcttccgcgccgacttctctgacaaccgacgccggggcttcgaggagcagtggtaccggcggccgctgtgggagtcaggccccaccgtggacatgccagttccctccagcttcaatgacatcagccaggactggcgtctgcggcattttgtcggctgggtgtggtacgaacgggaggtgatcctgccggagcgatggacccaggacctgcgcacaagagtggtgctgaggattggcagtgcccattcctatgccatcgtgtgggtgaatggggtcgacacgctagagcatgaggggggctacctccccttcgaggccgacatcagcaacctggtccaggtatcccaagggttactttgtccagaacacatattttgactttttcaactacgctggactgcagcggtctgtacttctgtacacgacacccaccacctacatcgatgacatcaccgtcaccaccagcgtggagcaagacagtgggctggtgaattaccagatctctgtcaagggcagtaacctgttcaagttggaagtgcgtcttttggatgcagaaaacaaagtcgtggcgaatgggactgggacccagggccaacttaaggtgccaggtgtcagcctctggtggccgtacctgatgcacgaacgccctgcctatctgtattcatcggaggtgcagctgactgccaagacgtcactggggcctgtgtctgacttctacacactccctgtgngatccggacttgtgctgtcaccaagaagcagttcctcatcaattgggaaaccttctatttttcccgtgtcccaaagcatgagg

SEQ ID NO: 26309 - DNA, 591 bp, Homo sapiens
tatcccaagggttactttgtccagaacacatattttgactttttcaactacgctggactgcagcggtctgtacttctgtacacgacacccaccacctacatcgatgacatcaccgtcaccaccagcgtggagcaagacagtggtgagggcttctggtaggatcctctcagcggggcccagggtggctctgtttgttccctgtttggaaagctctcccaggaaaaaggtgctcccagcatctctacaccctcacagattcccttccacctatgaagctaaaattcagcctgtgtgagcggatacgggctcccaaaatcacccgtgtggttgacctcgctaggagaagaggggtctggcctaacgtcacacagctcggggtggcaatcctgtcccttctctatggtgctactctcactccatctccccttgctacacatcgtgctcaaggaacaggcagcttcggtggggggggcgccgggcatggtggcttatgcctgtcatccagcactttgcaaggaggccctggtataaggatcacttgaggccagtagttcaagagcagcctgggcaacatagtgaggccatcaccac

SEQ ID NO: 26310 - DNA, 437 bp, Homo sapiens
agtcttcaactcatctctcttcactcctccccaacagcttcttatccaccaaaacatctgcacacaagactgactgaactactttcagtttctttgatggcccatgttctctctgtttcccctgccacatcctctcaattctccaaccccatcccatatatccctgcacctggataatgtttacgcattcttcaggctctggaaagccttcctgccaaacacacacacatacatacacacacacacacacacgcatgtgtgcgcatggctcaggtcatgccacgcttcctccatagcatcctctacatccccggcacagtgcttatctcctttggtgtaaatgatatcatctattttcctcaatagactctaagcaagctctgtatgtacatggaccaagacagccctgctcacagttatatccctggaatctagta

SEQ ID NO: 26311 - DNA, 749 bp, Homo sapiens
agccgaggtgggtgggtcacttgaggtcaggagttcgagaccagcctggccaacgtggtgaaaccccatcactactaaaaatacaaaaaatagccaggcatcatggtgcgtgcttgtattcccagctactcggaaagctgaggcaggagaattgcttgaactcgggaggcggaggttgcaatgagccaagattgcaccactgcactccagcctgggcgacagagtgactccacctcaaagaaagaagaacgttttagacctggcccaccagagatctacttcctatttcttcagtgatcaagaagctgctggggtcgggtactggctccaggattactccagtattgtattacagcaggagtaagggggtataaaggaagatagcgagctagtgtttgtattcttgatgaaataaagatgtcatagaaatcaacaataagaaaaagaccaatagaaaaaaaatacaaaagtagtaaagtatatgtacaaaagatgaacaataggatgatgattgctgacttttattgagttttactctgcatccaggaactaagtacttaatatgtactaactcactcactcctttcaataaccttataaagtagaaagtatcctaatactcattttacagatgagaaaacagacaaagggaggttaaatatcttgctcaaggtcagagctattgagaggtgggcatttatgcctaaactcatggaccacagtagacctgaaaaaagaaaattagatga

SEQ ID NO: 26312 - DNA, 337 bp, Homo sapiens
attttgttttcttttcccatacagtcatactgtgcttttttccccttttaaaacatcacatttaattatccttgaataacctcatagattttaatgcattagagacatttttaaaaaacaagcattggattgttcactgtaagtcttgttacatcttagattgatggcttaaacttccaagacttgaaaaatagtgaaaaaaatttactagaaaaatattttgcatatatatttagggcaataataataaatacaataattcattttttaaaaatgattgagtctaaagataagtaacacaagttccctttaatttcctaatatttgttcttccttc

SEQ ID NO: 26313 - DNA, 701 bp, Homo sapiens
tactcatcctccctatgcatccctaaaatgtcagcacctcactggtctgtgctttttgcccaatgggttcaatgcctaatcagaaaaatatctgtatacaatgtacagtagtttggggttaagagcatgcattctggggacagacccatgcctggttctgaaccccaactctcacttgggcacattatttagcatctctgtactaaagtttcttcatctgtgaagtagaataataatagcacctacctatgctattattggagttgtcatgagggttgaagaaaggaatatacatactgcacctagcacagtgtttggcacacaggaagtatatgtaaaattcaagctggtatcagccaggcgcagtggctcacacctggctaacacagtgaaaccccgtctccagcctgggcaacagagcgagactctgtctcaaaaaaaaaaaaaaaaaaaaaaattcaagctggtatcattgtagtgaatgggatagttttgtatctaagaacacgtgtgttcttcacagtagccctgtaaggcaaatgttttacagaggcaagtgtatcgattggcagatgtgagaaccaagctaggacaagtgcttgggaactgcatagcaaagagacagactgcctcaaaacaggagaatgtttttggtgcttagaaacccattcctggccgggcgtggtggctcacgcctgtaa

SEQ ID NO: 26314 - DNA, 355 bp, Homo sapiens
tttggttttggtgagtgaagttgtgtagatataactcattctccttccttgccttctctgtattatcagtgttctaacccatcctggacttatctcagctttatcctttcctttattcccgttccttttgactgtagaccatgataactcatttgtgacagattgacattttgggatgggtaattctttcttgttggaggactggagtctatatagtaggatgctgagcatcatttctgtcttctacctacatcacatcatgctggtagtagcctcctctttccagttgtgacaatcagatgtctttagaagttgtcaaatttcccttaagaggcaaaaattgcccccggtttaa

SEQ ID NO: 26315 - DNA, 488 bp, Homo sapiens
aatcagaagctaaaacacccagaggctgctgcaaacctgtctctaaaacctgcagtaacccaagcccacaccctaatactaccatttatgaaacacactcaggctgcccagccataacccttccttagtcctttcctttacctacccgattgggcgctgtctcactcagctgagagtcactatttttcatcactaaaggagtcagaggccgggcgtgcgtggctcacgcctgtaatcccagcactttgggaggccgaggtgggtggatcgcgaggtcaggagatcgagatcatcctggctaacatggtgaaaccccgtttctactaaaaatacaaaaaattagccaggcgtggtggcgggtgcctgtagtgccagctactccggaggctaaggtgggagaatggcgtgaatccaggaggtggagcttgcagtgagccgagattgcgccactgcactccagcctgggccacagagcaagatccgtctca

SEQ ID NO: 26316 - DNA, 436 bp, Homo sapiens
ttcaaatacttgatggatacatgtggctagtggctaacataagggatagcacagatataaaacatttgctcgtcatataaagttctattggatagtgctggtctgtagcttataggatggtatcttagtctgcttcagctgctaaaacagaataccataaattaggtagcttaaacagtagatattttgaccaggcgtggtggcttatgcctgtattcccaaagtgctgggattacaggcatgagccaccgcgccgggcctatcatatgaattttgagggaacacaaacatgcagtctgtagcagatggtaataggctgacatattacacttgttgatgtaaatctgataggtttctttctctccaaggacagctttttaaatatttaacagtatcaataatttttcaggttctgtgagaattttataatttataa

SEQ ID NO: 26317 - DNA, 445 bp, Homo sapiens
agtgagctgagatcataccactgtactccagcctgggtgatagagcaagactctgtctcaaaataataataataaataaataaatggcatgcataagtatttattgctatgaattagtggctgatcaacagcattatttgtgttttcattaaatctaggtggcactgtattttctttttggttatataggtgagaggtttctatgttgcccaggctggcctcaaacgcctagcctcgcctccttatgtgcaaggacaacagttctgagccaccgcagctcccggtggcactgtattttcaaatgcaagtttagtgggggtagtttgagatcttctgttcgtttgttgaccaaagaaaatttaagtttcatttttgaaatctctacttgtgttacagattggagacttataagaccataaaatatgaagccttctaatagatagtt

SEQ ID NO: 26318 - DNA, 438 bp, Homo sapiens
gtctacttcctctgtttatttttcccctaccacccactactgtttctctttgacacacagcctcttcttattgcagaatctcagaggagcaaacactaggcccttttcacagaatcagtttaatatagactagtatgaatgatgattcatactattcaaagaactattaatgaaaactttctatatctggtggttcatgggttaaactcagttgtcacccgacatctccaaactgatttttgacctggatttgttccttacatatatgaccatctccttccattaactcaggttaagcagaagctaaaacagaatagagtaaaccaggggtagaggaccaatctgattaaatctaacaatttgtacatctgtgcctgactttcatcacttcttatgattgcgtataaagtacctgctgttgaatgagggattaagccc

SEQ ID NO: 26319 - DNA, 602 bp, Homo sapiens
atgagcatcacggacgtgctcagtgctgatgacattgcagcagcgctccaggaatgccaagacccagacacttttgaaccccaaaaattcttccagacgtcaggcctctccaagatgtcagccagtcaggtgaaggatgttttccggttcatagacaacgaccagagcgggtatctggatgaagaagagcttaagtttttcctccagaagtttgagagtggtgccagagaactgaccgagtcagaaaccaagtccttgatggctgcggcggataatgatggagatgggaaaattggagcagaggaattccaggaaatggtgcattcttaaaagccccagtctctggagaaaagagagaaagggataatcacctggaaggattccaaagccctgggaatggggaaccccacatcccatccctacctaatttgttaattttccctgaaaaccttctgcagtttgctcattgttttagcgaggtcacgagagagtcactcatgactttcttggtggtgggtatatgccctgacaacttctgtaagccccccttcccccaacaggcaatgcctctaaaaatcacccaataaagacaggcttctcaa

SEQ ID NO: 26320 - DNA, 119 bp, Homo sapiens
ctcaaggattggagaaattgaagctaaacaggggattacacaacatgaacaaaatggaaagagcataaatgaaatcttggatttaaaagcagagaattaaagaaaatcaaaccaaagag

SEQ ID NO: 26321 - DNA, 584 bp, Homo sapiens
  misc_feature (22)..(22): n is a, c, g, or t
  misc_feature (52)..(52): n is a, c, g, or t
aaagctgtcgcctgaagtaccngccggattccgggtcactactactactaanttgccgccgctcgacagagaaataaggctgaactttcataatgagagttcattacacttatttcacagaaaattaagaaatttgaacagtgtgagtgccatcaagtgacaaagcagaaacccgggctagtgggagaaggggtagaccagggaaggcatgtgtcctggtgtcttgctgtcttccccagctcctgaatcatccttgtgctgtgtatggccattacattgtgaaccctctggagaaactgagctaggtcctcaggagtccacctgcaatggaaatttctcttgctagatgtaagctatgagaaggagagattgctttgggaagggaagtagttggagcaagatggctctcaacaaggtgcctagaagacgatgacccatcatataggcaagtatactttagatatccctcacatacccaagtcccagcctggcccaagacaccatcgtcgtcgtctagagaagcagtaatcttctaactggtctccctaattctatccttgttttgtaacatatattattcacac

SEQ ID NO: 26322 - DNA, 344 bp, Homo sapiens
cagtgtgtgtttaatgaacttcctaactctgaatgaatgaattgacaaatggaaaaaaagaaagaacaggcactttccatcaaaagataccagtcaacagacgtgaggattaatataattttatattgaacctgacacagaaaactggtctttgaagattcactttgatactgaaagtaatctacagtgaggagaatttccccattgctctgttctcatattaagtaataaactgtgcagttctcccctctctttcctcaagggattcagaaaaccttccagaaaacagaagcatttgacttgaaggaaaggcaactaatatggcatatagaaacaaactcttc

SEQ ID NO: 26323 - DNA, 629 bp, Homo sapiens
tgcagtggctcatgcctgtaatcccaacactttgagaggccaaggcaggtggattacttgagctcaggagttcaacaccagcctgggcaacatggctggtacaaaaaaaatacaaaaattagctgggcgtggtggtgcaggactgtagtcccagatacttggtgggctgaggcaggaggattgcttgagcccaggaggtggaggttgcagtgagccaagatcgtgccactgcacaaagtgaggccctgtctaaaaaaaaaaaaagaattaaaagaattaaaaagtcaaattttaaaaaagtattaaaaaacaattatgatagttgagaaccttaacttttcaaatattttaaactataaaattgatcatagaatgccctgaagttaagagaaagccgtagaaacttgaaccaaaagcatacctgctaaaataaataaataaccttttttcactttctagggcaaaatgttcctctatgtattcaacaatcatttaataagcatctattatgtgctgggatatgaggtttgatggatgaaatgagtttcctatactcacttaggaaactcacaaagccaatctttaattttttctgaaatatgtaaaatattatcaggtaattgagaaga

SEQ ID NO: 26324 - DNA, 363 bp, Homo sapiens
atttgagaattgacatccttacagtattgagtattctaacctgtgaatatggtagaaaccattgtgtattcagttatttgatttctttcagttatgttttataattttctgtgtagaggtcttgtatatgtttcattagatttattctttggtatttgttttttgatactattataaatggtattgttttaaatttttattttctaattatagcaacttgtatgtagagtcatgtgccactttatgatggggatatgagaaatgcattgttaggcagtttcatcatgcaaacatcatagagtgtacttacgcaaatcatgcaaacatcatagagtgtacttacacaaacctaaatggtacatg

SEQ ID NO: 26325 - DNA, 519 bp, Homo sapiens
tcagtccccaattctgatgtttttatacgcaacactaggggtccttctgaagttatcccggcccctgggaaactcacgtggcatggggcccccttctgccctggtctctttcatcccatctgtcccggccccagagcctgtccagtctggtcctctctgtcctgcttggtttgtcaccatgtgatgttgggatggcttgtctttgccgcctcacttcctaagctgacagacgtgtctgctagggaccatcagctcccaagccgcatgacggtgctttccttcaaggttcagaggcttccctttcagtctggcccatctcccacatcctaatggctctgctgtctcaggggcagctctcctttttaacttattggcagagctgggatgacttataggtccctggctcagtgagtaagcaagttcagagacttggctttggccattttgttctcttaggctcatccttggatgccaacagggaaattacctgccagatttcagtcactactttttagaagt

SEQ ID NO: 26326 - DNA, 734 bp, Homo sapiens
ctgtattgagctaagattgcaccactgcactccagcctgggcaacagagccagactatctcaattaaaaataaataaataaaatgaagcaacaatccaatcaatcaaaccaacaaattctggaaaggtagagaagagaagggctgacccagtggtgagttcccagggtggtttgatggtttgttctttggcctcctatataccctgtcttatctgttagagcggagtctacaaccaggaaatcccagtgcccccttcatcccccaacccccacaaaaggagcctcatctttcgagccaaatgacagcgaagagggcggccctgcgggacagtgcccttttgactacacacaccctactctaggaaaacagcctgaaaaaagctgcaccttcccctgccccagatactgtagacactgtggaacaaagacctgttgaccctccccaccttgggccaacacaagcagaggtggcatctctcccctctccaccaagcactggcaagactgtgtggaagggccctgctgaccatccacaacctgcacaagactgaaccacagtaacaaggtggcaccccatcctctctcaaagacagtgaggagctagaagcaaggattctccaacccatttcccgttccccgtcccacccaccgcagaatactcctctctaatcctaatataacgtcatgtacatttctgttacattcggattaaagacaagttctgtttaataata

SEQ ID NO: 26327 - DNA, 311 bp, Homo sapiens
gtggaggttgcagtgagctgagacggcgccattgcactccagcctggacgacaagagcaaaactccatctccaagagcactgtttaattgatggtcagaaaaaaactgttcagcttccacttttaagctgtttctggaattgcctgaaaagatctttgcctaacagctgcttcatgtagaaacaagtgttgagatgatttctatctttgagcagctgccatttggacagtaatggtgaaaagaaagcatccccaaatcttttacttgtcagctgctactttgcccagccttggcagatagaaacttgaggg

SEQ ID NO: 26328 - DNA, 501 bp, Homo sapiens
taaattagtataaggcatcttagaaaaagaaaaagaagaatagcgtgtgggacggttgctctacccaagattaaaattgactgtcaagttaaaatggtgggtattggcatcagaatatgtagataagtggaaacacaatagaaagtctagaaatcaaggctggtattcacaaactctcaactgatgcaggccagccaaaagagaaagttaagaatgtttcacattttcttttcttttcttttgagacttagtttcattcttgttgcccaggctggagtgcagtggcactgtcttgactcactgcaatctctgcctcccgggttcaagcaattctgcctcagctttccgagcagctgggattataggcgcctgccaccatgcccagctaagttttatattttttagtagagatgggatttcaccatgttggccaggctggtgtcaaactcctgacctcaggtgatctgcccgtctcggcctcccaaagtgctgggattacag

SEQ ID NO: 26329 - DNA, 513 bp, Homo sapiens
gcaccactgcactccaggttgggcgacaaagccagaccttgtctcaaaaacaaccaaacaaaaatcttatttgagttcgaaacgcatgtcaattagcagtcacgcccattcttcccatccctcacagccctgagacaaccacctgtctctttagatttgtctatgctggatgcctcatataaatggagtaatacagtattggctctttgcccctggcttcttccacttagcatgttttcaaggttcatcatgttgtagcacgtgtcagcacttcctttctattttgtatattattccattgtatggctataccacatttcgtttacccattcatcaatcaatgcatatttagtttgtttccatttggggggctgatacgaataatgctgttatgaacattagtgtacaggtttttgtggaggcatatgttttcatttctcctggggatataccgagaagcagaattactgtgccacacaggaactctctgattaaccatttaaagaactgcca

SEQ ID NO: 26330 - DNA, 576 bp, Homo sapiens
tatagctaaggggtgaccacgccgtggctgctcgtctgtttcggtcaacagtgtctactcttcggattggaaccctgctaggggatccctcctcccatttcaaacagaaactagccattaagtaaacacccgttcctgttggcttattttggtccacagttaggagggatccaacaggagtttcttgatgaaattgcgctttcaaagaccagatgctgtttggctgacttgaagaaacgcatgccccctcctctggttctagttttcgcgtggttacgtcctgttgttttgaagcaaacgaactgtcacatgccacacaatgagacttcccccgtcactttaaaaaaaggaaagaaaagccctaaacgtaaataagcctagcagagacagcgcccgggtctgcctccagtctgggctctgtgctgtttttgttcggtaacctcggtggagatcccggcagaagaaactctgtggaaataagattaaacccgaggagtactaagacggccaagggataactaactcgacttcggagcgtctgtttcaggaactagagccagcctgccaccctccctc

SEQ ID NO: 26331 - DNA, 221 bp, Homo sapiens
acgtttattctctcacagttctggaggctagaactccaaaattaaggtgtcagcagagccaagctccccatgaaggctttagagaagaatccttctttgcctcttcctagcttctggtggccccagcactccgcaacttgtggcagcctccctctgatctctgcctttctcttcgcatggcttccttcgctgtccatgtctgtctgtgtcttcttctcttg

SEQ ID NO: 26332 - DNA, 635 bp, Homo sapiens
agtcaccttgctctatccatactgaccatcctctttttgtttgtgctgtcagcagcatcttccatgaatgtcccttagatgtcctcatgttttagtttcctcttcacaagcacttttctgctcttctctgctttatttttcacttttcaacattctaaatattgtattcattcaaaatacttaattatcttgtttgtctctattactagaacataaaatagtgtctggcatatagtaggcactcaataaatatttgttgaatgaataaatgttcacactgattgtgatggtgtactttttttaaaaaacagaatcatgcaaacatattactctaatacttgctttcccctctcttagtaactgatggatattgtcatttgatagtgattttaaataactgcagaatagtccataataagtttgtttccagttttttgtcacgacaaataatattgtaataaacacccttatacatattttttaaatattttgctccttttatttttatgaaataagttccttcatgtgggtcaacatatagtagtccctttatttgtggttttgctttccctatggtctgaaaatattaaatggaaaattccagaaataaacaattcataagtttcatgttgcat

SEQ ID NO: 26333 - DNA, 470 bp, Homo sapiens
tttttcttggaaccttttagatgaaggtagctttgcccaagaacccatcaccaataggggaagaaaaggttgggttaaataagacaaaaacatcactgcagataggaggctgagaagctttcactgtatcatgtttaaagacttgatgcaaagtacttcagagaggtagtccaccggaaaaggaaaatcaaacacaaatttcttttcccaagaatgtaatcttctcggcatggcgttttgttgctcactaaaaactccctgctaaagaaaacattttcaggtcgctccactgaatctgctgcaactggtctattttcagctctatttctctgagcctcgcagcagaagttcttaaatgatcctgggaccaggtttggttaaagttgccaagagcatttaagatcgtgttgtttttgcttttgttttccaataatctacagctgggggtatgagaggctacagtggatgtt

SEQ ID NO: 26334 - DNA, 905 bp, Homo sapiens
gcagtcatcacaacgaattgtgattgcctatttactcatctgcatctcccactgaattctgatccatggtggctggcccatgcctgtcttgtgtacatttgcatgtaaaccacttaacccaagtgccaggaagcaaacagtacacgcaggtgtgtggagtgattgaaagctaatttgctacctaagaatgtacagtgattcctcagtgtttattagatcaggcccagactcttcatttcagttttcaactcctctgatttttcttttatacaagctttcagatctcctcttggttctcatctagctcttgcatctttatgccgtgggttgattcctctgcctgcctatctgtagtagcttgtctcctaggatggctgccatcaatttcttctcttctgtatacacatgccactcccgcattgagagatggagtcttctttccccctggaatctggtctggcctgtgactaatttcaataatagaatcttgcatttctattgaaactaccaaaaaaaaaaaattgtgtcagctactacagctactaagttttgggatggtttgttatatggcaatagatatcctcaataccattcttcaaagtcccaaacctacattttctgtgaagccttaccttgctagtctagttaacactgatctcctccttctctgaagttctgtgggaatagaactttgttgatgccacacattttgttatccaactgtatgtattattacttttcctttcctgaatgccagtatgaactccatgaccaaattatatggtctttgaagataccaaatagtggaaataggtcttttgtaatcccttcaacaagtcctagtactgaataaaaatgtaatggctgttgaattggattaaaagtaaaaatattcttggccattt

SEQ ID NO: 26335 - DNA, 660 bp, Homo sapiens
aggaatctgggttttaacaaggcttgtgggtgactgagacgcagacgggagtttgagaagccctcgtctatgccagtgctacacaacttgtggtctgccgtgtgaactgttactggaccatggcaagataacacagaagttgagagtgagcacttagaaatgtttatattaacttgacataactgtgacatccaagcatgggagccttggaaaagagttttattatatttcacaaatatatcagtccacagtcgagttgactgtgactttaaaaaaaaaaactttaaaaaaaaaaaaaaggaaaaagtgaaatttatgatagttggtgcctgtggggacagatgaggggaggagcacatgcgactttattttctttatttaaaaagaatatccaggttgggcgcagtggctcacacctgtaatcccagcactttgggaggccagggtgagaggaccacttggggccaggagttcaagaccagcctggacaacatagtgataccctgtccctacaaaaaccaaaacttagttgcgcccgtggtcccagctgcttggcaggctgaggcagaaggattgcttgagcccaggagttgaaggctgtagtgaactgtgattttgccactgcactccagtgtgggcaacatagtgagacctgtctca

SEQ ID NO: 26336 - DNA, 559 bp, Homo sapiens
cagtgctaggattacaggcatgagcaaccgtgctcagcccatacatgcagtttataaacagcaaatacacacacaaatatatacatattaaaggtacatggccagttagataggactatgcagtttaaaaaggttaatgacttcttcagtaaacagatcattttcttcttagtactttgaaaattagctctaaggattagcattagacccattattatgtggtttagtaagtgaagacctcagtgattgattaatcagtcaccatttgtatttcaagcaattactgttttgatcaggtgaagggtattgtcatattttagaggtgggcagcagtgtagagtggttggtctacaactatcaaaatgagagaggcagctcttttttaagaaattgttttgtgatcactgtgagtctacgaagcagattgcaaaaagtagctgtagtagcaaatgaaagatcagtttgtctttgtgagatagatgggaaagacttttctttatatgatggcttttagccagacagaattattaacagttaaactcattgtaatctttagatt

SEQ ID NO: 26337 - DNA, 593 bp, Homo sapiens
gaccattaattaaggaagttgttatgaagacactggaagcagtcgttactgagttaccagatgaccgcattggctggaatgtgatcagtcaattcagttaagcattgaaatgctccctgatcccccgtacacacatacagtacactcatgcctgggttgtaaccgtcagggtaaagactaggctggtgtaacaaagagaccccagcgtaaaatggcttaaataaaatagaagtctacttctctcgtgaaacaaccagaccaatgtagcttgtctgggcagatctttccgtctgtgctctcctcccttggggctttgtctttatcatatggttgaagctatgttgttgccgcactatggagatgtccaaagcaagcaattttcttttgatcaaaagagttaaacattgtatacatcccactcattgtcacttaactggtaagattgtggtcataaggcccagcaaactttgagggctgctgggaagtgtctctacctaggtggccaggagcctggggagaattgacaaacagatttaaggggacaagtagaatacaagtacttcattgattcagttgctccaatctagtaattt

SEQ ID NO: 26338 - DNA, 231 bp, Homo sapiens
cgatcagtaccattaagttaaactaagtttaccttagaatgttacgtatatggcggcagaatgaacctgcaacttcaaagtcttcacaaaagacctgttaaaacaggaaaaaatacattaaagcaaaaataaagttttaaaaattgaatacaaaaacactaattggtctgtcatgtgcctacagtcaaccctaggaattttggttggtaggtagccatgaaaacaacaaca

SEQ ID NO: 26339 - DNA, 317 bp, Homo sapiens
caacaacagaagcaaaagtacctacatttgaacagccccacaagggttcaaggaaacataaccttgaccaattatttaacaatttttttttcaagacagagtctcactttgtcgcccaggctggagcgcagtggtgcaatcttggctcactgcaacctctgtctcctgggttcaagtgattctcctgcctcagcctcccgagtagctgggattacaggcccccaccaccacacccggctacttttttgtatttttagtagagacgaggtctcaccatgttgcccaggctggtctcaaactcctgacctgaagtgatc

SEQ ID NO: 26340 - DNA, 790 bp, Homo sapiens
tgtaaatattagagatcggtgttgaacaacaacagacattatttaaagctaaagactaaattcacagaataggaccctaaagttgaagatacccagaagataatttcagctagttttgtcaaactctttgactgcaatccctagtattttacatagcatcccagtacatgcttatccatctgtacatctaattgaaacaaaagtttcacaaaacagtaggttccattactatgtggaatgcattctgattttcccattgctgattgcaaaccactaaatggattagactacccactaatgagttgcaggtgacaagtttgaaaaaacaatgctctcgggcaacctgacctgatgcgttaatttatgagattttattttttgtagacagactagattgtccaaatgagtattattactttaactactatagtgctgtgttacagttgtttcagtgattattgcatttttcaaaaccatttttaaaattctgtttgaaatagttggaataacctgaaaacatttaatatcctgttttggtaaattttcatctccaagattaaatttttttaaccagccaacagatgtttgaaggcaagttaggagatatgatggatactggatacagtatccatccatgtactagatacagtatccatccatgtactggatacagtcatactgttagcaaattttagatacataaagtaaaacaaacaaaatgcagtataaaaagttaatattggaatctagtgttgattttatgattaatctcaatgaggttactgtatat

SEQ ID NO: 26341 - DNA, 676 bp, Homo sapiens
cccttgctctgtatctgaaaatcagtcctcagccttcaggaatgcagcttctgagtggaagggggtggggacaggccctccaaggccagctgctgtaccaaagtcagaccatgacttgtgacctttccttcatttcccttattgcctctggtttaatgcaaaaggttcagtgaggtgatggcctagctctgcccccagcaggcctgaggggttcactgggaaggttgtagggggcagcaggagtagaggggaagggagctgcaagtgaatgagtgaggcaggaactgccacccctgcggggttagaggatttggagtgggggacctcaggcttctggaggaaagtacttaaagtgtccaaaagaagaaggcaagcagcatgcaccaagtggctccttggccctctggcccattcaccgggtgtctcagtatgttttctgcagctataacagaataccacagacttaatttataaaaaaaagaaatttcttacagttctagaggctgggaagtccaatatcaggtgccagcatttggcgacggccttcttgccacatcatcccatggtagaatgcgaaagggcaagacagagcaagagggaacagaactcactcttataacaaagtcactctcaccatcattgagccacacctgcaataacaacattactccattca

SEQ ID NO: 26342 - DNA, 595 bp, Homo sapiens
gcattttgatattgattcatcagtgtcaagaattaagaatttaaattcttaaataaatattattcttgatatttattctaagatttaattaaacttgcctggggccaggaaaaatgaaaaagactcaaatttacccctacttgtaatggggaaaatataaatggaggatcatgtcaaattaagccccagggtacagatagttcacccagatataaaaaagtgaggcacacacgacttaaaatgtaaccagttaactatcaacaggttcaacggattatctagtacctccagagataggacttaaagtaagtgaataggaagtcagaatttcggagacaagggagacttcaaaaattgaacatattggccaggtgagatggctcatgcctataatcccataactttgggaggctgaggcaggaggattgtttgagactagcctgggcaacatgttgggactccatctctacaaaaacaaaaaacaaaaaactccaaaagttagccagacatagtggcttgcacctgctgagatgagaggattgcttgagcccaggagtttgaggctgcagtgagctatgatcatgccactgcactc

SEQ ID NO: 26343 - DNA, 441 bp, Homo sapiens
agtgaacaaggctgcaatctactaaaaggtgtactatagtttttcttttgcaacataatttttctgtctataatcacccccatttctaccaaagataatcagagtaagactaatttgtttgcaaaataagtttcgtctcattaaacttcacctgattatttgtatataagtacagcaagaataaccacacagttctttttaaatttgatttgctggaaattttgacaaacaatctcagattatacttttaaaaacctctcatcactaggaagccaaaccaaggccgacatcagactttgtctactttgtctatggttatctagtgtcttgaggttcctaggcctgccaggaagtgacaactttttactcactcactgtaatgctgtgtgtaagtccactttgtgttgctatgaaggaatatgtgagactgggtaatttatg

SEQ ID NO: 26344 - DNA, 368 bp, Homo sapiens
agaaacagcaaccacaattttaagtcttctagtcagtgtaggacagtgttttatacataggtgcttaatataaatatttgatttaaaaccaatcttgtatttttttaattgttttctttcttcccttccactggtcttctttaattttaacttttggccgggcttggtggctcacgcctgtaatcccagcactttgggaggccaaggcgggcagatcacctgaggtcaagagtttgagaccagcctggccaacgtggtgaaaccctgtctctactaaaaatacaaaaataagccgagagttgtggtgggtgcctgtaatcccagctactcgggaggctgaggcaggagaattgcttgaacccgttacg

SEQ ID NO: 26345 - DNA, 415 bp, Homo sapiens
cacacacacacacacacacacacacacacacacaaactctctctctctctcatgctcacaaacagacacgtggtgcttgattctaaatatcttcttttaggcttcaatatcctcaaagtaaaggcatttccttattcatgttttaatttattctactatagctacatgttttcttgtcttactaaatgtttgctgaactgaataacacaccttaactacatatatctggaatttctgttgtgaactttaatggcaaatggaaacgatttgtgggttttgtggggctatcattttcaaactcctgatttttgtgatttttcggggctggccataatgctatagagttctctgattttatttctttggtacaaaaaaagcaaaatgaatgaattgtgattgagccatggaacccagt

SEQ ID NO: 26346 - DNA, 930 bp, Homo sapiens
  misc_feature (94)..(94): n is a, c, g, or t
  misc_feature (135)..(135): n is a, c, g, or t
  misc_feature (383)..(383): n is a, c, g, or t
atgagggaaaataaccagtcctctacactggaattcatcctcctgggagttactggtcagcaggaacaggaagatttcttctacatcctcttcntgttcatttaccccatcacattgattggaaacctgctcatngtcctagccatttgctctgatgttcgccttcacaaccccatgtattttctccttgccaacctctccttggttgacatcttcttctcatcggtaaccatccctaagatgctggccaaccatctcttgggcagcaaatccatctcttttgggggatgcctaacgcagatgtatttcatgatagccttgggtaacacagacagctatattttggctgcaatggcatatgatcgagctgtggccatcagccncccacttcactacacaacaattatgagtccacggtcttgtatctggcttattgctgggtcttgggtgattggaaatgccaatgccctcccccacactctgctcacagctagtctgtccttctgtggcaaccaggaagtggccaacttctactgtgacattacccccttgctgaagttatcctgttctgacatccactttcatgtgaagatgatgtacctaggggttggcattttctctgtgccattactatgcatcattgtctcctatattcgagtcttctccacagtcttccaggttccttccaccaagggcgtgctcaaggccttctccacctgtggttcccacctcacggttgtctctttgtattatggtacagtcatgggcacgtatttccgccctttgaccaattatagcctaaaagacgcagtgatcactgtaatgtacacggcagtgaccccaatgttaaatcctttcatctacagtctgagaaatcgggacatgaaggctgccctgcggaaactcttcaacaagagaatctcctcgtaa

SEQ ID NO: 26347 - DNA, 340 bp, Homo sapiens
gatggagtctcctccaggctggagcgcaatggcgcaagctcggctcactgcaacctccgcctcctgggttcaagcaattctcctgcctcagcctcctgagtagctgggattataggcacccaccaccacgcccagctaattttttgtatttttttgtagagatggggtttcatcacgtcagcctcccagagtgctgggattacagacatgagccaccacgcctggccaataatagtattttacaaactgtatactctagcattctaagaatgaaaaagttctaagagttccgtaaccattttaatttcattgctcatatgaagaaaaaacaaggttaagt

SEQ ID NO: 26348 - DNA, 672 bp, Homo sapiens
catctttaaagtactggaaggaagaaaccaaaccaaaccattcacctagagttttgtacccaaccacaaatgaagatgtaaagacttttcagacattcgaaggttgaaaaaatatgagctaattataatgactagcagtttaatattgtagtattacctttcttagtatccaataccaacattttcaaaacttttgagattataaagtctgaatcagtgaaattttgaaagaagcatacaaagtgaaagaagcaataaagagtggaatgggctagtgcaattgtttagccttgttagagtatcaaaaggaagtatagttttaaaaattgtgcatgatttttactggtgacaattaaaatttgctttgagtgttttaatggttgttaataagaatttgtattttatctttttccagcttaaatagagtttataaatataagccattgctgatcagtagtgttacgtatgtgagcacatgcattcacattgggttgcatttcatagctactgaaccaaatgatgaatgatttggcacttggagaaaataaatttggcatttggagagatatataaattcttcttggttggatactcattacttcctcagttcagaatgaaaaaattttagacccttgaaattcctggataattctgggccaactgagtcagtga

SEQ ID NO: 26349 - DNA, 379 bp, Homo sapiens
taaaatgtatttgtagcccccaaatcaatactcacggcacctttgaagacatgtgcagggtggggaaacatttgagttgcctgaagtgcctgttcccagctgaggtcaaacaaggtgaccttggccgggcgcggtggctcacacctgtaatcttagcacttcgggaggccgaggcgggcggatcatgggatcaggagatcgaaaccatcctggctaacacagtgaaactccatctctactaaaaatacaaaaaattagccgagcatggtggcaggtgcctgtagtcccagctactcgggaggctgaggcaggacaatggggtgaacccgggaggcggagcttgcagtgagccgaggtcgtgccactgcactccagcctg

SEQ ID NO: 26350 - DNA, 810 bp, Homo sapiens
acaggctgttgaacaaaggcaaatctcttgatctctttgctctttggtctctgtttatctatgagataacgttatttttacgctgtcttctgtgaaagttttgagaatgaaatgagacagagcctccaataaaatttagggaagtgctacataaatgcaaggagttattatgataacagattgaaaactcctccaaggaggagtttctcttttgccccatgttataaactcaagaatatcttccattttgcctacatattccaaaagcttttaaattaagctatatgtcattcttacaggagtctcctctatttcagcaatgtgtatacttggtcagttttaattatcttaaaggagaagaatacagtttctctaaactcaagcacttttgtggactaatccttgcaattattctttcttctttcccatacttgacatttaaagtgatatctcccaggctcctacactgttagtcacagaggtaccattcgaccccttgtgcctcttaccatatgtgaatgcttgtcagttgagagtaaactttcttcataaatttcacagttgtgggattgataaaaacagagaactctggttcctcattccttcctgctttctttcttggaaatgccattcatgatgggtcccttatatcactataggggctgctatcatccttcatccttatggccactggcaaataggcaaccaacagtgtccttaggtgccagcactcccggggcatggccccttttccaaggcaggcaggggtcaaggccgctccctttcctgagctgtgggcatctggtctct

SEQ ID NO: 26351 - DNA, 242 bp, Homo sapiens
actgaaaggcataggaaagaagaaactgggaaaagagggtacatgagggaataaaaatttggaaaaccttctgcataataactggagaatctagaagtccacatgcatgcccagagatgtacacatactcagaaatgacccaagaaatcctaagctctcacctctggctgatgtttaggctcatgcaagcctatgttaaaaaaaaaaatcccaaatcaataacctacttttacaatttaaag

SEQ ID NO: 26352 - DNA, 393 bp, Homo sapiens
caataactttccaaaaggaagttttattttctattttaaaggaaaagatgatacatatacaacagagtattagattcaacactttcccacttgaaaattcagtggcacaggggctagacacagtgtgtcacagctgtaatcccagcactttgggaggccaaggcagttggatcacttgaggccaggagttcgagaccagcctggccaacatgctgaaaccctgtctctactaaaaatacacaaattagcctgatgtggtggcaggcacctgtagttccagctactcaggaggctgaggcacaagaatcgcttgaacgcaggaggcagaggttgcagtgagccgagattgagccactgcactctggcctgggcgacagagcaagactctgtctc

SEQ ID NO: 26353 - DNA, 710 bp, Homo sapiens
ccggagcggggctcgcccctcgtcggcttccgccgcccagcccgtgatcgctctccggccgtccccggcaccctcggccccccacggcggttggtcccggcgggggaaggagaaagtgagactcggtgtcatcaccaatccgtcgccagaaggggaggaaactggaatccagcagcggcgagcagcagctgggcggtcacatctggaaatggaaagccgacctccccctcctcctccaccacctcttcctcctcctcctcctcctcctctcacccaggatcacttccgaaaccacttggccttcagcccctgcctcggccagaggtttcatttttaactgaatatttacgaaagctgaaagcgtgcgaggggggtggggtggaaatagcggctgcttcttttccaaggatttatttaatggggatgtgttcaaggcaagaccgaattcagaaggatatcgacgtcgctgatccagaacgctccagagctgaggactgcctgtctgcaggagtgaaggcaatcttgaaggcatgactacgacctgctctggccacaagagctaagagttgccaggtgtacgtggcctcaaacacttcgagatgccaatcccaacacttcgagaggccaaggcaggcaggatcgctgaggctaggagctgaaaccagcctgggcaacacagcgagacccatctctacaacaaacaaaaaaaa

SEQ ID NO: 26354 - DNA, 297 bp, Homo sapiens
atgtctgttcggggcaaggccggaaaaggccttgggaaaggcggtgccaagtgccatcgcaaggtactgagcgataatattcagggcattaccaagtgcactatccggcgcttggcccggcatggcggtgtcaagcgcatcttgggcctcatttatgaggagacccgccgggtgttcaaggtgttcctggaaaatgtgatctggtacgccgtgaccaacacggagcacgccaagcgcaagacggtcaccgccatggccgtggtctacgtgctcaaacgccagggaagaaccctgtaa

SEQ ID NO: 26355 - DNA, 1764 bp, Homo sapiens
ggcttaccacagcctcaacttctcaggctccagccatcctctcacctcagcctcccaagtagctaggactacaggcgtgtgccactgtgcctggcctaattttataattttaaatgtctgtaaagtaagcaaaatgactagttgaattgtacattaaatatatctaatccctaagagtttataatggaaagggatcaaaactttttcaattgcgataaaactcacataacaaaattaaccattttaaagtgaacaatttagtggtatttagtgcattcacagtgtcgtgcagccaacacctgtatctagttccaagacattttcatctccccaaaaggagaccccatacacgtgaagcagtccctctcccatccccctcctcccatccgctagcaactgctaatttgctttttgtctctatggatttacctgttctggatatttcacataaatggaattatacaataaaggaccgtttgtttctaacttctttcactaagcatccatgttatagcatatatcagacttcattcctttatgactgaataatactttgctgaatggatatatcagtgttttatttgtcctttcatcagttggtggacatttgggttctttctaccttttggctattgtgactagtggtgttgcaaacattcatgtacaagtttttgtttgaatgcctgttgtcagttcttctagatttatacttagaagtggaattgctgggtcatatggtaatttctctgtttcaactttttgagagaccacgaaaccgttttccacagtggtggcaccatttgacatgcccactagaaatatatgagagttccattttcttcacatcttctgacagctttttggggtgttgggatgattcgtctaattgggaaaataagtaccttatttgggcctatatggtatttttaattctgtgtgtctgctcccaaactctgtagccctgccctcccttatattgtgtatcctgtttcagattgtttccgtttcttctgagacactgcatatacccctacatgtatctgtgctaggcatacatccctgtaacttcatggcatttttgtaattgctgtgtacctgttacgtatactgagtgggagtgtctcatttgctgtagaactctctgcattagtgtagtgtctggcacacagtagctgctcaggcattttttaagtatatgattattgggaaaactacagagctagggagagatctgaagaaatactagaaatttttttctgcaaagaaaactttagaaaattgttgacatcatctgtggcatgcagcaaaagttgatgtaaaaggaacagaaagacctatggagataatgggatgtaataacagaaaacatacagaaacaattggttctgaaatcagttaagagcagaactggaattcatactctgtggaatgaatcagcaatgtggaaggagtaacaagattttttaaaaagattttgaatttaggctgggtgcagtggctcacgcctgtaaccccatcactttgggaggccagagtaggtggattgcttcaacccaggcattcgagactagcctggacagcatggcaaaaccctatctctacaaaaaataaaaaattagccaggtgtggtggcatgcgcctgtagtcccatctacttgggaggctgaggtggatggatcacctgagcctgggaagtggaggttgcagtaggctgaagtcatgccactgcactcaaacctggcggacagagtgagaccctatctc

SEQ ID NO: 26356 - DNA, 536 bp, Homo sapiens
gagaaaagaaaacttttattagagataataagttcaaaatataaacaggtaaggtagaaatggtacacacgaataacaaacataaaagtacagatggaactgtgttaggaggcaggactcaactctggaggtggagctcagataccagacaaaattgaggactaagacaaggactgggcggaagtagctttcctgaagacatgctcactagtgtgccatgtcagtttaccattgcaatggcagcacctgcgagcgaccaccgcctttccaggcaataacccgatgacccagaagttactacccttttccgggaaatttctacctaaatcaccccttgatctgtattaaagtaagtaggccaggcttcacacctgtaatcctagccctttggaaggccaaggcaggcagatcacttgaggccaggagttggagaacaggctggcaaacatggggaaacccatctctactaaaaacacaaaattagccagcccaggcctgtaatcccagctactcgggaggctgaagcatgagaatcg

SEQ ID NO: 26357 - DNA, 389 bp, Homo sapiens
gagtgtgtgtattaagttgaatttccaaaattgctgatctccaacagttttggcccacaaaaatgacagtctcatactatttagctcaatatatcagtcgatgattttccccgagcctgaaatcttcatataataataagtaatattttaaacactaaaattaaatataagacatgaatacattatttttcttttctatatgtaccctgtagccactttttatctcttggtggcaacaattctattatttgctttctgaacttatcatgggattgcacttggaaacaaatgtagtctctactgaggagatgagacggtaatttggagacagatgaaaaagaagctggattgagaaataatgtttgtggaaaaattcagtaatttaacca

SEQ ID NO: 26358 - DNA, 280 bp, Homo sapiens
gattacccctgttgcccacgctggtctcaaactcctgggctcaagcgatcctcctgccttggcctcccaaagtgctgggattacaggtctgagccaccacgccaggccaggaaaatttttaaatcagcatctagatgacaggtaaagtatactgtttttctctggcatagataacaccctaacagcttatttcccaacactgtctaactcaaaccatcaaattaacttgggcattttacattttcattcccacataggcctttgctcaatactcttcttc

SEQ ID NO: 26359 - DNA, 963 bp, Homo sapiens
gctgcagagagaacaagacctgagactaattaatgaaggagatgttccacatttaccagttaatagagcatactctgttaatggtgctctgagaagtccaaacatggacatatcttcttccccaaacatcaggcttcgaagacatagtagtcaaattgaaggtgttagacaaatgcataacaatgctcctcggagccagatggccactgaaagagatctcatggcgtggagcagaagagtggtggtcaatgaactaaataatggggttagtaggtgagtcaataaggtaacatttagaaaaaaatttaaagctttattcttaggaagtgaattgaaatgtactatgttagcctagtaaatgaggaattttaaaatatagtttagtcatgcattagtttttccatattattccagtgagttcacttcgtaacaaataatgatcatcttcagctttgtgctgaatgctttggggaatattgaaaatgcaaaacattatctctgttctgagtttatagcctagattagaagaaaagaatacaagtagtattaagaactcatgaggtcttacataattaaatatgtgagtgatatatggaccctaacattggagcagcctgggagtacaattatttgttagatgctagtgcttagagtatctttagaaatgtcatttaggtaggcttcattgggtgaaagaatttcattaggattaatttcaaacttataatccctattcatatttgtaaaccctgacatttgctgtaataataactttcagatactccacagcaactggaaatagatttagaaaagagaaaggacatttacagagaatatgtacaattcattttaatcaagtatcttcctaaccaagccttttaccagatcaaccaacaaatagcaaaattaatttggtttctccttttcttctgctttctgctataagaaggcagcagtgataag

SEQ ID NO: 26360 - DNA, 544 bp, Homo sapiens
caggtctttcttcgcatggcagcagcaaggagaagtgccaaatgaaagggggaaaaactccttataaaaccatcagatcttgtgagaactcactcactatcacgagaacagcatgggggtaaccacctccatgattcaattacctcccaccgggtccctttcagaacacatggggattatgggaattacgattcaagatgagatgtcggtggggaaacagccaaaccgtatcaattactcctgtgttttgtgcaatgctggtgtaagtaaacctgccgtgctaccagtcatataaaaatctggcacatatatttatgcacagcacacagtacttgacaatgataacaaacaactacgttactcgtttatgtatttactatactttttatttagagtgtactccttctacttatatataaaacaagttaaatgtaaaacaacctcaggcagtttcttcaggaggtatccagaagaaggcattgctataacgtaagatgacagttgcatgcatgtcactgcccataagaccttccggtcacaaaac

SEQ ID NO: 26361 - DNA, 1674 bp, Homo sapiens
aaacattaatctgaaacttaagccttagaaattaatcgcaggtatgatagaatgaggcttggtggttccatagctttcttggtcctttgaaatgggaaataacctgaaccaaaaatcctagtttgaaagttacacttcagtgatttggcctataaacagtggtcctatgattatacattttttccttcactgatttgcataattttgttttcatggccacagcaaaacaatgtgaaatatatttttgctatacccactttttttatcaaattcagatgtctactctcaccattttatattcatttccccagaaaaatgtgctgttttcataatgtctttatttagcaggtctttcaaaccaaatggaagccttacctgtctttgtccttaatagtgtaaatatcttgcacagagtgttgaggcctatggttttggacttgcaccttacagctgcctttgttttatctatctagctttaactgtgagtgttcagatcagctgatcacattgatcaggagccaaagccaaatgctttgtagtttgttatgtatgtatcccttaaaaaatcatgaggttttgatttttatattttaactaagggtacattcctgccttctcttagtttgtcatatgactagaacaagagaagtcttaagctgcatttactccaattccagatctccatttgtttttgttttataaatttataatcttaatgaagagactagtgccctctcttcctgccacaactctcaatctgccaagactgttgaagcagttaacgctcagtgcaaacttttgccaaatagtaagtttcaacaaaatatctttatagtgaaagattttgagaattagtaaatccagtacatgattccataaaagcttattaaagttaataattctaatttactccaaatgattactttcaatatgatctttggggagaaaaagcctttagtgaattttcttgagggtgataaatcacatcattgcgatctatatcacctccttgagaatctctcccaggctgaaaatgtgatggtaatcatgggtgtttttaagaacaaatctaatttttatcaagtgttctttcctctacaaaaaaggaaggaggagaaaaagcttccttaaaactgattattttgattcaattttaagtttctaaaaaaggtgatattaaagtatatgtattccttcagcattaccttaaaggctagaaaaacgggataaatcttcagaaaagtgtcaaaagtgtcacagtacatgttcaaatttaaacttgaatcctggttcatctttgacttttgttgtgcatttttaatgcttctttatttttgatacacagaatgcagttgaacttgatcttttaaaattgagacatgtaagctaatcagcaaaagacagaaacaaaactgcacatctgtaataatcagatagcaattctactgcacaattcattgattgtaaggtatcctgtaacaagcaatgtttgtctcctattttttgatacctcttaaacttatgtcttttagaaagacagtgcctctgtatgctttttgtatttttactgagtgtaaatatttgttatatttttggttaagagaatgtaaaaataccatttattattatcatatctactaatacattggtggaatcaataaagaatctacatta

SEQ ID NO: 26362 - DNA, 1701 bp, Homo sapiens
aaacattaatctgaaacttaagccttagaaattaatcgcaggtatgatagaatgaggcttggtggttccatagctttcttggtcctttgaaatgggaaataacctgaaccaaaaatcctagtttgaaagttacacttcagtgatttggcctataaacagtggtcctatgattatacattttttccttcactgatttgcataattttgttttcatggccacagcaaaacaatgtgaaatatatttttgctatacccactttttttatcaaattcagatgtctactctcaccattttatattcatttccccagaaaaatgtgctgttttcataatgtctttatttagcaggtctttcaaaccaaatggaagccttacctgtctttgtccttaatagtgtaaatatcttgcacagagtgttgaggcctatggttttggacttgcaccttacagctgcctttgttttatctatctagctttaactgtgagtgttcagatcagctgatcacattgatcaggagccaaagccaaatgctttgtagtttgttatgtatgtatcccttaaaaaatcatgaggttttgatttttatattttaactaagggtacattcctgccttctcttagtttgtcatatgactagaacaagagaagtcttaagctgcatttactccaattccagatctccatttgtttttgttttataaatttataatcttaatgaagagactagtgccctctcttcctgccacaactctcaatctgccaagactgttgaagcagttaacgctcagtgcaaacttttgccaaatagtaagtttcaacaaaatatctttatagtgaaagattttgagaattagtaaatccagtacatgattccataaaagcttattaaagttaataattctaatttactccaaatgattactttcaatatgatctttggggagaaaaagcctttagtgaattttcttgagggtgataaatcacatcattgcgatctatatcacctccttgagaatctctcccaggctgaaaatgtgatggtaatcatgggtgtttttaagaacaaatctaatttttatcaagtgttctttcctctacaaaaaaggaaggaggagaaaaagcttccttaaaactgattattttgattcaattttaagtttctaaaaaaggtgatattaaagtatatgtattccttcagcattaccttaaaggctagaaaaacgggataaatcttcagaaaagtgtcaaaagtgtcacagtacatgttcaaatttaaacttgaatcctggttcatctttgacttttgttgtgcatttttaatgcttctttatttttgatacacagaatgcagttgaacttgatcttttaaaattgagacatgtaagctaatcagcaaaagacagaaacaaaactgcacatctgtaataatcagatagcaattctactgcacaattcattgattgtaaggtatcctgtaacaagcaatgtttgtctcctattttttgatacctcttaaacttatgtcttttagaaagacagtgcctctgtatgctttttgtatttttactgagtgtaaatatttgttatatttttggttaagagaatgtaaaaataccatttattattatcatatctactaatacattggtggaatcaataaagaatctacattaaaaaaaaaaatatttgttatatttttg

SEQ ID NO: 26363 - DNA, 216 bp, Homo sapiens
tttttttttgaagattaatgtagattctttattgattccaccaatgtattagtagatatgataataataaatggtatttttactgagtgtaaatatttgttatatttttggttaagagaatgtaaaaataccatttattattatcatatctactaatacattggtggaatcaataaagaatctacattaaaaaaaaaaatatttgttatatttttg

SEQ ID NO: 26364 - DNA, 526 bp, Homo sapiens
agctatctctagacagctaactacttttgagatatgtaactttatgactgacactttaggggcctccaggtctactataggcttacttctggcaaaagagttcctggcttccctagatgacgtacccactgtgccctagcctggtctgccaaattttaatgaccaagtatgtaatgcaaatataaatggtccccaccttaggatggttctacttaaaaattttcagtgtattgtactcctcatcataagtcgaggagtacaattatcctcctcaaccatgtcaataaatactcagacttgtggaaggttctgggccaggctctgggaaagcaaagaggtgacaaagtctttgccagaaaatttctgcccttcagaggaagagagcagaagaggtcaaggaaaaatttaagtccccagagggcagaaaccatacctacccgggcacagttaacgaacacataataaacagcctagaaatgtttgttattactcataattgttacggcaaacactttgggtttcgggt

SEQ ID NO: 26365 - DNA, 344 bp, Homo sapiens
aattacgaattgggaagccacagttaccaccagtgtgcttgtaaacagtttttaagataaacattcatgtggtgactctacttggagttgccaaattccacatattttctcaaagcagaagctttgcataagtctatacaagtgaccagcctcctctttttcagggttgtactctctcaccaacagcttttctaggtcacccatgcttatttttctggttcaacctctcctactcattatatattttttttctggtataatatatacacatttttagtgtgattcttttgtactagtcaatatgcattacataagttttctctgaccttcctatttctctcgat

SEQ ID NO: 26366 - DNA, 381 bp, Homo sapiens
gaggtcgaggtaggaggatcacttgggcctaggagctggaggctgcagtgagccatgatctcaccactatactccagcctcggtgacacagtgagaccccaactctaaaaagaaatactaataataagaaaaataagaaaagcctaagaggtaatgagacctttaatagtttaggccagacttttaacacgacttaaattttacaaactgataataataaagcttacctggaaaatagatttgtacttgtaggcaatacatttttgaaaaagaatattgaggagaggcttgttcagccagctatcaaaatatatcaggtaggtaggacgtggtggcacgcctgtaatcttagtgctttgggaggctgaagctgaggattgc

SEQ ID NO: 26367 - DNA, 231 bp, Homo sapiens
gcctgaagccacagggatgctgatgaccacagaaggaagggcttttaaaaagtgttcttttctgattataaaagtaacataggtcatagtagaaatttaaaaactacagatgagctggatgtggtggctcacatctgtaatcccagtgctttgggaggctgaattgggaggattgcttgaggccaggagttcaaaaccaacctgggcaacatagcaagattctgtctctac

SEQ ID NO: 26368 - DNA, 2447 bp, Homo sapiens
gacagtggaagtcccacctgcgcccgacggcggaagttccgggagtgccaagtacccgcgtgcatacggctgccggcatggcacattacaacttcaagaaaattacggtggtgccgtccgccaaggacttcatagacctcacgttgtcgaagactcaacgaaagactccaaccgttattcataaacattaccaaatacatcgcattagacatttttacatgagaaaagtcaaatttactcaacagaattaccatgatagactttcacaaattctaacagatttccccaaattggatgatattcatccgttctatgctgatttgatgaatattctctacgacaaggatcattacaagttggctctggggcaaataaatattgccaaaaatttagtggacaatgttgctaaagattatgtgcgactgatgaagtatggcgactctctctaccgctgcaaacagctgaagcgtgcggccctgggacggatgtgcacagtgatcaagaggcagaagcagagtttggagtatttggagcaagtgcgtcagcatttatcccgtttgccaaccattgatccgaataccaggaccctgcttttgtgtgggtacccaaatgttgggaagtccagcttcatcaacaaggtgacgagagcagacgtggatgtccagccctatgcgttcacaaccaagtctctgtttgttgggcacatggattataagtatctacgttggcaggttgtagacactcctgggatcctggaccaccctctggaggataggaacaccatcgagatgcaggccatcactgccctggcccacctccgtgctgcggtcctgtatgtgatggatttgtctgagcagtgtgggcatgggctgagggagcagctagaactcttccagaacatcagacctctcttcatcaacaagcctctcatagttgtagccaacaaatgtgatgtgaagagaatagctgaactttctgaagatgatcagaaaatatttacagatttgcagtctgaaggattccctgtaatagagaccagcaccctgactgaggaaggtgttattaaagttaaaacagaggcttgcgataggcttttggctcatcgagtggaaaccaaaatgaagggaaataaagtgaatgaggtgctgaatagactgcacctggctatcccaaccaggagggacgataaggagaggccccctttcatccctgaaggagtggtggctcgcaggaagaggatggaaactgaggagtccaggaagaagagggaacgagatcttgagctggaaatgggagatgattatattttggatcttcagaagtactgggatttaatgaatttgtctgaaaaacatgataagataccagaaatctgggaaggccataatatagctgattatattgatccagccatcatgaagaaattggaagaattagaaaaagaagaagagctgagaacagctgctggagagtatgacagtgtatctgagagtgaagacgaagagatgctggaaatccgacagctggcaaagcaaattcgagagaaaaagaagttgaaaattctggagtccaaagaaaagaatacacagggacccaggatgccgcgaactgctaagaaggttcagaggacagttttggagaaggagatgcgtagtcttggtgttgacatggacgataaagacgatgcccattacgcagtccaggcaagaagatcccggagcatcactaggaaaagaaagcgggaagactctgctcccccgtcctctgtggcccggagtgggagttgctctcgaactccacgtgacgtttctggtcttagggatgtcaagatggtgaagaaagccaagactatgatgaagaatgctcagaagaagatgaatcggttggggaagaaaggggaggcggatagacacgtgtttgatatgaagcccaagcacttgctgtctgggaagaggaaagctggtaaaaaggacaggagatagtatccgtttggttggcgtggcttcgctagagtgttgctgtttatttcctggtttggcacagtatggtttcatgaaattggagctctgtataaactgaaaaagacaaaataagtaaagcacttgttgctttgctgaaaactatggttaaccctatataggtgtgggaaatttttgtcactgcataatattacaaatattttgagtagacagtgtttccacatttaatggagtatcagttgcttcagattttcagaactgggaagatttactggtgtaactgggttgtttttgatggagaaaaaccttattttcttttgtaagagctgggagcaaacacgtttatgagtgtgtcggaatcccgtgcttaaaatacgctcttaaattattttctagtcttattttacaatgtctcattgtagtctgtcttcaactattttatccaaaataaacctccagaagaaagta

SEQ ID NO: 26369 - DNA, 2523 bp, Homo sapiens
gacagtggaagtcccacctgcgcccgacggcggaagttccgggagtgccaagtacccgcgtgcatacggctgccggcatggcacattacaacttcaagaaaattacggtggtgccgtccgccaaggacttcatagacctcacgttgtcgaagactcaacgaaagactccaaccgttattcataaacattaccaaatacatcgcattagacatttttacatgagaaaagtcaaatttactcaacagaattaccatgatagactttcacaaattctaacagatttccccaaattggatgatattcatccgttctatgctgatttgatgaatattctctacgacaaggatcattacaagttggctctggggcaaataaatattgccaaaaatttagtggacaatgttgctaaagattatgtgcgactgatgaagtatggcgactctctctaccgctgcaaacagctgaagcgtgcggccctgggacggatgtgcacagtgatcaagaggcagaagcagagtttggagtatttggagcaagtgcgtcagcatttatcccgtttgccaaccattgatccgaataccaggaccctgcttttgtgtgggtacccaaatgttgggaagtccagcttcatcaacaaggtgacgagagcagacgtggatgtccagccctatgcgttcacaaccaagtctctgtttgttgggcacatggattataagtatctacgttggcaggttgtagacactcctgggatcctggaccaccctctggaggataggaacaccatcgagatgcaggccatcactgccctggcccacctccgtgctgcggtcctgtatgtgatggatttgtctgagcagtgtgggcatgggctgagggagcagctagaactcttccagaacatcagacctctcttcatcaacaagcctctcatagttgtagccaacaaatgtgatgtgaagagaatagctgaactttctgaagatgatcagaaaatatttacagatttgcagtctgaaggattccctgtaatagagaccagcaccctgactgaggaaggtgttattaaagttaaaacagaggcttgcgataggcttttggctcatcgagtggaaaccaaaatgaagggaaataaagtgaatgaggtgctgaatagactgcacctggctatcccaaccaggagggacgataaggagaggccccctttcatccctgaaggagtggtggctcgcaggaagaggatggaaactgaggagtccaggaagaagagggaacgagatcttgagctggaaatgggagatgattatattttggatcttcagaagtactgggatttaatgaatttgtctgaaaaacatgataagataccagaaatctgggaaggccataatatagctgattatattgatccagccatcatgaagaaattggaagaattagaaaaagaagaagagctgagaacagctgctggagagtatgacagtgtatctgagagtgaagacgaagagatgctggaaatccgacagctggcaaagcaaattcgagagaaaaagaagttgaaaattctggagtccaaagaaaagaatacacagggacccaggatgccgcgaactgctaagaaggttcagaggacagttttggagaaggagatgcgtagtcttggtgttgacatggacgataaagacgatgcccattacgcagtccaggcaagaagatcccggagcatcactaggaaaagaaagcgggaagactctgctcccccgtcctctgtggcccggagtgggagttgctctcgaactccacgtgacgtttctggtcttagggatgtcaagatggtgaagaaagccaagactatgatgaagaatgctcagaagaagatgaatcggttggggaagaaaggggaggcggatagacacgtgtttgatatgaagcccaagcacttgctgtctgggaagaggaaagctggtaaaaaggacaggagatagtatccgtttggttggcgtggcttcgctagagtgttgctgtttatttcctggtttggcacagtatggtttcatgaaattggagctctgtataaactgaaaaagacaaaataagtaaagcacttgttgctttgctgaaaactatggttaaccctatataggtgtgggaaatttttgtcactgcataatattacaaatattttgagtagacagtgtttccacatttaatggagtatcagttgcttcagattttcagaactgggaagatttactggtgtaactgggttgtttttgatggagaaaaaccttattttcttttgtaagagctgggagcaaacacgtttatgagtgtgtcggaatcccgtgcttaaaatacgctcttaaattattttctagtcttattttacaatgtctcattgtagtctgtcttcaactattttatccaaaataaacctccagaagaaagtagttttcatttacttagctcatgttttggtttagttatagtcgctatggatttggccaaataaaaaggcaaacaaca

SEQ ID NO: 26370 - DNA, 1402 bp, Homo sapiens
gtgtttccacatttaatggagtatcactgtctactcaaaatattgaaatattttgagtagacagtgtttccacatttaatggagtatcagttgcttcagattttcagaactgggaagatttactggtgtaactgggttgtttttgatggagaaaaaccttattttcttttgtaagagctgggagcaaacacgtttatgagtgtgtcggaatcccgtgcttaaaatacgctcttaaattattttctagtcttattttacaatgtctcattgtagtctgtcttcaactattttatccaaaataaacctccagaagaaagtagttttcatttacttagctcatgttttggtttagttatagtcgctatggatttggccaaataaaaaggcaaacaacatgacatttctattttgttttaaagcaaaaatacttttgggggagtaaaatgttgctggaggcattaggcaattaaatatgggcattctcctatttctgtggcccgtccctgaagttacatgttcagtaaaacacaaaaacaccgccaatgccacctcaaaagcacctgctggggagcgttggggtgaagagctgtggggtcggagggacctgcccaggggtccgtgtgctcctggagctccaaagacacacaggggtccaagagccaccacggataagttatcaagtcacacaatcaacattatagctgaggaaaggactttagttaatcacacttctggattacatgtggcaattttaaaaatttaccagggctgggctgggcgcaggggctcaagcctgtagttccagcactttgggaggccgaggtgggcagatcaggaggtcaggagttcgagaccagcctggccaacatggtgaaaccccatctctactaaaaatacaaaaattagccatgcgtggtggtgggcatctgtaatcctagctgctcgggaggctaaggcaggagaattgcttgagcccagaggcggaggttgcagtgagccgagatcgtgccactgcactccagcctgggtgacagagagagactccgtgtgaaaaaaaaaaaaaaaataccaggtctggtttttgaaattctttctccgtattaaacaccaaaacttaacatatagtttactttgtgttaaacaacaacagtatggccgggcgcggcagctcatgcctgtaatcccagcactttgggaggccgaggcaggcggatcacgaggtcaggagatcgagaccatcctggctaacacggtgaaaccccgtctctactaaaaatacaaaaaattagctgggtgtggtggcgggcgcctgtattcccaactacttgggaggctgaggcaggtagaatggcttgaacccgggaggcggagcttgcagtgagccaatatcgcaccactgctc

SEQ ID NO: 26371 - DNA, 3530 bp, Homo sapiens
gacagtggaagtcccacctgcgcccgacggcggaagttccgggagtgccaagtacccgcgtgcatacggctgccggcatggcacattacaacttcaagaaaattacggtggtgccgtccgccaaggacttcatagacctcacgttgtcgaagactcaacgaaagactccaaccgttattcataaacattaccaaatacatcgcattagacatttttacatgagaaaagtcaaatttactcaacagaattaccatgatagactttcacaaattctaacagatttccccaaattggatgatattcatccgttctatgctgatttgatgaatattctctacgacaaggatcattacaagttggctctggggcaaataaatattgccaaaaatttagtggacaatgttgctaaagattatgtgcgactgatgaagtatggcgactctctctaccgctgcaaacagctgaagcgtgcggccctgggacggatgtgcacagtgatcaagaggcagaagcagagtttggagtatttggagcaagtgcgtcagcatttatcccgtttgccaaccattgatccgaataccaggaccctgcttttgtgtgggtacccaaatgttgggaagtccagcttcatcaacaaggtgacgagagcagacgtggatgtccagccctatgcgttcacaaccaagtctctgtttgttgggcacatggattataagtatctacgttggcaggttgtagacactcctgggatcctggaccaccctctggaggataggaacaccatcgagatgcaggccatcactgccctggcccacctccgtgctgcggtcctgtatgtgatggatttgtctgagcagtgtgggcatgggctgagggagcagctagaactcttccagaacatcagacctctcttcatcaacaagcctctcatagttgtagccaacaaatgtgatgtgaagagaatagctgaactttctgaagatgatcagaaaatatttacagatttgcagtctgaaggattccctgtaatagagaccagcaccctgactgaggaaggtgttattaaagttaaaacagaggcttgcgataggcttttggctcatcgagtggaaaccaaaatgaagggaaataaagtgaatgaggtgctgaatagactgcacctggctatcccaaccaggagggacgataaggagaggccccctttcatccctgaaggagtggtggctcgcaggaagaggatggaaactgaggagtccaggaagaagagggaacgagatcttgagctggaaatgggagatgattatattttggatcttcagaagtactgggatttaatgaatttgtctgaaaaacatgataagataccagaaatctgggaaggccataatatagctgattatattgatccagccatcatgaagaaattggaagaattagaaaaagaagaagagctgagaacagctgctggagagtatgacagtgtatctgagagtgaagacgaagagatgctggaaatccgacagctggcaaagcaaattcgagagaaaaagaagttgaaaattctggagtccaaagaaaagaatacacagggacccaggatgccgcgaactgctaagaaggttcagaggacagttttggagaaggagatgcgtagtcttggtgttgacatggacgataaagacgatgcccattacgcagtccaggcaagaagatcccggagcatcactaggaaaagaaagcgggaagactctgctcccccgtcctctgtggcccggagtgggagttgctctcgaactccacgtgacgtttctggtcttagggatgtcaagatggtgaagaaagccaagactatgatgaagaatgctcagaagaagatgaatcggttggggaagaaaggggaggcggatagacacgtgtttgatatgaagcccaagcacttgctgtctgggaagaggaaagctggtaaaaaggacaggagatagtatccgtttggttggcgtggcttcgctagagtgttgctgtttatttcctggtttggcacagtatggtttcatgaaattggagctctgtataaactgaaaaagacaaaataagtaaagcacttgttgctttgctgaaaactatggttaaccctatataggtgtgggaaatttttgtcactgcataatattacaaatattttgagtagacagtgtttccacatttaatggagtatcagttgcttcagattttcagaactgggaagatttactggtgtaactgggttgtttttgatggagaaaaaccttattttcttttgtaagagctgggagcaaacacgtttatgagtgtgtcggaatcccgtgcttaaaatacgctcttaaattattttctagtcttattttacaatgtctcattgtagtctgtcttcaactattttatccaaaataaacctccagaagaaagtagttttcatttacttagctcatgttttggtttagttatagtcgctatggatttggccaaataaaaaggcaaacaacatgacatttctattttgttttaaagcaaaaatacttttgggggagtaaaatgttgctggaggcattaggcaattaaatatgggcattctcctatttctgtggcccgtccctgaagttacatgttcagtaaaacacaaaaacaccgccaatgccacctcaaaagcacctgctggggagcgttggggtgaagagctgtggggtcggagggacctgcccaggggtccgtgtgctcctggagctccaaagacacacaggggtccaagagccaccacggataagttatcaagtcacacaatcaacattatagctgaggaaaggactttagttaatcacacttctggattacatgtggcaattttaaaaatttaccagggctgggctgggcgcaggggctcaagcctgtagttccagcactttgggaggccgaggtgggcagatcaggaggtcaggagttcgagaccagcctggccaacatggtgaaaccccatctctactaaaaatacaaaaattagccatgcgtggtggtgggcatctgtaatcctagctgctcgggaggctaaggcaggagaattgcttgagcccagaggcggaggttgcagtgagccgagatcgtgccactgcactccagcctgggtgacagagagagactccgtgtgaaaaaaaaaaaaaaaataccaggtctggtttttgaaattctttctccgtattaaacaccaaaacttaacatatagtttactttgtgttaaacaacaacagtatggccgggcgcggcagctcatgcctgtaatcccagcactttgggaggccgaggcaggcggatcacgaggtcaggagatcgagaccatcctggctaacacggtgaaaccccgtctctactaaaaatacaaaaaattagctgggtgtggtggcgggcgcctgtattcccaactacttgggaggctgaggcaggtagaatggcttgaacccgggaggcggagcttgcagtgagccaatatcgcaccactgctc

SEQ ID NO: 26372 - DNA, 2405 bp, Homo sapiens
gacagtggaagtcccacctgcgcccgacggcggaagttccgggagtgccaagtacccgcgtgcatacggctgccggcatggcacattacaacttcaagaaaattacggtggtgccgtccgccaaggacttcatagacctcacgttgtcgaagactcaacgaaagactccaaccgttattcataaacattaccaaatacatcgcattagacatttttacatgagaaaagtcaaatttactcaacagaattaccatgatagactttcacaaattctaacagatttccccaaattggatgatattcatccgttctatgctgatttgatgaatattctctacgacaaggatcattacaagttggctctggggcaaataaatattgccaaaaatttagtggacaatgttgctaaagattatgtgcgactgatgaagtatggcgactctctctaccgctgcaaacagctgaagcgtgcggccctgggacggatgtgcacagtgatcaagaggcagaagcagagtttggagtatttggagcaagtgcgtcagcatttatcccgtttgccaaccattgatccgaataccaggaccctgcttttgtgtgggtacccaaatgttgggaagtccagcttcatcaacaaggtgacgagagcagacgtggatgtccagccctatgcgttcacaaccaagtctctgtttgttgggcacatggattataagtatctacgttggcaggttgtagacactcctgggatcctggaccaccctctggaggataggaacaccatcgagatgcaggccatcactgccctggcccacctccgtgctgcggtcctgtatgtgatggatttgtctgagcagtgtgggcatgggctgagggagcagctagaactcttccagaacatcagacctctcttcatcaacaagcctctcatagttgtagccaacaaatgtgatgtgaagagaatagctgaactttctgaagatgatcagaaaatatttacagatttgcagtctgaaggattccctgtaatagagaccagcaccctgactgaggaaggtgttattaaagttaaaacagaggcttgcgataggcttttggctcatcgagtggaaaccaaaatgaagggaaataaagtgaatgaggtgctgaatagactgcacctggctatcccaaccaggagggacgataaggagaggccccctttcatccctgaaggagtggtggctcgcaggaagaggatggaaactgaggagtccaggaagaagagggaacgagatcttgagctggaaatgggagatgattatattttggatcttcagaagtactgggatttaatgaatttgtctgaaaaacatgataagataccagaaatctgggaaggccataatatagctgattatattgatccagccatcatgaagaaattggaagaattagaaaaagaagaagagctgagaacagctgctggagagtatgacagtgtatctgagagtgaagacgaagagatgctggaaatccgacagctggcaaagcaaattcgagagaaaaagaagttgaaaattctggagtccaaagaaaagaatacacagggacccaggatgccgcgaactgctaagaaggttcagaggacagttttggagaaggagatgcgtagtcttggtgttgacatggacgataaagacgatgcccattacgcagtccaggcaagaagatccccgtcctctgtggcccggagtgggagttgctctcgaactccacgtgacgtttctggtcttagggatgtcaagatggtgaagaaagccaagactatgatgaagaatgctcagaagaagatgaatcggttggggaagaaaggggaggcggatagacacgtgtttgatatgaagcccaagcacttgctgtctgggaagaggaaagctggtaaaaaggacaggagatagtatccgtttggttggcgtggcttcgctagagtgttgctgtttatttcctggtttggcacagtatggtttcatgaaattggagctctgtataaactgaaaaagacaaaataagtaaagcacttgttgctttgctgaaaactatggttaaccctatataggtgtgggaaatttttgtcactgcataatattacaaatattttgagtagacagtgtttccacatttaatggagtatcagttgcttcagattttcagaactgggaagatttactggtgtaactgggttgtttttgatggagaaaaaccttattttcttttgtaagagctgggagcaaacacgtttatgagtgtgtcggaatcccgtgcttaaaatacgctcttaaattattttctagtcttattttacaatgtctcattgtagtctgtcttcaactattttatccaaaataaacctccagaagaaagta

SEQ ID NO: 26373 - DNA, 2567 bp, Homo sapiens
cggggtccaccagagatcggatcccccagagaccggggtccacctaagaccgtggtccacccaaagactgagggcccccagagatgggggtacacccagagttgggttccctggaggggccccgggtgacgatgtgggcgagtggagggggaccccgacatgtgagggaggaagcgttccgtggtccgtgatgagccttcggattctgggtttggcgtagccccctcccctctcaggaatcctgggacttcatagacctcacgttgtcgaagactcaacgaaagactccaaccgttattcataaacattaccaaatacatcgcattagacatttttacatgagaaaagtcaaatttactcaacagaattaccatgatagactttcacaaattctaacagatttccccaaattggatgatattcatccgttctatgctgatttgatgaatattctctacgacaaggatcattacaagttggctctggggcaaataaatattgccaaaaatttagtggacaatgttgctaaagattatgtgcgactgatgaagtatggcgactctctctaccgctgcaaacagctgaagcgtgcggccctgggacggatgtgcacagtgatcaagaggcagaagcagagtttggagtatttggagcaagtgcgtcagcatttatcccgtttgccaaccattgatccgaataccaggaccctgcttttgtgtgggtacccaaatgttgggaagtccagcttcatcaacaaggtgacgagagcagacgtggatgtccagccctatgcgttcacaaccaagtctctgtttgttgggcacatggattataagtatctacgttggcaggttgtagacactcctgggatcctggaccaccctctggaggataggaacaccatcgagatgcaggccatcactgccctggcccacctccgtgctgcggtcctgtatgtgatggatttgtctgagcagtgtgggcatgggctgagggagcagctagaactcttccagaacatcagacctctcttcatcaacaagcctctcatagttgtagccaacaaatgtgatgtgaagagaatagctgaactttctgaagatgatcagaaaatatttacagatttgcagtctgaaggattccctgtaatagagaccagcaccctgactgaggaaggtgttattaaagttaaaacagaggcttgcgataggcttttggctcatcgagtggaaaccaaaatgaagggaaataaagtgaatgaggtgctgaatagactgcacctggctatcccaaccaggagggacgataaggagaggccccctttcatccctgaaggagtggtggctcgcaggaagaggatggaaactgaggagtccaggaagaagagggaacgagatcttgagctggaaatgggagatgattatattttggatcttcagaagtactgggatttaatgaatttgtctgaaaaacatgataagataccagaaatctgggaaggccataatatagctgattatattgatccagccatcatgaagaaattggaagaattagaaaaagaagaagagctgagaacagctgctggagagtatgacagtgtatctgagagtgaagacgaagagatgctggaaatccgacagctggcaaagcaaattcgagagaaaaagaagttgaaaattctggagtccaaagaaaagaatacacagggacccaggatgccgcgaactgctaagaaggttcagaggacagttttggagaaggagatgcgtagtcttggtgttgacatggacgataaagacgatgcccattacgcagtccaggcaagaagatcccggagcatcactaggaaaagaaagcgggaagactctgctcccccgtcctctgtggcccggagtgggagttgctctcgaactccacgtgacgtttctggtcttagggatgtcaagatggtgaagaaagccaagactatgatgaagaatgctcagaagaagatgaatcggttggggaagaaaggggaggcggatagacacgtgtttgatatgaagcccaagcacttgctgtctgggaagaggaaagctggtaaaaaggacaggagatagtatccgtttggttggcgtggcttcgctagagtgttgctgtttatttcctggtttggcacagtatggtttcatgaaattggagctctgtataaactgaaaaagacaaaataagtaaagcacttgttgctttgctgaaaactatggttaaccctatataggtgtgggaaatttttgtcactgcataatattacaaatattttgagtagacagtgtttccacatttaatggagtatcagttgcttcagattttcagaactgggaagatttactggtgtaactgggttgtttttgatggagaaaaaccttattttcttttgtaagagctgggagcaaacacgtttatgagtgtgtcggaatcccgtgcttaaaatacgctcttaaattattttctagtcttattttacaatgtctcattgtagtctgtcttcaactattttatccaaaataaacctccagaagaaagta

SEQ ID NO: 26374 - DNA, 2048 bp, Homo sapiens
gacagtggaagtcccacctgcgcccgacggcggaagttccgggagtgccaagtacccgcgtgcatacggctgccggcatggcacattacaacttcaagaaaattacggtggtgccgtccgccaaggacttcatagacctcacgttgtcgaagactcaacgaaagactccaaccgttattcataaacattaccaaatacatcgcattagacatttttacatgagaaaagtcaaatttactcaacagaattaccatgatagactttcacaaattctaacagatttccccaaattggatgatattcatccgttctatgctgatttgatgaatattctctacgacaaggatcattacaagttggctctggggcaaataaatattgccaaaaatttagtggacaatgttgctaaagattatgtgcgactgatgaagtatggcgactctctctaccgctgcaaacagctgaagcgtgcggccctgggacggatgtgcacagtgatcaagaggcagaagcagagtttggagtatttggagcaagtgcgtcagcatttatcccgtttgccaaccattgatccgaataccaggaccctgcttttgtgtgggtacccaaatgttgggaagtccagcttcatcaacaaggtgacgagagcagacgtggatgtccagccctatgcgttcacaaccaagtctctgtttgttgggcacatggattataagtatctacgttggcaggttgtagacactcctgggatcctggaccaccctctggaggataggaacaccatcgagatgcaggccatcactgccctggcccacctccgtgctgcggtcctgtatgtgatggatttgtctgagcagtgtgggcatgggctgagggagcagctagaactcttccagaacatcagacctctcttcatcaacaagcctctcatagttgtagccaacaaatgtgatgtgaagagaatagctgaactttctgaagatgatcagaaaatatttacagatttgcagtctgaaggattccctgtaatagagaccagcaccctgactgaggaaggtgttattaaagttaaaacagaggcttgcgataggcttttggctcatcgagtggaaaccaaaatgaagggaaataaagtgaatgaggtgctgaatagactgcacctggctatcccaaccaggagggacgataaggagaggccccctttcatccctgaaggagtggtggctcgcaggaagaggatggaaactgaggagtccaggaagaagagggaacgagatcttgagctggaaatgggagatgattatattttggatcttcagaagtactgggatttaatgaatttgtctgaaaaacatgataagataccagaaatctgggaaggccataatatagctgattatattgatccagccatcatgaagaaattggaagaattagaaaaagaagaagagctgagaacagctgctggagagtatgacagtgtatctgagagtgaagacgaagagatgctggaaatccgacagctggcaaagcaaattcgagagaaaaagaagttgaaaattctggagtccaaagaaaagaatacacagggacccaggatgccgcgaactgctaagaaggttcagaggacagttttggagaaggagatgcgtagtcttggtgttgacatggacgataaagacgatgcccattacgcagtccaggcaagaagatcccggagcatcactaggaaaagaaagcgggaagactctgctcccccgtcctctgtggcccggagtgggagttgctctcgaactccacgtgacgtttctggtcttagggatgtcaagatggtgaagaaagccaagactatgatgaagaatgctcagaagaagatgaatcggttggggaagaaaggggaggcggatagacacgtgtttgatatgaagcccaagcacttgctgtctgggaagaggaaagctggtaaaaaggacaggagatagtatccgtttggttggcgtggcttcgctagagtgttgctccaatgcggggaccgagctcgagtcgta

SEQ ID NO: 26375 - DNA, 1640 bp, Homo sapiens
agcggcccgcctactactactaaaatttccggccgcgtcgacctgagcagtgtgggcatgggctgagggagcagctagaactcttccagaacatcagacctctcttcatcaacaagcctctcatagttgtagccaacaaatgtgatgtgaagagaatagctgaactttctgaagatgatcagaaaatatttacagatttgcagtctgaaggattccctgtaatagagaccagcaccctgactgaggaaggtgttattaaagttaaaacagaggcttgcgataggcttttggctcatcgagtggaaaccaaaatgaagggaaataaagtgaatgaggtgctgaatagactgcacctggctatcccaaccaggagggacgataaggagaggccccctttcatccctgaaggagtggtggctcgcaggaagaggatggaaactgaggagtccaggaagaagagggaacgagatcttgagctggaaatgggagatgattatattttggatcttcagaagtactgggatttaatgaatttgtctgaaaaacatgataagataccagaaatctgggaaggccataatatagctgattatattgatccagccatcatgaagaaattggaagaattagaaaaagaagaagagctgagaacagctgctggagagtatgacagtgtatctgagagtgaagacgaagagatgctggaaatccgacagctggcaaagcaaattcgagagaaaaagaagttgaaaattctggagtccaaagaaaagaatacacagggacccaggatgccgcgaactgctaagaaggttcagaggacagttttggagaaggagatgcgtagtcttggtgttgacatggacgataaagacgatgcccattacgcagtccaggcaagaagatcccggagcatcactaggaaaagaaagcgggaagactctgctcccccgtcctctgtggcccggagtgggagttgctctcgaactccacgtgacgtttctggtcttagggatgtcaagatggtgaagaaagccaagactatgatgaagaatgctcagaagaagatgaatcggttggggaagaaaggggaggcggatagacacgtgtttgatatgaagcccaagcacttgctgtctgggaagaggaaagctggtaaaaaggacaggagatagtatccgtttggttggcgtggcttcgctagagtgttgctgtttatttcctggtttggcacagtatggtttcatgaaattggagctctgtataaactgaaaaagacaaaataagtaaagcacttgttgctttgctgaaaactatggttaaccctatataggtgtgggaaatttttgtcactgcataatattacaaatattttgagtagacagtgtttccacatttaatggagtatcagttgcttcagattttcagaactgggaagatttactggtgtaactgggttgtttttgatggagaaaaaccttattttcttttgtaagagctgggagcaaacacgtttatgagtgtgtcggaatcccgtgcttaaaatacgctcttaaattattttctagtcttattttacaatgtctcattgtagtctgtcttcaactattttatccaaaataaacctccagaagaaagta

SEQ ID NO: 26376 - DNA, 1437 bp, Homo sapiens
gggtgctggtctctattacaggaatccttcagactgactgaggaaggtgttattaaagttaaaacagaggcttgcgataggcttttggctcatcgagtggaaaccaaaatgaagggaaataaagtgaatgaggtgctgaatagactgcacctggctatcccaaccaggagggacgataaggagaggccccctttcatccctgaaggagtggtggctcgcaggaagaggatggaaactgaggagtccaggaagaagagggaacgagatcttgagctggaaatgggagatgattatattttggatcttcagaagtactgggatttaatgaatttgtctgaaaaacatgataagataccagaaatctgggaaggccataatatagctgattatattgatccagccatcatgaagaaattggaagaattagaaaaagaagaagagctgagaacagctgctggagagtatgacagtgtatctgagagtgaagacgaagagatgctggaaatccgacagctggcaaagcaaattcgagagaaaaagaagttgaaaattctggagtccaaagaaaagaatacacagggacccaggatgccgcgaactgctaagaaggttcagaggacagttttggagaaggagatgcgtagtcttggtgttgacatggacgataaagacgatgcccattacgcagtccaggcaagaagatcccggagcatcactaggaaaagaaagcgggaagactctgctcccccgtcctctgtggcccggagtgggagttgctctcgaactccacgtgacgtttctggtcttagggatgtcaagatggtgaagaaagccaagactatgatgaagaatgctcagaagaagatgaatcggttggggaagaaaggggaggcggatagacacgtgtttgatatgaagcccaagcacttgctgtctgggaagaggaaagctggtaaaaaggacaggagatagtatccgtttggttggcgtggcttcgctagagtgttgctgtttatttcctggtttggcacagtatggtttcatgaaattggagctctgtataaactgaaaaagacaaaataagtaaagcacttgttgctttgctgaaaactatggttaaccctatataggtgtgggaaatttttgtcactgcataatattacaaatattttgagtagacagtgtttccacatttaatggagtatcagttgcttcagattttcagaactgggaagatttactggtgtaactgggttgtttttgatggagaaaaaccttattttcttttgtaagagctgggagcaaacacgtttatgagtgtgtcggaatcccgtgcttaaaatacgctcttaaattattttctagtcttattttacaatgtctcattgtagtctgtcttcaactattttatccaaaataaacctccagaagaaagta

SEQ ID NO: 26377 - DNA, 1673 bp, Homo sapiens
  misc_feature (1658)..(1658): n is a, c, g, or t
gacagtggaagtcccacctgcgcccgacggcggaagttccgggagtgccaagtacccgcgtgcatacggctgccggcatggcacattacaacttcaagaaaattacggtggtgccgtccgccaaggacttcatagacctcacgttgtcgaagactcaacgaaagactccaaccgttattcataaacattaccaaatacatcgcattagacatttttacatgagaaaagtcaaatttactcaacagaattaccatgatagactttcacaaattctaacagatttccccaaattggatgatattcatccgttctatgctgatttgatgaatattctctacgacaaggatcattacaagttggctctggggcaaataaatattgccaaaaatttagtggacaatgttgctaaagattatgtgcgactgatgaagtatggcgactctctctaccgctgcaaacagctgaagcgtgcggccctgggacggatgtgcacagtgatcaagaggcagaagcagagtttggagtatttggagcaagtgcgtcagcatttatcccgtttgccaaccattgatccgaataccaggaccctgcttttgtgtgggtacccaaatgttgggaagtccagcttcatcaacaaggtgacgagagcagacgtggatgtccagccctatgcgttcacaaccaagtctctgtttgttgggcacatggattataagtatctacgttggcaggttgtagacactcctgggatcctggaccaccctctggaggataggaacaccatcgagatgcaggccatcactgccctggcccacctccgtgctgcggtcctgtatgtgatggatttgtctgagcagtgtgggcatgggctgagggagcagctagaactcttccagaacatcagacctctcttcatcaacaagcctctcatagttgtagccaacaaatgtgatgtgaagagaatagctgaactttctgaagatgatcagaaaatatttacagatttgcagtctgaaggattccctgtaatagagaccagcaccctgactgaggaaggtgttattaaagttaaaacagaggcttgcgataggcttttggctcatcgagtggaaaccaaaatgaagggaaataaagtgaatgaggtgctgaatagactgcacctggctatcccaaccaggagggacgataaggagaggccccctttcatccctgaaggagtggtggctcgcaggaagaggatggaaactgaggagtccaggaagaagagggaacgagatcttgagctggaaatgggagatgattatattttggatcttcagaagtactgggatttaatgaatttgtctgaaaaacatgataagataccagaaatctgggaaggccataatatagctgattatattgatccagccatcatgaagaaattggaagaattagaaaaagaagaagagctgagaacagctgctggagagtatgacagtgtatctgagagtgaagacgaagagatgctggaaatccgacagctggcaaagcaaattcgagagaaaaagaagttgaaaattctggagtccaaagaaaagaatacacagggacccaggatgccgcgaactgctaagaagagagggcactggttttgagcctggggacacgatgaccanaaccactgggaagat

SEQ ID NO: 26378 - DNA, 1119 bp, Homo sapiens
  misc_feature (15)..(15): n is a, c, g, or t
agctgaaactcgagncggacccgcatggagcacactcactgactcagggttttctcattgttaatttgcttcattacaactccatttttaaagaaattggaagaattagaaaaagaagaagagctgagaacagctgctggagagtatgacagtgtatctgagagtgaagacgaagagatgctggaaatccgacagctggcaaagcaaattcgagagaaaaagaagttgaaaattctggagtccaaagaaaagaatacacagggacccaggatgccgcgaactgctaagaaggttcagaggacagttttggagaaggagatgcgtagtcttggtgttgacatggacgataaagacgatgcccattacgcagtccaggcaagaagatcccggagcatcactaggaaaagaaagcgggaagactctgctcccccgtcctctgtggcccggagtgggagttgctctcgaactccacgtgacgtttctggtcttagggatgtcaagatggtgaagaaagccaagactatgatgaagaatgctcagaagaagatgaatcggttggggaagaaaggggaggcggatagacacgtgtttgatatgaagcccaagcacttgctgtctgggaagaggaaagctggtaaaaaggacaggagatagtatccgtttggttggcgtggcttcgctagagtgttgctgtttatttcctggtttggcacagtatggtttcatgaaattggagctctgtataaactgaaaaagacaaaataagtaaagcacttgttgctttgctgaaaactatggttaaccctatataggtgtgggaaatttttgtcactgcataatattacaaatattttgagtagacagtgtttccacatttaatggagtatcagttgcttcagattttcagaactgggaagatttactggtgtaactgggttgtttttgatggagaaaaaccttattttcttttgtaagagctgggagcaaacacgtttatgagtgtgtcggaatcccgtgcttaaaatacgctcttaaattattttctagtcttattttacaatgtctcattgtagtctgtcttcaactattttatccaaaataaacctccagaagaaagta

SEQ ID NO: 26379 - DNA, 1348 bp, Homo sapiens
gacagtggaagtcccacctgcgcccgacggcggaagttccgggagtgccaagtacccgcgtgcatacggctgccggcatggcacattacaacttcaagaaaattacggtggtgccgtccgccaaggacttcatagacctcacgttgtcgaagactcaacgaaagactccaaccgttattcataaacattaccaaatacatcgcattagacatttttacatgagaaaagtcaaatttactcaacagaattaccatgatagactttcacaaattctaacagatttccccaaattggatgatattcatccgttctatgctgatttgatgaatattctctacgacaaggatcattacaagttggctctggggcaaataaatattgccaaaaatttagtggacaatgttgctaaagattatgtgcgactgatgaagtatggcgactctctctaccgctgcaaacagctgaagcgtgcggccctgggacggatgtgcacagtgatcaagaggcagaagcagagtttggagtatttggagcaagtgcgtcagcatttatcccgtttgccaaccattgatccgaataccaggaccctgcttttgtgtgggtacccaaatgttgggaagtccagcttcatcaacaaggtgacgagagcagacgtggatgtccagccctatgcgttcacaaccaagtctctgtttgttgggcacatggattataagtatctacgttggcaggttgtagacactcctgggatcctggaccaccctctggaggataggaacaccatcgagatgcaggccatcactgccctggcccacctccgtgctgcggtcctgtatgtgatggatttgtctgagcagtgtgggcatgggctgagggagcagctagaactcttccagaacatcagacctctcttcatcaacaagcctctcatagttgtagccaacaaatgtgatgtgaagagaatagctgaactttctgaagatgatcagaaaatatttacagatttgcagtctgaaggattccctgtaatagagaccagcaccctgactgaggaaggtgttattaaagttaaaacagaggcttgcgataggcttttggctcatcgagtggaaaccaaaatgaagggaaataaagtgaatgaggtgctgaatagactgcacctggctatcccaaccaggagggacgataaggagaggccccctttcatccctgaaggagtggtggctcgcaggaagaggatggaaactgaggagtccaggaagaagagggaacgagatcttgagctggaaatgggagatgattatattttggatcttcagaagtactgggatttaatgaatttgtctga

SEQ ID NO: 26380 - DNA, 1459 bp, Homo sapiens
gacagtggaagtcccacctgcgcccgacggcggaagttccgggagtgccaagtacccgcgtgcatacggctgccggcatggcacattacaacttcaagaaaattacggtggtgccgtccgccaaggacttcatagacctcacgttgtcgaagactcaacgaaagactccaaccgttattcataaacattaccaaatacatcgcattagacatttttacatgagaaaagtcaaatttactcaacagaattaccatgatagactttcacaaattctaacagatttccccaaattggatgatattcatccgttctatgctgatttgatgaatattctctacgacaaggatcattacaagttggctctggggcaaataaatattgccaaaaatttagtggacaatgttgctaaagattatgtgcgactgatgaagtatggcgactctctctaccgctgcaaacagctgaagcgtgcggccctgggacggatgtgcacagtgatcaagaggcagaagcagagtttggagtatttggagcaagtgcgtcagcatttatcccgtttgccaaccattgatccgaataccaggaccctgcttttgtgtgggtacccaaatgttgggaagtccagcttcatcaacaaggtgacgagagcagacgtggatgtccagccctatgcgttcacaaccaagtctctgtttgttgggcacatggattataagtatctacgttggcaggttgtagacactcctgggatcctggaccaccctctggaggataggaacaccatcgagatgcaggccatcactgccctggcccacctccgtgctgcggtcctgtatgtgatggatttgtctgagcagtgtgggcatgggctgagggagcagctagaactcttccagaacatcagacctctcttcatcaacaagcctctcatagttgtagccaacaaatgtgatgtgaagagaatagctgaactttctgaagatgatcagaaaatatttacagatttgcagtctgaaggattccctgtaatagagaccagcaccctgactgaggaaggtgttattaaagttaaaacagaggcttgcgataggcttttggctcatcgagtggaaaccaaaatgaagggaaataaagtgaatgaggtgctgaatagactgcacctggctatcccaaccaggagggacgataaggagaggccccctttcatccctgaaggagtggtggctcgcaggaagaggatggaaactgaggagtccaggaagaagagggaacgagatcttgagctggaaatgggagatgattatattttggatcttcagaagtactgggattacaggcgtgagctactgcgcccggcctaagctaagtgttttaatacatgacctcactgacatttcacagtaggcctgtgaagtatagcatgcagaagagctacagataaatttagggcccggagata

SEQ ID NO: 26381 - DNA, 1384 bp, Homo sapiens
gacagtggaagtcccacctgcgcccgacggcggaagttccgggagtgccaagtacccgcgtgcatacggctgccggcatggcacattacaacttcaagaaaattacggtggtgccgtccgccaaggacttcatagacctcacgttgtcgaagactcaacgaaagactccaaccgttattcataaacattaccaaatacatcgcattagacatttttacatgagaaaagtcaaatttactcaacagaattaccatgatagactttcacaaattctaacagatttccccaaattggatgatattcatccgttctatgctgatttgatgaatattctctacgacaaggatcattacaagttggctctggggcaaataaatattgccaaaaatttagtggacaatgttgctaaagattatgtgcgactgatgaagtatggcgactctctctaccgctgcaaacagctgaagcgtgcggccctgggacggatgtgcacagtgatcaagaggcagaagcagagtttggagtatttggagcaagtgcgtcagcatttatcccgtttgccaaccattgatccgaataccaggaccctgcttttgtgtgggtacccaaatgttgggaagtccagcttcatcaacaaggtgacgagagcagacgtggatgtccagccctatgcgttcacaaccaagtctctgtttgttgggcacatggattataagtatctacgttggcaggttgtagacactcctgggatcctggaccaccctctggaggataggaacaccatcgagatgcaggccatcactgccctggcccacctccgtgctgcggtcctgtatgtgatggatttgtctgagcagtgtgggcatgggctgagggagcagctagaactcttccagaacatcagacctctcttcatcaacaagcctctcatagttgtagccaacaaatgtgatgtgaagagaatagctgaactttctgaagatgatcagaaaatatttacagatttgcagtctgaaggattccctgtaatagagaccagcaccctgactgaggaaggtgttattaaagttaaaacagaggcttgcgataggcttttggctcatcgagtggaaaccaaaatgaagggaaataaagtgaatgaggtgctgaatagactgcacctggctatcccaaccaggagggacgataaggtaagacggcccctgggacagccgtgggctcacagtactgtcagcaggtgctgtctgcgtgccttttccagaagcctcccatccagcttcacacactcgcaggtggatattgtgggtgggcctcagtttcaccttcttgcttacataaaggatcgagaaggtgaagaaagtgcagaacgccacatggcacccgt

SEQ ID NO: 26382 - DNA, 381 bp, Homo sapiens
ccgcctcggcctcccagagtgctgggattacaggtgtgagccaccgcacccagccctacttttttttttttttaactacaattctgctgtaagattattaggtctggttgggtgtgtgtgagtgacttctgggatgtgctggacaagaagcttgtgggtgagtgtgctttcagtgacaaggtctggctgtgttaggttgtagacactcctgggatcctggaccaccctctggaggataggaacaccatcgagatgcaggccatcactgccctggcccacctccgtgctgcggtcctgtatgtgatggatttgtctgagcagtgtgggcatgggctgagggagcagctagaactcttccagaacatcagacctctcttcatc

SEQ ID NO: 26383 - DNA, 1308 bp, Homo sapiens
atccaatgctcctggagatttatggctatcccaaccaggagggacgataaggagaggccccctttcatccctgaaggagtggtggctcgcaggaagaggatggaaactgaggagtccaggaagaagagggaacgagatcttgagctggaaatgggagatgattatattttggatcttcagaagtactgggatttaatgaatttgtctgaaaaacatgataagataccagaaatctgggaaggccataatatagctgattatattgatccagccatcatgaagaaattggaagaattagaaaaagaagaagagctgagaacagctgctggagagtatgacagtgtatctgagagtgaagacgaagagatgctggaaatccgacagctggcaaagcaaattcgagagaaaaagaagttgaaaattctggagtccaaagaaaagaatacacagggacccaggatgccgcgaactgctaagaaggttcagaggacagttttggagaaggagatgcgtagtcttggtgttgacatggacgataaagacgatgcccattacgcagtccaggcaagaagatcccggagcatcactaggaaaagaaagcgggaagactctgctcccccgtcctctgtggcccggagtgggagttgctctcgaactccacgtgacgtttctggtcttagggatgtcaagatggtgaagaaagccaagactatgatgaagaatgctcagaagaagatgaatcggttggggaagaaaggggaggcggatagacacgtgtttgatatgaagcccaagcacttgctgtctgggaagaggaaagctggtaaaaaggacaggagatagtatccgtttggttggcgtggcttcgctagagtgttgctgtttatttcctggtttggcacagtatggtttcatgaaattggagctctgtataaactgaaaaagacaaaataagtaaagcacttgttgctttgctgaaaactatggttaaccctatataggtgtgggaaatttttgtcactgcataatattacaaatattttgagtagacagtgtttccacatttaatggagtatcagttgcttcagattttcagaactgggaagatttactggtgtaactgggttgtttttgatggagaaaaaccttattttcttttgtaagagctgggagcaaacacgtttatgagtgtgtcggaatcccgtgcttaaaatacgctcttaaattattttctagtcttattttacaatgtctcattgtagtctgtcttcaactattttatccaaaataaacctccagaagaaagta

SEQ ID NO: 26384 - DNA, 1648 bp, Homo sapiens
gacagtggaagtcccacctgcgcccgacggcggaagttccgggagtgccaagtacccgcgtgcatacggctgccggcatggcacattacaacttcaagaaaattacggtggtgccgtccgccaaggacttcatagacctcacgttgtcgaagactcaacgaaagactccaaccgttattcataaacattaccaaatacatcgcattagacatttttacatgagaaaagtcaaatttactcaacagaattaccatgatagactttcacaaattctaacagatttccccaaattggatgatattcatccgttctatgctgatttgatgaatattctctacgacaaggatcattacaagttggctctggggcaaataaatattgccaaaaatttagtggacaatgttgctaaagattatgtgcgactgatgaagtatggcgactctctctaccgctgcaaacagctgaagcgtgcggccctgggacggatgtgcacagtgatcaagaggcagaagcagagtttggagtatttggagcaagtgcgtcagcatttatcccgtttgccaaccattgatccgaataccaggaccctgcttttgtgtgggtacccaaatgttgggaagtccagcttcatcaacaaggtgacgagagcagacgtggatgtccagccctatgcgttcacaaccaagtctctgtttgttgggcacatggattataagtatctacgttggcaggttgtagacactcctgggatcctggaccaccctctggaggataggaacaccatcgagatgcaggccatcactgccctggcccacctccgtgctgcggtcctgtatgtgatggatttgtctgagcagtgtgggcatgggctgagggagcagctagaactcttccagaacatcagacctctcttcatcaacaagcctctcatagttgtagccaacaaatgtgatgtgaagagaatagctgaactttctgaagatgatcagaaaatatttacagatttgcagtctgaaggattccctgtaatagagaccagcaccctgactgaggaaggtgttattaaagttaaaacagaggcttgcgataggcttttggctcatcgagtggaaaccaaaatgaagggaaataaagtgaatgaggtgctgaatagactgcacctggctatcccaaccaggagggacgataaggagaggccccctttcatccctgaaggagtggtggctcgcaggaagaggatggaaactgaggagtccaggaagaagagggaacgagatcttgagctggaaatgggagatgattatattttggatcttcagaagtactgggatttaatgaatttgtctgaaaaacatgataagataccagaaatctgggaaggccataatatagctgattatattgatccagccatcatgaagaaattggaagaattagaaaaagaagaagagctgagaacagctgctggagagtatgacagtgtatctgagagtgaagacgaagagatgctggaaatccgacagctggcaaagcaaattcgagagaaaaagaagttgaaaattctggagtccaaagaaaagaatacacagggacccaggatgccgcgaactgctaagaagagtctgaagcgtcatggaggtgccggctc

SEQ ID NO: 26385 - DNA, 1706 bp, Homo sapiens
gacagtggaagtcccacctgcgcccgacggcggaagttccgggagtgccaagtacccgcgtgcatacggctgccggcatggcacattacaacttcaagaaaattacggtggtgccgtccgccaaggacttcatagacctcacgttgtcgaagactcaacgaaagactccaaccgttattcataaacattaccaaatacatcgcattagacatttttacatgagaaaagtcaaatttactcaacagaattaccatgatagactttcacaaattctaacagatttccccaaattggatgatattcatccgttctatgctgatttgatgaatattctctacgacaaggatcattacaagttggctctggggcaaataaatattgccaaaaatttagtggacaatgttgctaaagattatgtgcgactgatgaagtatggcgactctctctaccgctgcaaacagctgaagcgtgcggccctgggacggatgtgcacagtgatcaagaggcagaagcagagtttggagtatttggagcaagtgcgtcagcatttatcccgtttgccaaccattgatccgaataccaggaccctgcttttgtgtgggtacccaaatgttgggaagtccagcttcatcaacaaggtgacgagagcagacgtggatgtccagccctatgcgttcacaaccaagtctctgtttgttgggcacatggattataagtatctacgttggcaggttgtagacactcctgggatcctggaccaccctctggaggataggaacaccatcgagatgcaggccatcactgccctggcccacctccgtgctgcggtcctgtatgtgatggatttgtctgagcagtgtgggcatgggctgagggagcagctagaactcttccagaacatcagacctctcttcatcaacaagcctctcatagttgtagccaacaaatgtgatgtgaagagaatagctgaactttctgaagatgatcagaaaatatttacagatttgcagtctgaaggattccctgtaatagagaccagcaccctgactgaggaaggtgttattaaagttaaaacagaggcttgcgataggcttttggctcatcgagtggaaaccaaaatgaagggaaataaagtgaatgaggtgctgaatagactgcacctggctatcccaaccaggagggacgataaggagaggccccctttcatccctgaaggagtggtggctcgcaggaagaggatggaaactgaggagtccaggaagaagagggaacgagatcttgagctggaaatgggagatgattatattttggatcttcagaagtactgggatttaatgaatttgtctgaaaaacatgataagataccagaaatctgggaaggccataatatagctgattatattgatccagccatcatgaaggtttgtgtcactttttaaattgcggattgttttcctttttattatagtagtattgctggaagatagcagcatggcttcggctcagctgggcctgtccgcttcattctcctgcatccctccatcctgactctgccccctacaccaccttccccaccccgagactctggtggagatgctgggcctcttcattctcctgcacccctccatcctgactgtgcctcctgcaccaccttcccccccaccctgtgtctccgccaggccctgggatgggcttctgctgtgctg

SEQ ID NO: 26386 - DNA, 578 bp, Homo sapiens
cttgcaggtgctttgctacagatctgtgtggtcttcatgatggccggggtgccaccctggagccgtgtttgttacagacgaggtggcagagtggcagtaacccatgttgtagcccaaacggcatggcctgcaggcttcaaagtgcactggttccctaatgtcatcttgctaatgagaattgtctggacactgccagacatgctgttggccccacctgtcacctaatgaattaaaacgtgggcttagaagggctgaggaatatgattcttaccagagccaaacttgggagatagcaattgaatatactatgtgtatactattactttctgcaactattttctccatcacttttgcattacaaaagttggagtaagatgaatatcaccacaggcctggactgtaactaagttgaaaagaaaatttaaagcaaatcttaaactttgaatttcttaatttttcaatttgaacttttcctagtgcgtcagcatttatcccgtttgccaaccattgatccgaataccaggaccctgcttttgtgtgggtacccaaatgttgggaagtccagcttcatcaacaag

SEQ ID NO: 26387 - DNA, 423 bp, Homo sapiens
gttagcacaggaggataaggttgagcctaacccagctgggggctggaaggagtaagagttagcctggcaaagaaaaagaaagggcttttctggcaaagggaacactgtgtataggcactgagattaaagataacccagcagtgaaagtggagagataagcaaggaccagctcacaaggagctcatatgccatgctagggaatttggaatttattctgtagaccactgaagaatttaagtcttattaatggacatctaataccatgtagcaaggccacagttaaaaatacatatggggcccctactatgaactagatggtaagaactcaatggtgaagcaaacagacatgatttctgcaatcaacgtccctaatgtaaatgattttacaataaaaaaaattgtaaattataataaatgctatga

SEQ ID NO: 26388 - DNA, 3203 bp, Homo sapiens
ctttagcgtgcatcagaatcacctgtagggcttgttaaaacactaattgctgggcctcaacccaaaagcccccaaagtggcacttctgagttcctgctgatgttacaagggaccacacttttgagaatctgtgctttaagctaaggaaatattgcctggtgggttggctgcctggtattgggcatggaaatttgaattgctgattggtagatggtgtgtctggacttaactcacgtagtaaatactgctgatcaatacctaatcattccacatttattgagctccacctgtgtgtatgtgtacccaagcacacatgtgtgaagggctatagccaaagtatttttactagcctgtatgaaatcactagtccttatttttaaaggtctatggtttcttggaagtagtttgattgttgagagagacctttgatctgcagtgtaaatctaccagtcatgggccagaagggcaaaagcccagctttctctttggaaagactcaggctgtggttgttgatggccaggttttcctcaggctccaacaactgtgcttataccaagcagatcctcatcctccatataatcatctttgttattcgtgggggtttaattacattacaagtggccaaaacccctgttctcagtgaagaaccacattggatttgtattctgttcagttgtagtctacactgcagtcttattcctggttcaaactacctctttaaattgatttgtcttgtgctggtctgttaaatcctgccctccttggtgctagatccagttgtgcctcagggcagaggaaacaaaacacagctatcctgttggcctgtgttgtggttttgaagtttgtactttctctgtgggtgccagttaaatattggagagcaaggaatgtggacttgtatggctttgaaccaagagagggttatgagcctactggattgaggttaaaatccaagaaccaacatttagagctttgtgcttttctctcattccatcactttgtaatgatgatacttaacatgagcagggtgaatgacaggtactgacgaagtccaacacaaaggtataatacagcctgttgtctaaagccaaggagtcataaaaccatgagaaataaataggaatcaatagttagtagtgacattggtgctctctagaaatctcagcatgagctgctatagaataccctcccagcaacaaaacctaatcagtaaggccagctagacccaatggctcatgcctgtaatcccaacactttgggaggccaaggtgggaggatggcttgtgtccagaagttcgagaccagcctggacaacatagtgagatcctatctctataaaaaatcaaaaattagccaggcatggtggtgcatacctatagtcctggctatttgggaggctgaggcaggaggattgctttagccctggaggtcgaggctgcagtaagccatgattgcgccactgcactcagcccgggtgacaaagcaagaccctgtctcagaaaaaaagaaaattcaaggccagttaagacaaaatgctatgactttgaaattcacagaaagaaataacagtttagattaggtcttcaggtattcaggatagagataatctcctgaaaaacctgaatttcagagattcttagactggctgccaaaggatgaagctagtgaaggagaaaaagcttaaattccatcttgagctcttggattgtgataatacaatgatttcattaacttttcatttctgtatacctgttcatttggaatttaatgcttgacttctttgttcattttggatctaaacttctcttttcttccttccccattcacatctattagaagactgcatcaccatttctttggcccccttactctgttgtcctttcccttttctttcagtttttttaatcgcatgtctagtatattaagtctccatagccctcctgatgcagtagacagtgctatgctgtggatataataccaaccagaaattggcatttataaacctgttaagagactttaagcatgcttcaagaggcagttgacccactggaatttctataaggctggtacccttcccagagttacagaatcttaggtgccgtctctagtctgtgagggaggaactcccagcatccccattgcccacaaatggaatcctcactgtatccactaggagattagaaattaaggtttcttcactacttctatggtagggttgtctgaaattccctttcaggctgtgggtactggtcttgggttctagtcataaggggttccttataaggagcaggcggaggggagtacactttcatgtgatttaattttgatcctgccctctccagctgctccttcaaaagatacatcaaaagatagaaactctgggctgggcacagtggctcacacactttgggaggccaagcgggggtgcagatcacctgaggtcaggagtttgagaccagcctggccaatgtggtgaaaccccatctctactaaaaatacaaaaattagctgggcgtggtggtgcatgcctgtaatcccagctactcgggaggctgaggcaggagaatcgcttgaacccaggaggcggaggttgcagtgagccaagatggcgccattgcactccagcctgggcgacaagagcaaaactccgtctcaaaaaaaaaaaaaagatacaaagtctgcatttgatataatgccttaattactgggtctacaattaatgttgactgttttagattgtaagctcctggagagcagtattgctgtagtaggaatgttttaacagtgtcatatgaaaaagaacaaaataaatattttgattttgtgattctatgcaagtctttctgcccagagtgataatgcaataagctagtcttttcatagtctgcatagagtctggccattaccatcagtttttaagatgtccatattgtggccgggcgcggtggctcacgcctggtaatcccagcactttgggaggctgaggcaggtggatcatgaggtcaggagatcgagaccatcctggctaacacggtgaaacccgtctctactaaaaaaaatattaaaaaattagccaggcctggtggtgggcgcctgtagtcccagctacttgggaggctgaggcaggagaatggtgtgaacccggaagtcagaggttgcagtgagccaagattgcacctgggcaacacagcgagactccgtct

SEQ ID NO: 26389 - DNA, 3145 bp, Homo sapiens
ctttagcgtgcatcagaatcacctgtagggcttgttaaaacactaattgctgggcctcaacccaaaagcccccaaagtggcacttctgagttcctgctgatgttacaagggaccacacttttgagaatctgtgctttaagctaaggaaatattgcctggtgggttggctgcctggtattgggcatggaaatttgaattgctgattggtagatggtgtgtctggacttaactcacgtagtaaatactgctgatcaatacctaatcattccacatttattgagctccacctgtgtgtatgtgtacccaagcacacatgtgtgaagggctatagccaaagtatttttactagcctgtatgaaatcactagtccttatttttaaaggtctatggtttcttggaagtagtttgattgttgagagagacctttgatctgcagtgtaaatctaccagtcatgggccagaagggcaaaagcccagctttctctttggaaagactcaggctgtggttgttgatggccaggttttcctcaggctccaacaactgtgcttataccaagcagatcctcatcctccatataatcatctttgttattcgtgggggtttaattacattacaagtggccaaaacccctgttctcagtgaagaaccacattggatttgtattctgttcagttgtagtctacactgcagtcttattcctggttcaaactacctctttaaattgatttgtcttgtgctggtctgttaaatcctgccctccttggtgctagatccagttgtgcctcagggcagaggaaacaaaacacagctatcctgttggcctgtgttgtggttttgaagtttgtactttctctgtgggtgccagttaaatattggagagcaaggaatgtggacttgtatggctttgaaccaagagagggttatgagcctactggattgaggttaaaatccaagaaccaacatttagagctttgtgcttttctctcattccatcactttgtaatgatgatacttaacatgagcagggtgaatgacaggtactgacgaagtccaacacaaaggtataatacagcctgttgtctaaagccaaggagtcataaaaccatgagaaataaataggaatcaatagttagtagtgacattggtgctctctagaaatctcagcatgagctgctatagaataccctcccagcaacaaaacctaatcagtaaggccagctagacccaatggctcatgcctgtaatcccaacactttgggaggccaaggtgggaggatggcttgtgtccagaagttcgagaccagcctggacaacatagtgagatcctatctctataaaaaatcaaaaattagccaggcatggtggtgcatacctatagtcctggctatttgggaggctgaggcaggaggattgctttagccctggaggtcgaggctgcagtaagccatgattgcgccactgcactcagcccgggtgacaaagcaagaccctgtctcagaaaaaaagaaaattcaaggccagttaagacaaaatgctatgactttgaaattcacagaaagaaataacagtttagattaggtcttcaggtattcaggatagagataatctcctgaaaaacctgaatttcagagattcttagactggctgccaaaggatgaagctagtgaaggagaaaaagcttaaattccatcttgagctcttggattgtgataatacaatgatttcattaacttttcatttctgtatacctgttcatttggaatttaatgcttgacttctttgttcattttggatctaaacttctcttttcttccttccccattcacatctattagaagactgcatcaccatttctttggcccccttactctgttgtcctttcccttttctttcagtttttttaatcgcatgtctagtatattaagtctccatagccctcctgatgcagtagacagtgctatgctgtggatataataccaaccagaaattggcatttataaacctgttaagagactttaagcatgcttcaagaggcagttgacccactggaatttctataaggctggtacccttcccagagttacagaatcttaggtgccgtctctagtctgtgagggaggaactcccagcatccccattgcccacaaatggaatcctcactgtatccactaggagattagaaattaaggtttcttcactacttctatggtagggttgtctgaaattccctttcaggctgtgggtactggtcttgggttctagtcataaggggttccttataaggagcaggcggaggggagtacactttcatgtgatttaattttgatcctgccctctccagctgctccttcaaaagatacatcaaaagatagaaactctgggctgggcacagtggctcacacactttgggaggccaagcgggggtgcagatcacctgaggtcaggagtttgagaccagcctggccaatgtggtgaaaccccatctctactaaaaatacaaaaattagctgggcgtggtggtgcatgcctgtaatcccagctactcgggaggctgaggcaggagaatcgcttgaacccaggaggcggaggttgcagtgagccaagatggcgccattgcactccagcctgggcgacaagagcaaaactccgtctcaaaaaaaaaaaaaagatacaaagtctgcatttgatataatgccttaattactgggtctacaattaatgttgactgttttagattgtaagctcctggagagcagtattgctgtagtaggaatgttttaacagtgtcatatgaaaaagaaagggcttttctggcaaagggaacactgtgtataggcactgagattaaagataacccagcagtgaaagtggagagataagcaaggaccagctcacaaggagctcatatgccatgctagggaatttggaatttattctgtagaccactgaagaatttaagtcttattaatggacatctaataccatgtagcaaggccacagttaaaaatacatatggggcccctactatgaactagatggtaagaactcaatggtgaagcaaacagacatgatttctgcaatcaacgtccctaatgtaaatgattttacaataaaaaaaattgtaaattataataaatgctatga

SEQ ID NO: 26390 - DNA, 1370 bp, Homo sapiens
ctttagcgtgcatcagaatcacctgtagggcttgttaaaacactaattgctgggcctcaacccaaaagcccccaaagtggcacttctgagttcctgctgatgttacaagggaccacacttttgagaatctgtgctttaagctaaggaaatattgcctggtgggttggctgcctggtattgggcatggaaatttgaattgctgattggtagatggtgtgtctggacttaactcacgtagtaaatactgctgatcaatacctaatcattccacatttattgagctccacctgtgtgtatgtgtacccaagcacacatgtgtgaagggctatagccaaagtatttttactagcctgtatgaaatcactagtccttatttttaaaggtctatggtttcttggaagtagtttgattgttgagagagacctttgatctgcagtgtaaatctaccagtcatgggccagaagggcaaaagcccagctttctctttggaaagactcaggctgtggttgttgatggccaggttttcctcaggctccaacaactgtgcttataccaagcagatcctcatcctccatataatcatctttgttattcgtgggggtttaattacattacaagtggccaaaacccctgttctcagtgaaaccccatctctactaaaaatacaaaaattagctgggcgtggtggtgcatgcctgtaatcccagctactcgggaggctgaggcaggagaatcgcttgaacccaggaggcggaggttgcagtgagccaagatggcgccattgcactccagcctgggcgacaagagcaaaactccgtctcaaaaaaaaaaaaaagatacaaagtctgcatttgatataatgccttaattactgggtctacaattaatgttgactgttttagattgtaagctcctggagagcagtattgctgtagtaggaatgttttaacagtgtcatatgaaaaagaacaaaataaatattttgattttgtgattctatgcaagtctttctgcccagagtgataatgcaataagctagtcttttcatagtctgcatagagtctggccattaccatcagtttttaagatgtccatattgtggccgggcgcggtggctcacgcctggtaatcccagcactttgggaggctgaggcaggtggatcatgaggtcaggagatcgagaccatcctggctaacacggtgaaacccgtctctactaaaaaaaatattaaaaaattagccaggcctggtggtgggcgcctgtagtcccagctacttgggaggctgaggcaggagaatggtgtgaacccggaagtcagaggttgcagtgagccaagattgcacctgggcaacacagcgagactccgtct

SEQ ID NO: 26391 - DNA, 818 bp, Homo sapiens
aaatagtaaccgtcttactgactggtaatcctgtttctgtgtacacagtgtaacctcatctccctcagtgttgtctgtgacaaagttgaaccaaacaggaacttctgtctcgtaagctttcttaggatctgtcagtgtcttgctgtccttgtgctgacttcctgcccagagatgagcccacaacattccgtggggtcaggagcgctgcgggctggctctgcccccagtcagtcccgggaaccgctctctgggctgtgcccacagccagcctcaggaaccacctccctgggctgtgctctgggcatttttcccttcgtgtggattttctttctttttttttcccctcccttattgcaaggctttatttattcataatttcaacttttattttagattcaggggatccacgtgcaggtttgtgacgtgggtagagtttctttggaatctggtatttggcacagggatagtcttgttgccctgtagccacttaaaaaaaacgggcatttaagtgcgctgatgaaatagtgaaatagcttgggcacagtggcccacctgtaatcccaacacttggggaggccgaggcaggtcgatcatttgcgcccaggagtttgagaccagcctggggaacacggcaaaaccctgtctctatataagataaaaaacaaaaattagctgggcgtgctagtgcgtgcctgtagtcccagctactcaggaggctgaggtgggaggatcacctgagcctgggagattgaggctgcagtgagccgtgatcctgccactgcgctccagcctgggcgacagagcaagagcctgcctct

SEQ ID NO: 26392 - DNA, 293 bp, Homo sapiens
taacattgaggaaaaactttgaatgtgggttccattcaattgtacaacaactcaatgtatacagcatcaacacttttaaaacattgagataaaatatttttgattttatcaaatttgatgtaatgctagaagaagaattcatactttgaagggactgtgataaatttaaggatttatttagttctgtttgcacttgctacatgctgtttccaatatgaatattttcacaagatttacatgtctaatacatgagttggctcctgaccttgaagcaattggtagtaatagataca

SEQ ID NO: 26393 - DNA, 337 bp, Homo sapiens
gtgtaccattgtgattgctaagaagaacacaatctatttagcaaacgtttttggcataaaaggaatgataattattacttgacttttatatccttatagagacctaagctaaatctctgacactgacaatattgactattagccagcttgttaacagtactagaaatgaatttggaagaagcaatttgataaattacacacccttttggcttttaccctccctttatatcagacttgtgactgactcagaatgatatttggggaggtgaaaaaaggtaaacatgtttgagaggaattagccatcagactagagtgtattcaaaaaagaagatttaag

SEQ ID NO: 26394 - DNA, 522 bp, Homo sapiens
cagtagcacttttcagtgaattggttttgtctgcagtaagcaggaaaaacctgcagtgccattcattcccatgagtggaaagttctttccatttagagcttaaggtgttgtcactttctccaagaagcaggtcttgcccttggcctggtgtggtggttcatggctgcaatcccagcacattgcggggcggaggcgggaggattgcttgagcccaggagttcaagaccagcctggacaacaaagtaagaatcagtctctaaattaaaaaataaaagtaatttttttttgtttttttgttttgagacagagtcttgcactatcacccaggctggagtgcagtggcaccgatctcggcttactgcaacgtccggctcccgggttcagacgattctcctgcctcactactcaggaggctgaggcaggagaatggcgggaatccggcaggcagagcttgcagtgagccgagattgcgccactgcactccagcctgggcaacagagcgagactctgtctcaaaaaacc

SEQ ID NO: 26395 - DNA, 452 bp, Homo sapiens
ctttcatacaaacacaataataatatgatataatgagtggttgttgagagaaattcttaacataaacctttgtcaaatacagttgctatagccaaagaaagaaatagttctatgtattgtaaatctctatttgaaatactatgccaaataaatgatgcaactcataatcgcacattagggctggttgcagtggctcatgcctgtaatctcatcactttgggaggccgaggcaggtggatcacgaggccaggagttcgagaccagcctagtcaacatggtgaaactccgactctaaactacaaaattagccaggcattgtggcaaacacctgttttccctgctactcaggaggctgaggcaggagaattgcttgaaaccagaaggtggaggttgtggttagctgagattgtgccaccacactccagcctgggcgaaagagtgaaactccatct

SEQ ID NO: 26396 - DNA, 365 bp, Homo sapiens
aatctcttagggcagcactaaggggaactccagcattggcagaggggaaggctgtgacccagggggacaggctgaggacctggggctggatgaagctgtgggtgagtgtagacaaagaagaaaagaggaccaaggacagtgccctgggtcctccaaggttaagggctcaagaaagaggccaggtgcagtggctcacgtctgtaatcccagcactttaggaggccgaagcaggcgggaccacttgagatcaggagttcaagaccagcctggccaatatagtgaaactccgtctctactaaaaatacaaaaaattagccaagtgtggtggcactcacctgtagtcccagctattcgggaggctgagg

SEQ ID NO: 26397 - DNA, 756 bp, Homo sapiens
atgaaagaggtcctaaatagatacctcatgttcatggattggaagacacaaaattgcattcaaaaccccagtaggattttttgtagatacagagtagctaattctaaaattcatatggaaggcaaagaaactaaattagccaaaacaattttgaaaaagatttcaaaaaaattttgaaggaatcatgctgcccagttttaagacttactataaagctgtgataatcaaggcaatctggtatttatgaaaggataaacacatagatcaatggaataaagtccaaaaccagactcacataaatagcaattgatttctgacaaaggtgaaaagacaactcaatggggaatggagagtttttcaacagatgattttaaaacaactgaacatccatatgcaaaaaaataaacctacctaaatttcacagcttatacaaaaattaacctaaaatggatcacggatctaaatgtagaactaaatttataaaatttttagaagaaaaaaatccataggccgggcacggtggctcatgcctgtaatcccagcacttcagaggctgaggcgggcagatccgttgaggtcagttcaagaccagcctagcctatatggtgaaatcccaactctactaaaaataaaaaataaaaaaaaaatgggctgggagtggtggtgcacacctgtagtcccagctacttgggagactgaagcacaagaatcacttgaacccagcaggcagaggttgcagtgagtggagattgtgcc

SEQ ID NO: 26398 - DNA, 416 bp, Homo sapiens
ctacatataccctgtgtgaatgaagtcataatgccattgccccatttctgttttctataaattgctgaactattcattattacttttaagcctgctgcagaacctctccccatgcagagctaccaccactgctactctgacttcttttcattctattataaattacagagctactaaccaaacacttcatgtctttttccggtgtcctggtgttaacgagtcatctctgtgattttacttttgtgatttagatggttgaattctgatcattgttgcagggaaggacaatttctttcttttttttttttttaaacacaatttttttttaaagataacaaaaaaacatttactgtgttgaagaaagtcgtctttatataaaaggggtttaccatatttcaggcaaaattcagtgaaaa

SEQ ID NO: 26399 - DNA, 232 bp, Homo sapiens
attatgttgggaatggttatagactcatttagctctggaaacccatcaagcaggaatgttgaatcatgaaactagggttggccaaatattacacttgttataattaatttgagcttaagcttcaacacagtgacatgtttcctttaaataaagttaagtcctctaaggatgcatgaatctatatggatctcgattttcagctgggaactgaaatttttcagatatgcagaat

SEQ ID NO: 26400 - DNA, 411 bp, Homo sapiens
ttttttttttttgagacagcatcttgctccgtcacccagactggagtgcaatggcgtgaccagggctcactgtaccctcaacttcctgggcacaaggaatccacctcccagtctcctgagtagatgggaccacaggcatgcaccaggatgcccagctgattttttttaactgttttttatacagatggggtttcactacgttgccagggctggtctcgaactcttaggctcaagcgatcctcccaccttggcctcccagtgtgctgagataataggcatgagcaccatgcctgggcccttgaattctgaaatttgaaaaacttgtactgccgtgcctatttttaggctgacataaagttttcatcctcaactacacaatttctaaggatacaattttcagcatattgtaaa

SEQ ID NO: 26401 - DNA, 398 bp, Homo sapiens
ggagacagagtttcactcttgctgcccgggctggagtgcaataacacgatctcagctcactgcaacctccgcctcctgagttcaagtgattctcctgcctcagcctcctgagaagctggcattacaggtgcccaccaccacgcccagctaatttttttgtgaatacctactatctactaagcaatgttctcaatgctgggaatacagtttatcaaagctgataaaagtccatttaatggagcaatttaattctaatgcagaaaaagaagtacaatgtttagtatgacagaaataagagacaagggccagatgcagtggctcccacctgtaatcccatcactttgggaagctgaggtgaaaggatcgcttgaggccaggagttcaagaccagcctgggc

SEQ ID NO: 26402 - DNA, 436 bp, Homo sapiens
gttcgacggcgattctcctgcctcagccttccaagcggctgggattgcaggcgcgcatcaccatgcccagcaaattttttgtatttttagtagggatagggtttcgctatgttggccaggctggtcttgagctcctgacctcaggtgatctgctcgcttcagcctcccaaagtcctgggattacaggcatgagccactgcacccggcctagaaaacatcattaaatagcaaacagtagcagtgtgcttggggattttaggattgattattttcaaatctctagaaaagctcaatgtattaccttaggctataatccctgggcagagtctcatctgttaatgggagctggtctaagggtccttccagctcccagattgatgatttcccaggttgatctgctccctgccacccacccatcctcggttttgtttgtttt

SEQ ID NO: 26403 - DNA, 672 bp, Homo sapiens
attttgttgatagtatcttttgaagcctgaagattcagaaagctgcagtggacccgaccaccaaacagtgaccatgacctttatttggtgcaagtttggctttgggaagtgctttggagctttttctcactccaaccactgagctagttgttgccagttgtcactttttgtcgcacatcacaatcagatcaagaaatggtttgtcgtgtagaataagagaagatgacacttcaaaacgaggattttttaattttcgctcagctcatgaggcacccacttagcgagattttcccagctttccaatttgcttcaaatgctaaagggctgtagaatcgtcaaggtttgagttctttggcaacttctcatgtggttgttagagaaacagcttcaatgattgctctcaaatggtcattgtggacttccgatgtctggccactatgctcctcatctacaaggatctcttttcctttgcaaaacttcttgaacttcttgaatgcactgtatgttcgttagcaattcctgagacaaatgctttgtttatatcgtgagttgtctgcgcttcttttacgacccattttgaactcaaataagaaaatcgcttggatttgtttttgtctaacatcatttccatagtctaaaataaacataaacagcaagtgatgtcattagcaa

SEQ ID NO: 26404 - DNA, 837 bp, Homo sapiens
attttataagcaatgctagcaaaaaaagacaacttaaaagattatggagaaaaaggcgtattttagatacaaaacacagattgagaaacacttaggggcaagaagtaatgcatcactggccagtgtaaatgaaccgtttaggcagtaaaatgtgtccaagcaagtggtgagtatatcctgttctcttttatatatctagacaagtgatttcaaacacccacgtggagccctgagaccctgggtgttcacctaatgtaagccccaatataggagctgaggtcaactaattgagggaatatgtccaacaatcaataagcaaattagaatgagctaactgtcacacattcttaccctcatccctttgctgcattaactgagcaaacagctctctctaactatgtaggaaaagtgtttagtactcaaataaaaaggtaaatttaataatctgcttaaggctgtatgaaaaaatgaagcaatgtgtatcaggtttcttcaaatatatgcatattgcaatccacccttatttaccctcgattgtaagagctaaaagcaggccgggcacggtggctcatgcctataatcccagcactttgggaggctgaggtgggcggatcacgaggtcaggagatcaagaccatcctggctaacatggtgaaccccgtctctattaaaaatacaaaaaaattagttgggtgtggcggcgggcgcctgtagtcccagctactcaggaggctgaggcaggagagtggcgtgaacccgggaggcagaggttgcagtgagccgagatcacaccactgtactccagcctgggcgacagaacgagactctgtctcaaga

SEQ ID NO: 26405 - DNA, 228 bp, Homo sapiens
gacactgccacctgctccctcacttctttgtgttacgtcatgctgtctgttcagtaatgcaaaatgctgaattcaaaatagacattaacttactaattcagcccaatgaaacatagtccacctaaaaaagagctcatagaagcttatttcaaatacgatggatacattcaacaaaatattggtatataccatgtccatactctgttagatgctgaggatatggcaatg

SEQ ID NO: 26406 - DNA, 1247 bp, Homo sapiens
tctcttcaggcgtgttaagcagcggggttggcctgtacttcctctggccctggctgaagagggctagtgaaaccgttaagcccctaggcgatcatggccttgagacctgaggaccccagtagtgggttccggcacggaaacgtggtggccttcatcatcgagaaaatggccaggcacacgaaaggccccgagttctacttcgagaatatatccttatcctgggaggaggtggaagacaagctcagggccatcctggaggacagcgaggtgcccagcgaggtcaaagaggcctgcacctggggcagcctggccttgggtgtgcgctttgcccacaggcaggggcagttacaaaaccgcagggtgcagtggctgcaaggctttgccaaactgcacagatcagctgcgctggtcttggcctcaaacctgacggaactcaaggaacagcaggagatggaatgcaatgaggcgaccttccagttgcagctaaccgagaccagccttgcggaggtgcagagagagcgggacatgctgagatggaagctcttccatgccgagctggcacctccccagggacagggccaggctacagtgtttccaggcctggccactgccggaggggattggacagaaggagcaggtgagcaggaaaaggaggcggtggctgctgctggtgctgctggaggaaaaggagaggagaggtatgcagaggcagggcctgcccccgcagaggtcttgcaggggctgggaggaggcttcaggcagcccctcggagctattgtagcaggcaaattacacctttgcggggcagagggagaaagatctcaggtcagtacaaacagccatgtctgtcttctctgggcttgggtccacagtctcactggagcctcttcctgtccagctccctacctcattcacatactcatacccatgccctttgtccgccttctcagccatacccaatatacccccttcaccagcaaaggtcacagaacgggttccaactcagatgcctttcaactggggggcctctgatgctagcctgtggtcagatgtggaggcccagggaatagaccctcaagagcccccaagagacaggagagactccgaactccatcagcagagaagacctccagtatatcgcaggccagggaactgggactgcccgtggtgtaaagctgtgaatttttcatggagggaaaattgcttcctctggggaggcgaatacggctgcaaaagcctcagtaaat

SEQ ID NO: 26407 - DNA, 405 bp, Homo sapiens
ttaatgatttctagcttaactgcaccgtggtcaaataacatactctgtaggatttcagtcctttaaaatttgttagtacttatttcatggccaaacatatagtctttttgtaaaatactcaatgtgcacttgaaaagaatgtgtatcctgccattcttggtttattgtgtggttaaaatcttttatattgttatttttcttttttgtgtttgtttgttagtaactgagagaggtgtgttagtctcccaagatgattgtggctttttccatttttcttcttagctctgtcaatttttgttctatttggaagctatgttattaggtccatacaaatttagcagttatatcttcttgatgaattgaatcttttgtcattaaaaagtgtcttcctttggcatcttgaat

SEQ ID NO: 26408 - DNA, 788 bp, Homo sapiens
ttttttttcaaggttcattcctgtattttaggctggaagcaatgtcttcatgaaatggccatgttgttatgtccgtgaacaaaatgaggcaatgtcatcactaggcaaaatttatgccaggttttaaaattgtgattcttaattggtataattcaagaattggatattactgggtgattctcagaaataaagacttgatagtcacctaagtatggcaaatgatggtctgaaaaagtttgagttttctttactggagagtgtctccaagctcggaagaagtagctctgtttgagggagggagtgtgccgtattttccagacttctttgaccagagaatcccttcatgaaaagatttcttctatggatcctgtcccaagaaggacacatggggacatgcccatccattggctgctgggattgacagtaacctaggaggctgaaggaagtgttttctggggaagcagggacaaactacagtaagatactctttaaaaattttgtggccaggtgcggtggctcacgcctgtaatcccagcacttggggaggccgaggcaggcagatcacgaggtcaggagatcaagaccatcctggctaacatggtgaaaccccgtctctactaaaagaaatacaaaaaaattagccgggcgtgggggcgggcacctgtagtcccagctactcaggaggctgaggcaggagaatgccgtgaatctgggagatggagcttgcagtgagctgagatcgtgccactgcactccagcctgggcgacagagtgagactccatcttaa

SEQ ID NO: 26409 - DNA, 500 bp, Homo sapiens
ggccaagattcggccggggttaagaattgttgctgtgaggtaggttttacgagactagtgaagaataatctagtatacagtaagaacaccatctttctttttcttttttcagaaaggacatttttggtaacaaaggccaggtaaccttttaatcctaaatggcaggaagctatgaaaataagtcagacataatcaaaggacaagttgttgcttggttttgtttaacatctgtacctttcttcaaaaggctttaaggcagcttccagcaaaagacagacatgtgtagtaccttctttgtagccttcccttcggttttcacagaaacactggctgataaaagccttttggaaagtgtggtaagttaagagcatctggcaaaaagaaaatcctaaaaaagtagtagaattgtattgaaaaaattctgattcattgctgatcttttaaaatctcttttgtaattgtgtctctattccttactcaacctgcaaaatgttaaaaaa

SEQ ID NO: 26410 - DNA, 636 bp, Homo sapiens
cacatgtgtatgtgtgcacttttttcaataaggtcacaaatggatctgtgactcctaaatatttaataacgatgactataaagatatttcactaaattatttgtatgtaactcttctatgagatcgaacagcagactctgaaagcactggtcttaggagtttcagagatactcataagctatataatttttcactttgtttttagtaggtatgtagaattggttaaaataaactttcttactgaatgtatttacagactggatttttccaactaccacatggagactttttcattgaacccgtgaagaagcatccactggttgagggagggtaccacccgcacatcgtttacaggaggcagaaagttccagaaaccaaggagccaacctgtggattaaagggtattgtgactcacatgtcctcctgggttgaagaatctgttttgttcttttggtagttttattaaaacatgacctattcttactcaagtctcttatctcctctgtattcttttttttttaatatcttcatgacattcaaatctcttctgtattctcttgccagaaagtgtacattctttttgcttgtataaaccctttcacttgtcaatactcgagtctctgcatattcttaatg

SEQ ID NO: 26411 - DNA, 483 bp, Homo sapiens
cacatgtgtatgtgtgcacttttttcaataaggtcacaaatggatctgtgactcctaaatatttaataacgatgactataaagatatttcactaaattatttgtatgtaactcttctatgagatcgaacagcagactctgaaagcactggtcttaggagtttcagagatactcataagctatataatttttcactttgtttttagtaggtatgtagaattggttaaaataaactttcttactgaatgtatttacagactggatttttccaactaccacatggagactttttcattgaacccgtgaagaagcatccactggttgagggagggtaccacccgcacatcgtttacaggaggcagaaagttccagaaaccaaggagccaacctgtggattaaagggtattgtgactcacatgtcctcctgggttgaagaatctgttttgttcttttggtagttttattaaaacatgacctattctta

SEQ ID NO: 26412 - DNA, 491 bp, Homo sapiens
ttttagctccagatcgactgcaagaacaaaccagcaatcccaagaggccccacagaccctctgaaggaagcggacttctcctgcaggaccggaagagacaccccaaatactactggatttttccaactaccacatggagactttttcattgaacccgtgaagaagcatccactggttgagggagggtaccacccgcacatcgtttacaggaggcagaaagttccagaaaccaaggagccaacctgtggattaaagggtattgtgactcacatgtcctcctgggttgaagaatctgttttgttcttttggtagttttattaaaacatgacctattcttactcaagtctcttatctcctctgtattcttttttttttaatatcttcatgacattcaaatctcttctgtattctcttgccagaaagtgtacattctttttgcttgtataaaccctttcacttgtcaatactcgagtctctgcatattcttaatg

SEQ ID NO: 26413 - DNA, 929 bp, Homo sapiens
cactccccttttaggaggagggaggggaaaaaggtgtctagctcctttctgcttaaaaaagcacagggagatcgcgggcagctttgcagtcgctgccttctcgcgcctgaccatgcacccctgcatcttcctgctgggccacaggcgagcgctttatttctggagctgagggctaaaacttttttgacttttcttctcctcaacatctgaatcatgccatgtgcccagaggagctggcttgcaaacctttccgtggtggctcagctccttaactttggggcgctttgctatgggagacagcctcagccaggcccggttcgcttcccggacaggaggcaagagcattttatcaagggcctgccagaataccacgtggtgggtccagtccgagtagatgccagtgggcattttttgtcatatggcttgcactatcccatcacgagcagcaggaggaagagagatttggatggctcagaggactgggtgtactacagaatttctcacgaggagaaggacctgttttttaacttgacggtcaatcaaggatttctttccaatagctacatcatggagaagagatatgggaacctctcccatgttaagatgatggcttcctctgcccccctctgccatctcagtggcacggttctacagcagggcaccagagttgggacggcagccctcagtgcctgccatggactgactggatttttccaactaccacatggagactttttcattgaacccgtgaagaagcatccactggttgagggagggtaccacccgcacatcgtttacaggaggcagaaagttccagaaaccaaggagccaacctgtggattaaagggtattgtgactcacatgtcctcctgggttgaagaatctgttttgttcttttggtagttttattaaaacatgacctattctta

SEQ ID NO: 26414 - DNA, 1082 bp, Homo sapiens
cactccccttttaggaggagggaggggaaaaaggtgtctagctcctttctgcttaaaaaagcacagggagatcgcgggcagctttgcagtcgctgccttctcgcgcctgaccatgcacccctgcatcttcctgctgggccacaggcgagcgctttatttctggagctgagggctaaaacttttttgacttttcttctcctcaacatctgaatcatgccatgtgcccagaggagctggcttgcaaacctttccgtggtggctcagctccttaactttggggcgctttgctatgggagacagcctcagccaggcccggttcgcttcccggacaggaggcaagagcattttatcaagggcctgccagaataccacgtggtgggtccagtccgagtagatgccagtgggcattttttgtcatatggcttgcactatcccatcacgagcagcaggaggaagagagatttggatggctcagaggactgggtgtactacagaatttctcacgaggagaaggacctgttttttaacttgacggtcaatcaaggatttctttccaatagctacatcatggagaagagatatgggaacctctcccatgttaagatgatggcttcctctgcccccctctgccatctcagtggcacggttctacagcagggcaccagagttgggacggcagccctcagtgcctgccatggactgactggatttttccaactaccacatggagactttttcattgaacccgtgaagaagcatccactggttgagggagggtaccacccgcacatcgtttacaggaggcagaaagttccagaaaccaaggagccaacctgtggattaaagggtattgtgactcacatgtcctcctgggttgaagaatctgttttgttcttttggtagttttattaaaacatgacctattcttactcaagtctcttatctcctctgtattcttttttttttaatatcttcatgacattcaaatctcttctgtattctcttgccagaaagtgtacattctttttgcttgtataaaccctttcacttgtcaatactcgagtctctgcatattcttaatg

SEQ ID NO: 26415 - DNA, 816 bp, Homo sapiens
agtaattttgtcgctagttactgtattactggaaaatgtattcctaggctttaagatttgggaagcgtgtgagtctaacttctcaaacagaatttgacaaggacgtagcagtgttttaaaaagtcagggaaaggaaagaggtgtgttcagcattcctgccccatcttaacatattctttttctcgtcttaacagtggtaatattttatgttattttggtttgatttttgtttgtggcatatggctctgctgtcctgtgactctaagtaggaagagaaaatagtgccaataattcttcatgggagatgcacctctctcaagtcttgaacaatgtttgagggaaaagtgctttcagctggggctgatggaggaacaccttggcactctttccctgcaatgggcactgattgagggtcttcctggtgtggcatcatcaaatccctgttgctcaaacccactaattagctcattcttatctacaagtagcaggggcccctaaagctctctgagaagatctcatactgtgtctcctacatttcatcttctataatctcttattcttagagacagaaagatggttaaaagacatcacttcatttctttctctggatttggaaagagttatatattgggattatgctgttagtttacacttgcattgtttaaattagaggaaaggttattttgtgcagaacaaataaaaattactctttaactacctttcagaatatcccaacttttaacataagctgttttgtaaaggctggttgtagtgacttgcttcataatagactattaaaataagatgcattgaaat

SEQ ID NO: 26416 - DNA, 789 bp, Homo sapiens
gcgatttggggagtgttgtgaattccgagggctccacacttaagaggttgtacactcacctgtctacctggactccaatttccatatttccagccacttgaggactgagaggtggatgataaaccctgtcatagtggagcaagttcaggtgtttaaccgctgttatgggggatctgccttttctccctcttctttcttacttccataagtatgtatgtgcagagattgaaaaataaccttgagagagtccatccatctaactccaggtaagactgcaaatatttctttcttataaatctgggaggaatgcagtcagtgtttcatgccaaccaaaaaagactgcaaacgtttttccatccttctgccttgaatacctttctacttagatgactattttgtaagacgtgagtgcaaatgttatatacaataccaactccatactagatgtttaattaattctagggattcagtaataaggaatgactcgaacagatttctgcctacagacagctaatgcttcttgtatttttgcattacctgaaatgaaagtagcaatgttagattttacagtagtgggaggttgtaaacaatagtatgttaaacatttttgatcatttataataaaatgttcagcactaaacatatggtctgatactctgtgctttattgcttaataagcttttttttttcttttcgagagggagtcgtgctctgtcacccaggctggagtgtagtggcgcgatctctgctctgctcattgcaacctctgcctccctggttcaagcaatt

SEQ ID NO: 26417 - DNA, 499 bp, Homo sapiens
gcgatttggggagtgttgtgaattccgagggctccacacttaagaggttgtacactcacctgtctacctggactccaatttccatatttccagccacttgaggactgagaggtggatgataaaccctgtcatagtggagcaagttcaggtgtttaaccgctgttatgggggatctgccttttctccctcttctttcttacttccataagtatgtatgtgcagagattgaaaaataaccttgagagagtccatccatctaactccaggctggagtgcagtggcgtgattttggctcactgtatccttcgcctccctggctcaagtgattctcctgcctcagcctcccaagtagcttggattacagaggttgttggcttccatcaggggtggtcatttccaatcagacacctaagaactcctgctaatgggcaatgatggaggcacattctagatggaggcacattctagaaacgcttgaaactgtgtgttgctttggaca

SEQ ID NO: 26418 - DNA, 1350 bp, Homo sapiens
gcgatttggggagtgttgtgaattccgagggctccacacttaagaggttgtacactcacctgtctacctggactccaatttccatatttccagccacttgaggactgagaggtggatgataaaccctgtcatagtggagcaagttcaggtgtttaaccgctgttatgggggatctgccttttctccctcttctttcttacttccataagtatgtatgtgcagagattgaaaaataaccttgagagagtccatccatctaactccagttcattggaaatttctgcttctttgagactgaggttatattccacttcttctgactacaccaccaccatcaatctccttctctgaactcttggatcattacttcaacctgaaacaactcatcaggcagaatagttgcctactgccccaaccccaccaaatgttccagcacctctgatattacctcacatggcaagagggctttgaagatgtgattgagtcaaggatcttgaatggggagattatcctgaattattcagctggacccagtgtaatcacaaaggtttttcaaagatggaagagaggcagaagagccagaaaaggatatgtgacaatggagtcagtgtcagagttggagtgacgtgatgtgagaaggattcaacctgctgtttctggctttgaggatgaaagaaggggccatgagccaagcaatacaggtggcttctttcaagaagttggaaaagtggtaatattttatgttattttggtttgatttttgtttgtggcatatggctctgctgtcctgtgactctaagtaggaagagaaaatagtgccaataattcttcatgggagatgcacctctctcaagtcttgaacaatgtttgagggaaaagtgctttcagctggggctgatggaggaacaccttggcactctttccctgcaatgggcactgattgagggtcttcctggtgtggcatcatcaaatccctgttgctcaaacccactaattagctcattcttatctacaagtagcaggggcccctaaagctctctgagaagatctcatactgtgtctcctacatttcatcttctataatctcttattcttagagacagaaagatggttaaaagacatcacttcatttctttctctggatttggaaagagttatatattgggattatgctgttagtttacacttgcattgtttaaattagaggaaaggttattttgtgcagaacaaataaaaattactctttaactacctttcagaatatcccaacttttaacataagctgttttgtaaaggctggttgtagtgacttgcttcataatagactattaaaataagatgcattgaaat

SEQ ID NO: 26419 - DNA, 1141 bp, Homo sapiens
cgatatcaaaatatacgcaagataaacgcaggccgaacactcacacagcggcttcagttcattggaaatttctgcttctttgagactgaggttatattccacttcttctgactacaccaccaccatcaatctccttctctgaactcttggatcattacttcaacctgaaacaactcatcaggcagaatagttgcctactgccccaaccccaccaaatgttccagcacctctgatattacctcacatggcaagagggctttgaagatgtgattgagtcaaggatcttgaatggggagattatcctgaattattcagctggacccagtgtaatcacaaaggtttttcaaagatggaagagaggcagaagagccagaaaaggatatgtgacaatggagtcagtgtcagagttggagtgacgtgatgtgagaaggattcaacctgctgtttctggctttgaggatgaaagaaggggccatgagccaagcaatacaggtggcttctttcaagaagttggaaaagtggtaatattttatgttattttggtttgatttttgtttgtggcatatggctctgctgtcctgtgactctaagtaggaagagaaaatagtgccaataattcttcatgggagatgcacctctctcaagtcttgaacaatgtttgagggaaaagtgctttcagctggggctgatggaggaacaccttggcactctttccctgcaatgggcactgattgagggtcttcctggtgtggcatcatcaaatccctgttgctcaaacccactaattagctcattcttatctacaagtagcaggggcccctaaagctctctgagaagatctcatactgtgtctcctacatttcatcttctataatctcttattcttagagacagaaagatggttaaaagacatcacttcatttctttctctggatttggaaagagttatatattgggattatgctgttagtttacacttgcattgtttaaattagaggaaaggttattttgtgcagaacaaataaaaattactctttaactacctttcagaatatcccaacttttaacataagctgttttgtaaaggctggttgtagtgacttgcttcataatagactattaaaataagatgcattgaaat

SEQ ID NO: 26420 - DNA, 867 bp, Homo sapiens
gcgatttggggagtgttgtgaattccgagggctccacacttaagaggttgtacactcacctgtctacctggactccaatttccatatttccagccacttgaggactgagaggtggatgataaaccctgtcatagtggagcaagttcaggtgtttaaccgctgttatgggggatctgccttttctccctcttctttcttacttccataagtatgtatgtgcagagattgaaaaataaccttgagagagtccatccatctaactccagttcattggaaatttctgcttctttgagactgaggttatattccacttcttctgactacaccaccaccatcaatctccttctctgaactcttggatcattacttcaacctgaaacaactcatcaggcagaatagttgcctactgccccaaccccaccaaatgttccagcacctctgatattacctcacatggcaagagggctttgaagatgtgattgagtcaaggatcttgaatggggagattatcctgaattattcagctggacccagtgtaatcacaaaggtttttcaaagatggaagagaggcagaagagccagaaaaggatatgtgacaatggagtcagtgtcagagttggagtgacgtgatgtgagaaggattcaacctgctgtttctggctttgaggatgaaagaaggggccatgagccaagcaatacaggtggcttctttcaagaagttggaaaaggtaaggaaatgggttctcacctagaactgctggaaagcaacccagccctactgacaccatgattttagctcagtgagactctgtccagatttctgacctctagaactataagataataaatttgcattgttttaagcca

SEQ ID NO: 26421 - DNA, 594 bp, Homo sapiens
agatagcttaatgccatgactaaaatctggccagaagataggaagtttgcacattgtagatcaaagaattatggatatcatggccaattttttaaacaaaacattagtaaactgaattcagcaatacatcaagacaatcatacaggatgatgaaattcatagtctaggaatgagggctgctttcatgttaaaaacattagaaaatcatgatatgtgattgaaatttgaaaacaatgtaattatcttaaactcagaataaagtaccatatttgataaaaatttaacctcatatattcagaagaaatgtctggcaaaatttagcatccatcatgccataaaattcttaacaaagtataaataaaagtttttttttcctaatttgacacagggtattacacaaaaatcacaaagggagactttgtaagctttgcctctgagccaggggacagcatgaggaagccagtggtcaacacttccatccagcattggatggcacagttaggaggaaagtaaaacgaaaggtgtaaaagttagaaaaaagtgaattgacagaatatacggtttacctagaagataaattattagagagttgag

SEQ ID NO: 26422 - DNA, 343 bp, Homo sapiens
agtgctgggattacaggcatgagccactgtgcctggcctagaattttaaaatataagtagaagagtagatttttttttttggtagtcctcgtcatttaagtattctggatagtgggaataaaagagcttagaatttttcatctttgtcttaaacttttaaaaaaatgtagcttatattaattctgcttgtttaaaaagaatatactcttcattatactgaacctaggtaagacagctggtttatattttgttgcaattaaaaaacgtgagctgtggttgcagtgagccaagattgtggccattgcacttcagcctggcaacagagtgagacttggcctcaaaa

SEQ ID NO: 26423 - DNA, 844 bp, Homo sapiens
agacaagagtgtctatttgatgtaagtgtagggaatattagtgatagttcggaaatttctccagataatggcaagacactcctttagcagcccccctttcctgagtttcccattgttccacttattaaactctgacatatgtcatgccctgtgtacctggatatccattcatcctgatcacaacctgatctcccacttaccacaccatctcagaacattgtctggcagattaaaatatctccccagctctgctaacccactcttataacatgactagctcctccttcccccttttatccctttatctataagtactttttaaaacaagggctgacagctttattgttcaggaataattgtcaaaaggcttagtggactgtacttgccagtaaaaggttatttgctggcttggggtgtgtgctcctcagctgtcctgtgtcattccaattatattgtcatatggtgagatttgtgcctgatgtcattgtaggcaaggatatagtagaggcagctcatttgtatgttggtgcttcccagttctccatttgttgagatgcttttatcattcagacctttgagacaatccaacctgcttccttcatcttaaaggtgaggaaatgggcccagaaagggaatgtgatttaccccaaatcatactatgtgttggtgatgggaccaagatgaaatccagctccccagcctctggcagggactcctgaactcatagctttgggcactgacctcatggggtgaaagggaagattatatttctatttgaatgttttctaacacatgaaatttatataggtagttatacctagcaggagccaaagaacaataattt

SEQ ID NO: 26424 - DNA, 445 bp, Homo sapiens
gaatcgcttgaacccaggaggtggagtgagctgagatcacgccactgcactgcagcctgggtgacagagcgagactctttctcaaaaaaaaaaaaaaaaaaaaaaagaaaggaaaagaagaaaaaagtaggggagtcaaagcagttgatatgttttctgggaaaaaaaaatgatgcatggggaaagataggtggttgtccaggcagaagggagccctgatccctaagggctgtcatgctgactgccacaggagtagtaaattggagatggcgaagaaagagaaccaacagtcagtgactaccctcctaatcatgtgacagtgtaaattcttgaagtgcttgtcaaactgttcctaccctgtgtcctcatagaacggtaactggggcacagccccactttagtgtatcttgttccttccccagggatctaatcctagcttgtttac

SEQ ID NO: 26425 - DNA, 332 bp, Homo sapiens
ctgtggcaacagctggcagagaaaagacctgaagagtctaaatctgtgtttctctggaatggacacaaccatctctgcccctgggacgccacaagagcatcagccaagggctcagctatgagatgggcacttttgtaatccagagatggcagcaacaatattcattatttttaactcaaggaggattaaattcagttcccaaattcatggttatggtttcagacaacaggattttcttttttattttattttattttattttttgaggtggagtctcactctgtcacccaggctggagggcagtggtgtgatcttggcttactgcaacctct

SEQ ID NO: 26426 - DNA, 511 bp, Homo sapiens
ccgcaacaggtgtttggggacctggaccaggtgaggatgacctcggagggctccgactgccgttgcaagtgcatcatgcggcccctgagcaaggacgcgtgtagccgagtgcgcagtgggcgggcacgcgtggaggacttctacacggtggagactgtgagctcgggcactgactgccgctgctcctgtaccgcacctccctcctctctcaacccctgtgagaacgagtggaagatggagaaactcaaaaagcaggcgcccgagctcctcaagctgcagtccatggtggatctcctggagggcaccctgtacagcatggacttgatgaaggtgcacgcctacgtccacaaggtggcctcccagatgaacacactggaagagagcatcaaggccaacctgagccgggagaatgaggtggtgaaggacagcgtgcgccacctcagtgagcagttgaggcactatgagaatcactctgccatcatgctgggcatcaagaaggagctgtcccgcc

SEQ ID NO: 26427 - DNA, 386 bp, Homo sapiens
ccgcaacaggtgtttggggacctggaccaggtgaggatgacctcggagggctccgactgccgttgcaagtgcatcatgcggcccctgagcaaggacgcgtgtagccgagtgcgcagtgggcgggcacgcgtggaggacttctacacggtggagactgtgagctcgggcactgactgccgctgctcctgtaccgcacctccctcctctctcaacccctgtgagaacgagtggaagatggagaaactcaaaaagcaggcgcccgagctcctcaagctgcactccagcctgggcaacagagtgagactccgtctcaaaaaataaataaaatagaagcagccttgtaactgtatttaccatgataatatattctgcacggtaagaattcc

SEQ ID NO: 26428 - DNA, 382 bp, Homo sapiens
ccgcaacaggtgtttggggacctggaccaggtgaggatgacctcggagggctccgactgccgttgcaagtgcatcatgcggcccctgagcaaggacgcgtgtagccgagtgcgcagtgggcgggcacgcgtggaggacttctacacggtggagactgtgagctcgggcactgactgccgctgctcctgtaccgcacctccctcctctctcaacccctgtgagaacgagtggaagatggagaaactcaaaaagcaggcgcccgagctcctcaagggctgttcactctacagctagatggctcagcacagagacagtcagtgcctctgcacgcaagtcatgcagaaaagcaagagatctgggaagaactgtctcccaacatttg

SEQ ID NO: 26429 - DNA, 2958 bp, Homo sapiens
tggaattgtatttagaaaggcccctgcaaagtatatagatggatgactctagttcatgacatacaaatcccataaggccaacgaccactcttctggaacaccaagagcagctctgagatcatgctggccctacgcgaattgagtttctgtggcctaattggatttggagaacgccttccctggccccttttcctcagacagatctgctctgataggaaccttttcaagaaagttactgttgtttcaatgccactccttacctgtatagaacatttccaatacattcgctcattgaacttaatccttgcaactgtgactggggggtagatggctctgtttgcatacgaagaaataaaggctccaggaggttaaatcgggcaactttttagaactaaatcagtctctgtaaggcctacattgctaagataccatttcagctctgaaaatctgcttcagggaagtgagtggatgaggccttcctgcctcagctactctgcccgtctgtacatcttttgtgtctgcctccgtaccttattcagttattttcacactaaagtaagtagaattaagactgtagttcagatgctttttctttttctgttggaaactgaacacactacagacagtgaaaaaaggtacatattccattttctcattgcctgaagatctctgctgatgctcctggagaatgactttgggggctttagaaagaatattgccagtccgtctcggcaaggagatgatgggagcgctttatatggaggctttacatgacttgtaaattaaatgtgaatgagggcagttgattaaaattggtattacagaagggccctgctgaggtttgaaaacagctgagctgctgatgtctcaggcctttccctgaattagcactgcggttctccaggatatcagcaaagagggcaagtaatagaagcccctgataaggagcgtcagccgacaggcaagccttgggaggctgtgggaatgggtctgcccccagcttcacagacctcttcctccagcctctgaatcccattagccacagcctagaacattagctgagctgcacaagctcacccacccctgtgccagggggccctgacctccctccatgccatgtttttggctgtatctacggcacttaacaataggggctttttattttcattacagagatattttgaaaaatttaaaagacatgaactcacataaacagttatggatgatagttaaaagagaaacgggtggaggtggatgagaggttgtcttcatgaatataattacttgagatttttttttcttaatggaattagtttattagaaaatgtctgcgttaaatccgtagaaaaggaagaaaagtgtagcaacaaaaatgtagccattatctaacttgccataaatatttgcagttatgataccttggaatgttgccacgatatggattgctttgattaaaagatgtcagttgaataaaacagtactgtgggagaatcgctttctgctgctagataaatgctgatgtttatttttaaaccaggaaacattgatcctgtaacaatgcccgattacaattgctttattacaccccagggctgatggagatgtaatcacttggctaatggatgtgggtgcaggacagatgctcgcttgctggcctgctttcctgcttgcattctgatgagctgcaggagtgcgcctggccttctgcaggtggagctgctgtcagagcttcgtttcactgatacccaaagccatgtctgactgaaataaaacaggttccctttttttttccctttggaaaatgccaactaagggagactaatcagatatcttaacacaatttcatccaggcttagtgctaacaagattgcggggctttttagggtttaagaagatgagaaatgagtgtgcacgtttcacacgttgacttgccggtttttccatgtcatacaaaaaagtcctggctgtttctccgaactggctgcctgcattcccgtctttcttttgtttttaagaaatagactgaattcagctgttaatcctctagtacagtatccatgttaaaatgtttttccattgcatcttttatgtgaattcaaaggtcagaatttattgtctgtgatattgagaccatgtgtacaagaactactttttgcttttcatcattcactccttagcaaacgtttcgtaagtaccctctgtctgtttgctactatatgaggtgctgcgaaattagtgggcgtggctttttatatttttcattcgtgtgtagcctaagtaaggtgactcaagatgatacaccgagagaaaaatgcaaaatatatttggttctcatttctgttgctgtcgtttcctttttaaagacgatttatcaactgctgccatttggaacttcctataagaaactaaaaatgatctatttcagtgttcctttcgcctttcctctgctttctgaataaatggtttcagtaacccatgctgttctctccctattctacgtctttctccctatgttgaaaaaagattcccacagtttctgatgtgtgtgtttatagtcttcaatgtatgttaacatgttaggaactgagtatcttaagagatgtcttagaatgctttagttttcataatttgtcctttatgtatttttcattgtatttgctgttttgacatggaagtaatttaaaaagttggtgcaggaaaggactctttactgttgcacattttggttttctgatatgtaataaattcatggcttggcagctgacatgatgtttcccagagagaaggagatgtatttctgcagggtccagaccaaaagagccatttacagcatgttctcccatgttccattatcagcctgatgaaacctgccctgccaaggcataaacttttgtactagctgtctccatattatgttcaataaattctgtgctctgaatatatttaaaaaaaaattca

SEQ ID NO: 26430 - DNA, 313 bp, Homo sapiens
agatttaccagaacatttgaaactcaaagaagataatttcttccaggtttctaaaagcaaaataatgaatggccactgatgaaaaatcatattatttattcattcactgtcttccagtatttcagtgttttgttttgtttttattttattttattttaagtttttgagatggagtctcgctctctctcccaggctggagtgcagtggcgtgatcttggctcactgtgacctctgcctcccaggttcaagtgattctgctgcctcagcctcctgagtagctggaattacaggcgcacaccaccacgcctggcta

SEQ ID NO: 26431 - DNA, 436 bp, Homo sapiens
tttttctcttctccctttccttctggaatgccagttagatatgtgttagattttcttactctatgttgcatgtcgcccaactcttcattcatttgtcctgcattctgcataatttcttcagctctaccttgtactttattcgttctctgttcaggtcaacctgatctgaggttaaaccatttatagagttttgactgtcggtgactgtgatttccatttcttggagtttgatttggttcttcgtcatttgattttcattttctgtaatctctattcctcttaatttcatcatttatttctttaaacatacttaaaattttatttatgtatttgctatttccactgactgaggtgaaaatcttcaccagtttgattttgttgctgtttgctgccttgcagttagagtgacttgtgatgtgacatgtgtgtgttttga

SEQ ID NO: 26432 - DNA, 617 bp, Homo sapiens
aattctgggtataagggaaaaaagcaaatgaactattttatgtgtttatgatttacaagtttatgtataaaatttttgtatgaagattggagttatagttggccttatttttaattctatctcagataatcttgtggagtttatatgggtaattagtaaaatcctattaaagacgatttattatgaaaagaattatccagatagtggacaattcacattaatcaaatgtgtggctcaattttattaaagctgacatgacattattgcttatgttttggccaaccttggtttcaattattacctttcatatttttattttactcctatgttttacccttgcatactgctacattaagaagagaaattaagtctcttttaagccatctcagaacttttgggccgggtgtggtggctcacacctgtaatcccagcactctgagaggctgaggcaggaggatcgcttgagctcatgagtttgagaccagcctgggcaacatagggagaccttgtcgatacaaaaatttaaaaatgagatgggaggatggctggagccagggagatcgaggctgcagtaagctgtgattgtgccactgcactcttgcctgggtgagcctgcc

SEQ ID NO: 26433 - DNA, 220 bp, Homo sapiens
agactataaagcctaaaatatttatagtgttaactttgataggacaagtttgccagctcctgcactagaggataaagattaacaggattgactccacatagaggagaggagaggaaggggcaaggatggaagcaaggagggagaagggttagagagaaagaaagagggaggggggtcactcagagacttcacaaagtatgttatttcctaaaaactgtaa

SEQ ID NO: 26434 - DNA, 401 bp, Homo sapiens
gggtaccctcaaaaacaatgggaaattgttgacaggtaactaagagaagaagagaagggtggtaacttcatgagatatacaagttaaaccattggtccagtagtttgccagaaagaatgatgaacacactgctaagaaaatgcctttctggggccgaaaaaaaccaaaatcttacctcaagagctgccccttcaaaataatctatatttaattggtattaaactaataataaagaaaagaagccgctcagaaagaaaactcagactcatatggcttccctggtgattctcccaatcatttaaagaagaattaataccaatacttcacaagttcttccaagaaaaatagaggaacatgtcccagaaaattttatgaggtcagtattatgtcgacatcaaatc

SEQ ID NO: 26435 - DNA, 471 bp, Homo sapiens
gactcacatctccaagcacatttccatttctcttattcaaggagatgcccccattgtctttcaaggtgaattgtggccataacaaagataaatgagtctcagattcatacaagtcaaaagcagatgaccagcacctggaaatactaaagccctgagctccaaggcaattcgataatttgaaagaagcatgaaaccttgtagtttctgccattatggtactcggggtaatgagattgaaaagtggtctatgccttgatcttggtattttaagttaatttttgcagcacttaaatattcctctgaacctattgaaagctattgtaacttgccattcttacaagtattcattaattcattcactgtaaatatttgctaaacattgaaggtgagattacatctatccatacaaccatatgtgtgcaagacagaacagtgtacatcaatgctggttaataaaatcagaaaactctg

SEQ ID NO: 26436 - DNA, 432 bp, Homo sapiens
tgcgtcgacctggttttttctgtgccccagtggaaggtgttccctctttaaacgcagccctgtgattcacacatcctcccaggtctttcaatgctaaagacaatggattatctctgagtttcagtccctacgtccagaagagaaaaatatgggtcaggcacagtggctcatgcctgtaatcccagcacttggggaggccaaggtgggtggatcacttgagaccaggagttcaagaccagcccggccaacatggcgaaacctcatctccactaaatctacaaaaattagccgggtgtggtggtgcacacctgtaatcccagctactcgggagactgaggcgcagcaatcacttgaacctggggggcagaggttgcagtgagctgagattgcaccatcgcatccagcctgagcaacagagcaatactcattcca

SEQ ID NO: 26437 - DNA, 392 bp, Homo sapiens
aggtgggaggatggcttgagcccagaagactgaggctacagtgagctgtgatcatgccactgcactccagcctgggttgcagagtacgaccccacctcaaaacaacaacagcagcaaaaaaatcttattgaggcatggtttaataaaatatagctgtttaggtgtatagttccatgacttctgaccaacctactaacccaggcaattattaccacaatcaagataaagaacatttctatcaccccaaaaagcaaatgccctcctctccccacactcagccccagcaacaactgctctcctttctgtcactatagattagatttgcctcttccagaatttcagatacataaacatgaatcaaacggtctgtactctttcgtgtttggcatctt

SEQ ID NO: 26438 - DNA, 893 bp, Homo sapiens
tcttctaaattcatttgtctaagtgacaagactatatataaaacttatatattggccaggcatggtggctcacacgtgtaaccccagcacttttggaggcaaaggcgggtggatcacttgagcccaggagttcaagaccagcctgggcaacatagcgggaccccgtctctaccaaaaattaaaaattagctggatgtcatcatgcatacctgtagtctcagctacttggacctgtagtctcagctactttggaggcaggaggatcacttgagtcagggaggtcgatgcttatcaaatcagtgagccatgattgtgccactgcattccagcctggatgacagagtctcaatcaatcaatcaataaaaaccttatatattcagtttagcagaattgtaaagtgaatacttgtgtaaacactatctggaccaagaaataggatctactggcactgcagaagttccccttactgtggatttcaatcccatccacaaccctctccctgtatcccaaaggtgatcactagactggctctttacatttttactacctttgtatgtatccctaaactatagtttcgtgtggtctttttggggagcctaacaaatagaatcatatggtatactttaaagaattaattgaagtgtaatgtacatatagaagaatccacagctcatagcatagagctcaattgtcataagaacacaccagtctagctatcatctagttagtgtacatttttttatgatcttgccttttctgctcaacattgtatccataagagggtagctgtaatttgttattttcattgctgtaatacatttctttattctcactctaaatgaaatgaaagagctaaataaacagtaactgtctgaaggaaactttagctcct

SEQ ID NO: 26439 - DNA, 282 bp, Homo sapiens
gccctcaccctagcagctgttggagaagatgagggaagcgctgagagtgcagactgttttcttatgctccccagtctctgtggccaggagtactccttttgccaagaaaggggtggtgccccactaaacctggtttgtcttttctctgtctctgccctgtctttgaaggtcctagggcccttgtgcatttcttacatgccaatcatggagtaggctggggcctggggttttgggtagggattctgttttgttcgttcccagtctggaagatgtggccaagag

SEQ ID NO: 26440 - DNA, 276 bp, Homo sapiens
atgctctttctacttctagttcacaggttccaggataaccagatgactgaggaatgttgaagattgcagtgatggaagtgtctcagtcagcctggaagactgtatggaaggaggttgcctggccacactgtcatgtccccctctccctaaaaaagggacacatttgcctttgtgcaaggcaacacatacatttggtctgtgtatatactttggtctatgtattctgttatttaacattctaataatgttgatgaccttaaaatatgtttgacaatg

SEQ ID NO: 26441 - DNA, 357 bp, Homo sapiens
ggccccttcttcagcagctcaggctgctgaaacagaacaccgcagcctgggtgcttcaacaaaaagaaaaatgcatttcctctcagctctggagacggaaagtccaagattgaggtgccagcagggttgatgtctgacaaggcctctcccctcgggttcaaagggccaccttctcagtgtcctcacatggccttccctttgtgggcatgggagagaaagcgatctctggtcttcttcctgttcttgtaaggacacccgtcctattggattaggggcccgaccttatgacatcatttaatctgaatgacctccttaaatgccctatctccaaatacagtcacatttggggttaggact

SEQ ID NO: 26442 - DNA, 692 bp, Homo sapiens
cacagggacccaggacaagggccccaaagaggcctgcccttggtgagctcaccgtgtgtgtgcccccagccacggacctcaccgtggggaagatctacgcagccatgatgatcatggagtactaccggcagagcaaggccaagaagctgcaggccatgcgcgaggagcaggtgcgctgttcgccgctctggggacatctgggctggggacagtggcttgcatgtcaccacgggaaccaactggaatatgagggtggctgagccccagggcaggtccctgaaaagtaggggctgtgcacagcagctcacacctgcaatctcagtgctttgagaggccagggcagagggatcgtttgagaccaggatgagaccaccctgggcaacacagtgagactccatctctacaaaataaaacattagccaggcatggtggtgcacacctgtagtcccagctatttaggaggccaagatgggaggatcacttgaggccaggagtgggagaccagtctgggcaacatagaaagacccatatctctacaaaaaaaaaataaaattagctgcatgtggcgccatgcacctgtggtcccagctacttgggaggctgaggcaggagaatcacttgaacctgggaggtggaggttgcagcaagccaagatcaagccactgcactccagcccgggtgataagagcagg

SEQ ID NO: 26443 - DNA, 464 bp, Homo sapiens
ttttgtgccctccctgcgggccaccaagagaaactgagtactgggacaggtaacctaagtaagagacacctcagccgccacagctttcagagttcttcctgggactccctgggtaggggcgggcgcggctcacgggagacccaggagggatgcctgggaatgactgcgcttgccttgggttttctgtagcggcttctgcggatggacctgcccgtcgcagatgacaacaccgtccacttcaattccaccctcatggctctgatccgcacagccctggacatcaagattgccaagggaggagccgacaaacagcagatggacgctgagctgcggaaggagatgatggcgatttggcccaatctgtcccagaagacgctagacctgctggtcacacctcacaagtgtaagagctgagcccagccctgggatccaatccaccaggacagatggagggggagggaaag

SEQ ID NO: 26444 - DNA, 552 bp, Homo sapiens
attgcattaatagtgctttctctctccctccttatttggggtctggcttgcttttttcctgttggttggcttcatgtaggggcctctgtgagtggtgacagctctgagccttttggggtgggtggatggtcacccctcttcctccatctccccagaataacttcatcaacctgagctttctccgcctcttccgagctgcccggctcatcaaacttctccgtcagggttacaccatccgcattcttctctggacctttgtgcagtccttcaaggccctgccttatgtctgtctgctgatcgccatgctcttcttcatctatgccatcattgggatgcaggtgtttggtaacattggcatcgacgtggaggacgaggacagtgatgaagatgagttccaaatcactgagcacaataacttccggaccttcttccaggccctcatgcttctcttccggtgagaaggggacctgctctgataattctgtttccgtggggtggggtgcctgccttcatccttctgttcccatagaggatgtaccctcctcttccaat

SEQ ID NO: 26445 - DNA, 8641 bp, Homo sapiens
  misc_feature (5859)..(5859): n is a, c, g, or t
  misc_feature (5881)..(5881): n is a, c, g, or t
  misc_feature (5887)..(5887): n is a, c, g, or t
  misc_feature (5900)..(5900): n is a, c, g, or t
  misc_feature (5903)..(5903): n is a, c, g, or t
  misc_feature (5908)..(5908): n is a, c, g, or t
cgcaccctccttccgcccctccttctccggggtcagccaggaagatgtcccgagctgctatccccggctcggcccgggcagccgccttctgagcccccgacccgaggcgccgagccgccgccgcccgatgggctgggccgtggagcgtctccgcagtcgtagctccagccgccgcgctcccagccccggcagcctcagcatcagcggcggcggcggcggcggcggcggcgtcttccgcatcgttcgccgcagcgtaacccggagccctttgctctttgcagaatggcccgcttcggagacgagatgccggcccgctacgggggaggaggctccggggcagccgccggggtggtcgtgggcagcggaggcgggcgaggagccgggggcagccggcagggcgggcagcccggggcgcaaaggatgtacaagcagtcaatggcgcagagagcgcggaccatggcactctacaaccccatccccgtccgacagaactgcctcacggttaaccggtctctcttcctcttcagcgaagacaacgtggtgagaaaatacgccaaaaagatcaccgaatggcctccctttgaatatatgattttagccaccatcatagcgaattgcatcgtcctcgcactggagcagcatctgcctgatgatgacaagaccccgatgtctgaacggctggatgacacagaaccatacttcattggaattttttgtttcgaggctggaattaaaatcattgcccttgggtttgccttccacaaaggctcctacttgaggaatggctggaatgtcatggactttgtggtggtgctaacgggcatcttggcgacagttgggacggagtttgacctacggacgctgagggcagttcgagtgctgcggccgctcaagctggtgtctggaatcccaagtttacaagtcgtcctgaagtcgatcatgaaggcgatgatccctttgctgcagatcggcctcctcctattttttgcaatccttatttttgcaatcatagggttagaattttatatgggaaaatttcataccacctgctttgaagaggggacagatgacattcagggtgagtctccggctccatgtgggacagaagagcccgcccgcacctgccccaatgggaccaaatgtcagccctactgggaagggcccaacaacgggatcactcagttcgacaacatcctgtttgcagtgctgactgttttccagtgcataaccatggaagggtggactgatctcctctacaatagcaacgatgcctcagggaacacttggaactggttgtacttcatccccctcatcatcatcggctccttttttatgctgaaccttgtgctgggtgtgctgtcaggggagtttgccaaagaaagggaacgggtggagaaccggcgggcttttctgaagctgaggcggcaacaacagattgaacgtgagctcaatgggtacatggaatggatctcaaaagcagaagaggtgatcctcgccgaggatgaaactgacggggagcagaggcatccctttgatggagctctgcggagaaccaccataaagaaaagcaagacagatttgctcaaccccgaagaggctgaggatcagctggctgatatagcctctgtgggttctcccttcgcccgagccagcattaaaagtgccaagctggagaactcgaccttttttcacaaaaaggagaggaggatgcgtttctacatccgccgcatggtcaaaactcaggccttctactggactgtactcagtttggtagctctcaacacgctgtgtgttgctattgttcactacaaccagcccgagtggctctccgacttcctttactatgcagaattcattttcttaggactctttatgtccgaaatgtttataaaaatgtacgggcttgggacgcggccttacttccactcttccttcaactgctttgactgtggggttatcattgggagcatcttcgaggtcatctgggctgtcataaaacctggcacatcctttggaatcagcgtgttacgagccctcaggttattgcgtattttcaaagtcacaaagtactgggcatctctcagaaacctggtcgtctctctcctcaactccatgaagtccatcatcagcctgttgtttctccttttcctgttcattgtcgtcttcgcccttttgggaatgcaactcttcggcggccagtttaatttcgatgaagggactcctcccaccaacttcgatacttttccagcagcaataatgacggtgtttcagatcctgacgggcgaagactggaacgaggtcatgtacgacgggatcaagtctcaggggggcgtgcagggcggcatggtgttctccatctatttcattgtactgacgctctttgggaactacaccctcctgaatgtgttcttggccatcgctgtggacaatctggccaacgcccaggagctcaccaaggacgagcaagaggaagaagaagcagcgaaccagaaacttgccctacagaaagccaaggaggtggcagaagtgagtcctctgtccgcggccaacatgtctatagctgtgaaagagcaacagaagaatcaaaagccagccaagtccgtgtgggagcagcggaccagtgagatgcgaaagcagaacttgctggccagccgggaggccctgtataacgaaatggacccggacgagcgctggaaggctgcctacacgcggcacctgcggccagacatgaagacgcacttggaccggccgctggtggtggacccgcaggagaaccgcaacaacaacaccaacaagagccgggcggccgagcccaccgtggaccagcgcctcggccagcagcgcgccgaggacttcctcaggaaacaggcccgctaccacgatcgggcccgggaccccagcggctcggcgggcctggacgcacggaggccctgggcgggaagccaggaggccgagctgagccgggagggaccctacggccgcgagtcggaccaccacgcccgggagggcagcctggagcaacccgggttctgggagggcgaggccgagcgaggcaaggccggggacccccaccggaggcacgtgcaccggcaggggggcagcagggagagccgcagcgggtccccgcgcacgggcgcggacggggagcatcgacgtcatcgcgcgcaccgcaggcccggggaggagggtccggaggacaaggcggagcggagggcgcggcaccgcgagggcagccggccggcccggggcggcgagggcgagggcgagggccccgacgggggcgagcgcaggagaaggcaccggcatggcgctccagccacgtacgagggggacgcgcggagggaggacaaggagcggaggcatcggaggaggaaagagaaccagggctccggggtccctgtgtcgggccccaacctgtcaaccacccggccaatccagcaggacctgggccgccaagacccacccctggcagaggatattgacaacatgaagaacaacaagctggccaccgcggagtcggccgctccccacggcagccttggccacgccggcctgccccagagcccagccaagatgggaaacagcaccgaccccggccccatgctggccatccctgccatggccaccaacccccagaacgccgccagccgccggacgcccaacaacccggggaacccatccaatcccggcccccccaagacccccgagaatagccttatcgtcaccaaccccagcggcacccagaccaattcagctaagactgccaggaaacccgaccacaccacagtggacatccccccagcctgcccaccccccctcaaccacaccgtcgtacaagtgaacaaaaacgccaacccagacccactgccaaaaaaagaggaagagaagaaggaggaggaggaagacgaccgtggggaagacggccctaagccaatgcctccctatagctccatgttcatcctgtccacgaccaacccccttcgccgcctgtgccattacatcctgaacctgcgctactttgagatgtgcatcctcatggtcattgccatgagcagcatcgccctggccgccgaggaccctgtgcagcccaacgcacctcggaacaacgtgctgcgatactttgactacgtttttacaggcgtctttacctttgagatggtgatcaagatgattgacctggggctcgtcctgcatcagggtgcctacttccgtgacctctggaatattctcgacttcatagtggtcagtggggccctggtagcctttgccttcactggcaatagcaaaggaaaagacatcaacacgattaaatccctccgagtcctccgggtgctacgacctcttaaaaccatcaagcggctgccaaagctcaaggctgtgtttgactgtgtggtgaactcacttaaaaacgtcttcaacatcctcatcgtctacatgctattcatgttcatcttcgccgtggtggctgtgcagctcttcaaggggaaattcttccactgcactgacgagtccaaagagtttgagaaagattgtcgaggcaaatacctcctctacgagaagaatgaggtgaaggcgcgagaccgggagtggaagaagtatgaattccattacgacaatgtgctgtgggctctgctgaccctcttcaccgtgtccacgggagaaggctggccacaggtcctcaagcattcggtggacgccacctttgagaaccagggccccagccccgggtaccgcatggagatgtccattttctacgtcgtctactttgtggtgttccccttcttctttgtcaatatctttgtggccttgatcatcatcaccttccaggagcaaggggacaagatgatggaggaatacagcctggagaaaaatgagagggcctgcattgatttcgccatcagcgccaagccgctgacccgacacatgccgcagaacaagcagagcttccagtaccgcatgtggcagttcgtggtgtctccgcctttcgagtacacgatcatggccatgatcgccctcaacaccatcgtgcttatgatgaagttctatggggcttctgttgcttatgaaaatgccctgcgggtgttcaacatcgtcttcacctccctcttctctctggaatgtgtgctgaaagtcatggcttttgggattctgaattatttccgcgatgcctggaacatcttcgactttgtgactgttctgggcagcatcaccgatatcctcgtgactgagtttgggaataacttcatcaacctgagctttctccgcctcttccgagctgcccggctcatcaaacttctccgtcagggttacaccatccgcattcttctctggacctttgtgcagtccttcaaggccctgccttatgtctgtctgctgatcgccatgctcttcttcatctatgccatcattgggatgcaggtgtttggtaacattggcatcgacgtggaggacgaggacagtgatgaagatgagttccaaatcactgagcacaataacttccggaccttcttccaggccctcatgcttctcttccggagtgccaccggggaagcttggcacaacatcatgctttcctgcctcagcgggaaaccgtgtgataagaactctggcatcctgactcgagagtgtggcaatgaatttgcttatttttactttgtttccttcatcttcctctgctcgtttctgatgctgaatctctttgtcgccgtcatcatggacaactttgagtacctcacccgagactcctccatcctgggcccccaccacctggatgagtacgtgcgtgtctgggccgagtatgaccccgcagcttgcggtcggattcattataaggatatgtacagtttattacgagtaatntctccgccctctcggcttaggnaagaantgtccgtcatagngtngcttncaagcggcttctgcggatggacctgcccgtcgcagatgacaacaccgtccacttcaattccaccctcatggctctgatccgcacagccctggacatcaagattgccaagggaggagccgacaaacagcagatggacgctgagctgcggaaggagatgatggcgatttggcccaatctgtcccagaagacgctagacctgctggtcacacctcacaagtccacggacctcaccgtggggaagatctacgcagccatgatgatcatggagtactaccggcagagcaaggccaagaagctgcaggccatgcgcgaggagcaggaccggacacccctcatgttccagcgcatggagcccccgtccccaacgcaggaagggggacctggccagaacgccctcccctccacccagctggacccaggaggagccctgatggctcacgaaagcggcctcaaggagagcccgtcctgggtgacccagcgtgcccaggagatgttccagaagacgggcacatggagtccggaacaaggcccccctaccgacatgcccaacagccagcctaactctcagtccgtggagatgcgagagatgggcagagatggctactccgacagcgagcactacctccccatggaaggccagggccgggctgcctccatgccccgcctccctgcagagaaccagaggagaaggggccggccacgtgggaataacctcagtaccatctcagacaccagccccatgaagcgttcagcctccgtgctgggccccaaggcccgacgcctggacgattactcgctggagcgggtcccgcccgaggagaaccagcggcaccaccagcggcgccgcgaccgcagccaccgcgcctctgagcgctccctgggccgctacaccgatgtggacacaggcttggggacagacctgagcatgaccacccaatccggggacctgccgtcgaaggagcgggaccaggagcggggccggcccaaggatcggaagcatcgacagcaccaccaccaccaccaccaccaccaccatcccccgccccccgacaaggaccgctatgcccaggaacggccggaccacggccgggcacgggctcgggaccagcgctggtcccgctcgcccagcgagggccgagagcacatggcgcaccggcagggcagtagttccgtaagtggaagcccagccccctcaacatctggtaccagcactccgcggcggggccgccgccagctcccccagaccccctccaccccccggccacacgtgtcctattcccctgtgatccgtaaggccggcggctcggggcccccgcagcagcagcagcagcagcagcagcagcagcagcagcaggcggtggccaggccgggccgggcggccaccagcggccctcggaggtacccaggccccacggccgagcctctggccggagatcggccgcccacggggggccacagcagcggccgctcgcccaggatggagaggcgggtcccaggcccggcccggagcgagtcccccagggcctgtcgacacggcggggcccggtggccggcatctggcccgcacgtgtccgaggggcccccgggtccccggcaccatggctactaccggggctccgactacgacgaggccgatggcccgggcagcgggggcggcgaggaggccatggccggggcctacgacgcgccaccccccgtacgacacgcgtcctcgggcgccaccgggcgctcgcccaggactccccgggcctcgggcccggcctgcgcctcgccttctcggcacggccggcgactccccaacggctactacccggcgcacggactggccaggccccgcgggccgggctccaggaagggcctgcacgaaccctacagcgagagtgacgatgattggtgctaagcccgggcgaggtggcgcccgcccggccccccacgcaccccacgcacacaccccacccgaggagccgcgcagaggccgcgggggcccagcacagagggcccgggagagggccagccgggagaccccagactctggagaggccagggctgggccacaagggtgtcccgcagagaccctcggccaaaagagaccctcctgggcagccacggcgccccccaaccagccccgatccccccacccacgacaggggctctcgggtgggaggcagggagcagacaaaccacacagccaagggatttgaattaactcagccatttttggagaactttggggaacatgaaaaaaaaaaaaaaaaaaaaaaaaacatttttaaaagaaaaaacggggagaaaaaaatagcttctattgatgagttttatcatctcaattgaatctttcctttccctgatgaagacagctggtggccgagtgcggcaaagaagccagaaggaaccagaatcccagtgccctacacccaccaccagacacactcacacccacacacgttctcagacacacacaagagtgcttgccggttataccaaaccctactattactgcctgcagaaatcaatttaaaaaaataataataacaataaacaattttaaaaaggacaaaaaaattaatgattgagaaaagaggcatttttttctgacatttggtcctgcttgaaacaacaaaagaagaagaaaaacccaccatcaccaccgattcctttgcttcttttttccttttttcctaccttgtttgaaaaccgtgggcttgggactgtgaattattgcatgacattcaa

SEQ ID NO: 26446 - DNA, 8674 bp, Homo sapiens
  misc_feature (5859)..(5859): n is a, c, g, or t
  misc_feature (5881)..(5881): n is a, c, g, or t
  misc_feature (5887)..(5887): n is a, c, g, or t
  misc_feature (5900)..(5900): n is a, c, g, or t
  misc_feature (5903)..(5903): n is a, c, g, or t
  misc_feature (5908)..(5908): n is a, c, g, or t
cgcaccctccttccgcccctccttctccggggtcagccaggaagatgtcccgagctgctatccccggctcggcccgggcagccgccttctgagcccccgacccgaggcgccgagccgccgccgcccgatgggctgggccgtggagcgtctccgcagtcgtagctccagccgccgcgctcccagccccggcagcctcagcatcagcggcggcggcggcggcggcggcggcgtcttccgcatcgttcgccgcagcgtaacccggagccctttgctctttgcagaatggcccgcttcggagacgagatgccggcccgctacgggggaggaggctccggggcagccgccggggtggtcgtgggcagcggaggcgggcgaggagccgggggcagccggcagggcgggcagcccggggcgcaaaggatgtacaagcagtcaatggcgcagagagcgcggaccatggcactctacaaccccatccccgtccgacagaactgcctcacggttaaccggtctctcttcctcttcagcgaagacaacgtggtgagaaaatacgccaaaaagatcaccgaatggcctccctttgaatatatgattttagccaccatcatagcgaattgcatcgtcctcgcactggagcagcatctgcctgatgatgacaagaccccgatgtctgaacggctggatgacacagaaccatacttcattggaattttttgtttcgaggctggaattaaaatcattgcccttgggtttgccttccacaaaggctcctacttgaggaatggctggaatgtcatggactttgtggtggtgctaacgggcatcttggcgacagttgggacggagtttgacctacggacgctgagggcagttcgagtgctgcggccgctcaagctggtgtctggaatcccaagtttacaagtcgtcctgaagtcgatcatgaaggcgatgatccctttgctgcagatcggcctcctcctattttttgcaatccttatttttgcaatcatagggttagaattttatatgggaaaatttcataccacctgctttgaagaggggacagatgacattcagggtgagtctccggctccatgtgggacagaagagcccgcccgcacctgccccaatgggaccaaatgtcagccctactgggaagggcccaacaacgggatcactcagttcgacaacatcctgtttgcagtgctgactgttttccagtgcataaccatggaagggtggactgatctcctctacaatagcaacgatgcctcagggaacacttggaactggttgtacttcatccccctcatcatcatcggctccttttttatgctgaaccttgtgctgggtgtgctgtcaggggagtttgccaaagaaagggaacgggtggagaaccggcgggcttttctgaagctgaggcggcaacaacagattgaacgtgagctcaatgggtacatggaatggatctcaaaagcagaagaggtgatcctcgccgaggatgaaactgacggggagcagaggcatccctttgatggagctctgcggagaaccaccataaagaaaagcaagacagatttgctcaaccccgaagaggctgaggatcagctggctgatatagcctctgtgggttctcccttcgcccgagccagcattaaaagtgccaagctggagaactcgaccttttttcacaaaaaggagaggaggatgcgtttctacatccgccgcatggtcaaaactcaggccttctactggactgtactcagtttggtagctctcaacacgctgtgtgttgctattgttcactacaaccagcccgagtggctctccgacttcctttactatgcagaattcattttcttaggactctttatgtccgaaatgtttataaaaatgtacgggcttgggacgcggccttacttccactcttccttcaactgctttgactgtggggttatcattgggagcatcttcgaggtcatctgggctgtcataaaacctggcacatcctttggaatcagcgtgttacgagccctcaggttattgcgtattttcaaagtcacaaagtactgggcatctctcagaaacctggtcgtctctctcctcaactccatgaagtccatcatcagcctgttgtttctccttttcctgttcattgtcgtcttcgcccttttgggaatgcaactcttcggcggccagtttaatttcgatgaagggactcctcccaccaacttcgatacttttccagcagcaataatgacggtgtttcagatcctgacgggcgaagactggaacgaggtcatgtacgacgggatcaagtctcaggggggcgtgcagggcggcatggtgttctccatctatttcattgtactgacgctctttgggaactacaccctcctgaatgtgttcttggccatcgctgtggacaatctggccaacgcccaggagctcaccaaggacgagcaagaggaagaagaagcagcgaaccagaaacttgccctacagaaagccaaggaggtggcagaagtgagtcctctgtccgcggccaacatgtctatagctgtgaaagagcaacagaagaatcaaaagccagccaagtccgtgtgggagcagcggaccagtgagatgcgaaagcagaacttgctggccagccgggaggccctgtataacgaaatggacccggacgagcgctggaaggctgcctacacgcggcacctgcggccagacatgaagacgcacttggaccggccgctggtggtggacccgcaggagaaccgcaacaacaacaccaacaagagccgggcggccgagcccaccgtggaccagcgcctcggccagcagcgcgccgaggacttcctcaggaaacaggcccgctaccacgatcgggcccgggaccccagcggctcggcgggcctggacgcacggaggccctgggcgggaagccaggaggccgagctgagccgggagggaccctacggccgcgagtcggaccaccacgcccgggagggcagcctggagcaacccgggttctgggagggcgaggccgagcgaggcaaggccggggacccccaccggaggcacgtgcaccggcaggggggcagcagggagagccgcagcgggtccccgcgcacgggcgcggacggggagcatcgacgtcatcgcgcgcaccgcaggcccggggaggagggtccggaggacaaggcggagcggagggcgcggcaccgcgagggcagccggccggcccggggcggcgagggcgagggcgagggccccgacgggggcgagcgcaggagaaggcaccggcatggcgctccagccacgtacgagggggacgcgcggagggaggacaaggagcggaggcatcggaggaggaaagagaaccagggctccggggtccctgtgtcgggccccaacctgtcaaccacccggccaatccagcaggacctgggccgccaagacccacccctggcagaggatattgacaacatgaagaacaacaagctggccaccgcggagtcggccgctccccacggcagccttggccacgccggcctgccccagagcccagccaagatgggaaacagcaccgaccccggccccatgctggccatccctgccatggccaccaacccccagaacgccgccagccgccggacgcccaacaacccggggaacccatccaatcccggcccccccaagacccccgagaatagccttatcgtcaccaaccccagcggcacccagaccaattcagctaagactgccaggaaacccgaccacaccacagtggacatccccccagcctgcccaccccccctcaaccacaccgtcgtacaagtgaacaaaaacgccaacccagacccactgccaaaaaaagaggaagagaagaaggaggaggaggaagacgaccgtggggaagacggccctaagccaatgcctccctatagctccatgttcatcctgtccacgaccaacccccttcgccgcctgtgccattacatcctgaacctgcgctactttgagatgtgcatcctcatggtcattgccatgagcagcatcgccctggccgccgaggaccctgtgcagcccaacgcacctcggaacaacgtgctgcgatactttgactacgtttttacaggcgtctttacctttgagatggtgatcaagatgattgacctggggctcgtcctgcatcagggtgcctacttccgtgacctctggaatattctcgacttcatagtggtcagtggggccctggtagcctttgccttcactggcaatagcaaaggaaaagacatcaacacgattaaatccctccgagtcctccgggtgctacgacctcttaaaaccatcaagcggctgccaaagctcaaggctgtgtttgactgtgtggtgaactcacttaaaaacgtcttcaacatcctcatcgtctacatgctattcatgttcatcttcgccgtggtggctgtgcagctcttcaaggggaaattcttccactgcactgacgagtccaaagagtttgagaaagattgtcgaggcaaatacctcctctacgagaagaatgaggtgaaggcgcgagaccgggagtggaagaagtatgaattccattacgacaatgtgctgtgggctctgctgaccctcttcaccgtgtccacgggagaaggctggccacaggtcctcaagcattcggtggacgccacctttgagaaccagggccccagccccgggtaccgcatggagatgtccattttctacgtcgtctactttgtggtgttccccttcttctttgtcaatatctttgtggccttgatcatcatcaccttccaggagcaaggggacaagatgatggaggaatacagcctggagaaaaatgagagggcctgcattgatttcgccatcagcgccaagccgctgacccgacacatgccgcagaacaagcagagcttccagtaccgcatgtggcagttcgtggtgtctccgcctttcgagtacacgatcatggccatgatcgccctcaacaccatcgtgcttatgatgaagttctatggggcttctgttgcttatgaaaatgccctgcgggtgttcaacatcgtcttcacctccctcttctctctggaatgtgtgctgaaagtcatggcttttgggattctgaattatttccgcgatgcctggaacatcttcgactttgtgactgttctgggcagcatcaccgatatcctcgtgactgagtttgggaataacttcatcaacctgagctttctccgcctcttccgagctgcccggctcatcaaacttctccgtcagggttacaccatccgcattcttctctggacctttgtgcagtccttcaaggccctgccttatgtctgtctgctgatcgccatgctcttcttcatctatgccatcattgggatgcaggtgtttggtaacattggcatcgacgtggaggacgaggacagtgatgaagatgagttccaaatcactgagcacaataacttccggaccttcttccaggccctcatgcttctcttccggagtgccaccggggaagcttggcacaacatcatgctttcctgcctcagcgggaaaccgtgtgataagaactctggcatcctgactcgagagtgtggcaatgaatttgcttatttttactttgtttccttcatcttcctctgctcgtttctgatgctgaatctctttgtcgccgtcatcatggacaactttgagtacctcacccgagactcctccatcctgggcccccaccacctggatgagtacgtgcgtgtctgggccgagtatgaccccgcagcttgcggtcggattcattataaggatatgtacagtttattacgagtaatntctccgccctctcggcttaggnaagaantgtccgtcatagngtngcttncaagcggcttctgcggatggacctgcccgtcgcagatgacaacaccgtccacttcaattccaccctcatggctctgatccgcacagccctggacatcaagattgccaagggaggagccgacaaacagcagatggacgctgagctgcggaaggagatgatggcgatttggcccaatctgtcccagaagacgctagacctgctggtcacacctcacaagtccacggacctcaccgtggggaagatctacgcagccatgatgatcatggagtactaccggcagagcaaggccaagaagctgcaggccatgcgcgaggagcaggaccggacacccctcatgttccagcgcatggagcccccgtccccaacgcaggaagggggacctggccagaacgccctcccctccacccagctggacccaggaggagccctgatggctcacgaaagcggcctcaaggagagcccgtcctgggtgacccagcgtgcccaggagatgttccagaagacgggcacatggagtccggaacaaggcccccctaccgacatgcccaacagccagcctaactctcagtccgtggagatgcgagagatgggcagagatggctactccgacagcgagcactacctccccatggaaggccagggccgggctgcctccatgccccgcctccctgcagagaaccagaggagaaggggccggccacgtgggaataacctcagtaccatctcagacaccagccccatgaagcgttcagcctccgtgctgggccccaaggcccgacgcctggacgattactcgctggagcgggtcccgcccgaggagaaccagcggcaccaccagcggcgccgcgaccgcagccaccgcgcctctgagcgctccctgggccgctacaccgatgtggacacaggcttggggacagacctgagcatgaccacccaatccggggacctgccgtcgaaggagcgggaccaggagcggggccggcccaaggatcggaagcatcgacagcaccaccaccaccaccaccaccaccaccatcccccgccccccgacaaggaccgctatgcccaggaacggccggaccacggccgggcacgggctcgggaccagcgctggtcccgctcgcccagcgagggccgagagcacatggcgcaccggcagggcagtagttccgtaagtggaagcccagccccctcaacatctggtaccagcactccgcggcggggccgccgccagctcccccagaccccctccaccccccggccacacgtgtcctattcccctgtgatccgtaaggccggcggctcggggcccccgcagcagcagcagcagcagcagcagcagcagcagcagcagcagcagcagcagcagcagcagcagcagcagcaggcggtggccaggccgggccgggcggccaccagcggccctcggaggtacccaggccccacggccgagcctctggccggagatcggccgcccacggggggccacagcagcggccgctcgcccaggatggagaggcgggtcccaggcccggcccggagcgagtcccccagggcctgtcgacacggcggggcccggtggccggcatctggcccgcacgtgtccgaggggcccccgggtccccggcaccatggctactaccggggctccgactacgacgaggccgatggcccgggcagcgggggcggcgaggaggccatggccggggcctacgacgcgccaccccccgtacgacacgcgtcctcgggcgccaccgggcgctcgcccaggactccccgggcctcgggcccggcctgcgcctcgccttctcggcacggccggcgactccccaacggctactacccggcgcacggactggccaggccccgcgggccgggctccaggaagggcctgcacgaaccctacagcgagagtgacgatgattggtgctaagcccgggcgaggtggcgcccgcccggccccccacgcaccccacgcacacaccccacccgaggagccgcgcagaggccgcgggggcccagcacagagggcccgggagagggccagccgggagaccccagactctggagaggccagggctgggccacaagggtgtcccgcagagaccctcggccaaaagagaccctcctgggcagccacggcgccccccaaccagccccgatccccccacccacgacaggggctctcgggtgggaggcagggagcagacaaaccacacagccaagggatttgaattaactcagccatttttggagaactttggggaacatgaaaaaaaaaaaaaaaaaaaaaaaaacatttttaaaagaaaaaacggggagaaaaaaatagcttctattgatgagttttatcatctcaattgaatctttcctttccctgatgaagacagctggtggccgagtgcggcaaagaagccagaaggaaccagaatcccagtgccctacacccaccaccagacacactcacacccacacacgttctcagacacacacaagagtgcttgccggttataccaaaccctactattactgcctgcagaaatcaatttaaaaaaataataataacaataaacaattttaaaaaggacaaaaaaattaatgattgagaaaagaggcatttttttctgacatttggtcctgcttgaaacaacaaaagaagaagaaaaacccaccatcaccaccgattcctttgcttcttttttccttttttcctaccttgtttgaaaaccgtgggcttgggactgtgaattattgcatgacattcaa

SEQ ID NO: 26447 - DNA, 8603 bp, Homo sapiens
cgcaccctccttccgcccctccttctccggggtcagccaggaagatgtcccgagctgctatccccggctcggcccgggcagccgccttctgagcccccgacccgaggcgccgagccgccgccgcccgatgggctgggccgtggagcgtctccgcagtcgtagctccagccgccgcgctcccagccccggcagcctcagcatcagcggcggcggcggcggcggcggcggcgtcttccgcatcgttcgccgcagcgtaacccggagccctttgctctttgcagaatggcccgcttcggagacgagatgccggcccgctacgggggaggaggctccggggcagccgccggggtggtcgtgggcagcggaggcgggcgaggagccgggggcagccggcagggcgggcagcccggggcgcaaaggatgtacaagcagtcaatggcgcagagagcgcggaccatggcactctacaaccccatccccgtccgacagaactgcctcacggttaaccggtctctcttcctcttcagcgaagacaacgtggtgagaaaatacgccaaaaagatcaccgaatggcctccctttgaatatatgattttagccaccatcatagcgaattgcatcgtcctcgcactggagcagcatctgcctgatgatgacaagaccccgatgtctgaacggctggatgacacagaaccatacttcattggaattttttgtttcgaggctggaattaaaatcattgcccttgggtttgccttccacaaaggctcctacttgaggaatggctggaatgtcatggactttgtggtggtgctaacgggcatcttggcgacagttgggacggagtttgacctacggacgctgagggcagttcgagtgctgcggccgctcaagctggtgtctggaatcccaagtttacaagtcgtcctgaagtcgatcatgaaggcgatgatccctttgctgcagatcggcctcctcctattttttgcaatccttatttttgcaatcatagggttagaattttatatgggaaaatttcataccacctgctttgaagaggggacagatgacattcagggtgagtctccggctccatgtgggacagaagagcccgcccgcacctgccccaatgggaccaaatgtcagccctactgggaagggcccaacaacgggatcactcagttcgacaacatcctgtttgcagtgctgactgttttccagtgcataaccatggaagggtggactgatctcctctacaatagcaacgatgcctcagggaacacttggaactggttgtacttcatccccctcatcatcatcggctccttttttatgctgaaccttgtgctgggtgtgctgtcaggggagtttgccaaagaaagggaacgggtggagaaccggcgggcttttctgaagctgaggcggcaacaacagattgaacgtgagctcaatgggtacatggaatggatctcaaaagcagaagaggtgatcctcgccgaggatgaaactgacggggagcagaggcatccctttgatggagctctgcggagaaccaccataaagaaaagcaagacagatttgctcaaccccgaagaggctgaggatcagctggctgatatagcctctgtgggttctcccttcgcccgagccagcattaaaagtgccaagctggagaactcgaccttttttcacaaaaaggagaggaggatgcgtttctacatccgccgcatggtcaaaactcaggccttctactggactgtactcagtttggtagctctcaacacgctgtgtgttgctattgttcactacaaccagcccgagtggctctccgacttcctttactatgcagaattcattttcttaggactctttatgtccgaaatgtttataaaaatgtacgggcttgggacgcggccttacttccactcttccttcaactgctttgactgtggggttatcattgggagcatcttcgaggtcatctgggctgtcataaaacctggcacatcctttggaatcagcgtgttacgagccctcaggttattgcgtattttcaaagtcacaaagtactgggcatctctcagaaacctggtcgtctctctcctcaactccatgaagtccatcatcagcctgttgtttctccttttcctgttcattgtcgtcttcgcccttttgggaatgcaactcttcggcggccagtttaatttcgatgaagggactcctcccaccaacttcgatacttttccagcagcaataatgacggtgtttcagatcctgacgggcgaagactggaacgaggtcatgtacgacgggatcaagtctcaggggggcgtgcagggcggcatggtgttctccatctatttcattgtactgacgctctttgggaactacaccctcctgaatgtgttcttggccatcgctgtggacaatctggccaacgcccaggagctcaccaaggacgagcaagaggaagaagaagcagcgaaccagaaacttgccctacagaaagccaaggaggtggcagaagtgagtcctctgtccgcggccaacatgtctatagctgtgaaagagcaacagaagaatcaaaagccagccaagtccgtgtgggagcagcggaccagtgagatgcgaaagcagaacttgctggccagccgggaggccctgtataacgaaatggacccggacgagcgctggaaggctgcctacacgcggcacctgcggccagacatgaagacgcacttggaccggccgctggtggtggacccgcaggagaaccgcaacaacaacaccaacaagagccgggcggccgagcccaccgtggaccagcgcctcggccagcagcgcgccgaggacttcctcaggaaacaggcccgctaccacgatcgggcccgggaccccagcggctcggcgggcctggacgcacggaggccctgggcgggaagccaggaggccgagctgagccgggagggaccctacggccgcgagtcggaccaccacgcccgggagggcagcctggagcaacccgggttctgggagggcgaggccgagcgaggcaaggccggggacccccaccggaggcacgtgcaccggcaggggggcagcagggagagccgcagcgggtccccgcgcacgggcgcggacggggagcatcgacgtcatcgcgcgcaccgcaggcccggggaggagggtccggaggacaaggcggagcggagggcgcggcaccgcgagggcagccggccggcccggggcggcgagggcgagggcgagggccccgacgggggcgagcgcaggagaaggcaccggcatggcgctccagccacgtacgagggggacgcgcggagggaggacaaggagcggaggcatcggaggaggaaagagaaccagggctccggggtccctgtgtcgggccccaacctgtcaaccacccggccaatccagcaggacctgggccgccaagacccacccctggcagaggatattgacaacatgaagaacaacaagctggccaccgcggagtcggccgctccccacggcagccttggccacgccggcctgccccagagcccagccaagatgggaaacagcaccgaccccggccccatgctggccatccctgccatggccaccaacccccagaacgccgccagccgccggacgcccaacaacccggggaacccatccaatcccggcccccccaagacccccgagaatagccttatcgtcaccaaccccagcggcacccagaccaattcagctaagactgccaggaaacccgaccacaccacagtggacatccccccagcctgcccaccccccctcaaccacaccgtcgtacaagtgaacaaaaacgccaacccagacccactgccaaaaaaagaggaagagaagaaggaggaggaggaagacgaccgtggggaagacggccctaagccaatgcctccctatagctccatgttcatcctgtccacgaccaacccccttcgccgcctgtgccattacatcctgaacctgcgctactttgagatgtgcatcctcatggtcattgccatgagcagcatcgccctggccgccgaggaccctgtgcagcccaacgcacctcggaacaacgtgctgcgatactttgactacgtttttacaggcgtctttacctttgagatggtgatcaagatgattgacctggggctcgtcctgcatcagggtgcctacttccgtgacctctggaatattctcgacttcatagtggtcagtggggccctggtagcctttgccttcactggcaatagcaaaggaaaagacatcaacacgattaaatccctccgagtcctccgggtgctacgacctcttaaaaccatcaagcggctgccaaagctcaaggctgtgtttgactgtgtggtgaactcacttaaaaacgtcttcaacatcctcatcgtctacatgctattcatgttcatcttcgccgtggtggctgtgcagctcttcaaggggaaattcttccactgcactgacgagtccaaagagtttgagaaagattgtcgaggcaaatacctcctctacgagaagaatgaggtgaaggcgcgagaccgggagtggaagaagtatgaattccattacgacaatgtgctgtgggctctgctgaccctcttcaccgtgtccacgggagaaggctggccacaggtcctcaagcattcggtggacgccacctttgagaaccagggccccagccccgggtaccgcatggagatgtccattttctacgtcgtctactttgtggtgttccccttcttctttgtcaatatctttgtggccttgatcatcatcaccttccaggagcaaggggacaagatgatggaggaatacagcctggagaaaaatgagagggcctgcattgatttcgccatcagcgccaagccgctgacccgacacatgccgcagaacaagcagagcttccagtaccgcatgtggcagttcgtggtgtctccgcctttcgagtacacgatcatggccatgatcgccctcaacaccatcgtgcttatgatgaagttctatggggcttctgttgcttatgaaaatgccctgcgggtgttcaacatcgtcttcacctccctcttctctctggaatgtgtgctgaaagtcatggcttttgggattctgaattatttccgcgatgcctggaacatcttcgactttgtgactgttctgggcagcatcaccgatatcctcgtgactgagtttgggaataacttcatcaacctgagctttctccgcctcttccgagctgcccggctcatcaaacttctccgtcagggttacaccatccgcattcttctctggacctttgtgcagtccttcaaggccctgccttatgtctgtctgctgatcgccatgctcttcttcatctatgccatcattgggatgcaggtgtttggtaacattggcatcgacgtggaggacgaggacagtgatgaagatgagttccaaatcactgagcacaataacttccggaccttcttccaggccctcatgcttctcttccggagtgccaccggggaagcttggcacaacatcatgctttcctgcctcagcgggaaaccgtgtgataagaactctggcatcctgactcgagagtgtggcaatgaatttgcttatttttactttgtttccttcatcttcctctgctcgtttctgatgctgaatctctttgtcgccgtcatcatggacaactttgagtacctcacccgagactcctccatcctgggcccccaccacctggatgagtacgtgcgtgtctgggccgagtatgaccccgcagcttggggccgcatgccttacctggacatgtatcagatgctgagacacatgtctccgcccctgggtctggggaagaagtgtccggccagagtggcttacaagcggcttctgcggatggacctgcccgtcgcagatgacaacaccgtccacttcaattccaccctcatggctctgatccgcacagccctggacatcaagattgccaagggaggagccgacaaacagcagatggacgctgagctgcggaaggagatgatggcgatttggcccaatctgtcccagaagacgctagacctgctggtcacacctcacaagtccacggacctcaccgtggggaagatctacgcagccatgatgatcatggagtactaccggcagagcaaggccaagaagctgcaggccatgcgcgaggagcaggaccggacacccctcatgttccagcgcatggagcccccgtccccaacgcaggaagggggacctggccagaacgccctcccctccacccagctggacccaggaggagccctgatggctcacgaaagcggcctcaaggagagcccgtcctgggtgacccagcgtgcccaggagatgttccagaagacgggcacatggagtccggaacaaggcccccctaccgacatgcccaacagccagcctaactctcagtccgtggagatgcgagagatgggcagagatggctactccgacagcgagcactacctccccatggaaggccagggccgggctgcctccatgccccgcctccctgcagagaaccagaccatctcagacaccagccccatgaagcgttcagcctccgtgctgggccccaaggcccgacgcctggacgattactcgctggagcgggtcccgcccgaggagaaccagcggcaccaccagcggcgccgcgaccgcagccaccgcgcctctgagcgctccctgggccgctacaccgatgtggacacaggcttggggacagacctgagcatgaccacccaatccggggacctgccgtcgaaggagcgggaccaggagcggggccggcccaaggatcggaagcatcgacagcaccaccaccaccaccaccaccaccaccatcccccgccccccgacaaggaccgctatgcccaggaacggccggaccacggccgggcacgggctcgggaccagcgctggtcccgctcgcccagcgagggccgagagcacatggcgcaccggcagggcagtagttccgtaagtggaagcccagccccctcaacatctggtaccagcactccgcggcggggccgccgccagctcccccagaccccctccaccccccggccacacgtgtcctattcccctgtgatccgtaaggccggcggctcggggcccccgcagcagcagcagcagcagcagcagcagcagcagcagcaggcggtggccaggccgggccgggcggccaccagcggccctcggaggtacccaggccccacggccgagcctctggccggagatcggccgcccacggggggccacagcagcggccgctcgcccaggatggagaggcgggtcccaggcccggcccggagcgagtcccccagggcctgtcgacacggcggggcccggtggccggcatctggcccgcacgtgtccgaggggcccccgggtccccggcaccatggctactaccggggctccgactacgacgaggccgatggcccgggcagcgggggcggcgaggaggccatggccggggcctacgacgcgccaccccccgtacgacacgcgtcctcgggcgccaccgggcgctcgcccaggactccccgggcctcgggcccggcctgcgcctcgccttctcggcacggccggcgactccccaacggctactacccggcgcacggactggccaggccccgcgggccgggctccaggaagggcctgcacgaaccctacagcgagagtgacgatgattggtgctaagcccgggcgaggtggcgcccgcccggccccccacgcaccccacgcacacaccccacccgaggagccgcgcagaggccgcgggggcccagcacagagggcccgggagagggccagccgggagaccccagactctggagaggccagggctgggccacaagggtgtcccgcagagaccctcggccaaaagagaccctcctgggcagccacggcgccccccaaccagccccgatccccccacccacgacaggggctctcgggtgggaggcagggagcagacaaaccacacagccaagggatttgaattaactcagccatttttggagaactttggggaacatgaaaaaaaaaaaaaaaaaaaaaaaaacatttttaaaagaaaaaacggggagaaaaaaatagcttctattgatgagttttatcatctcaattgaatctttcctttccctgatgaagacagctggtggccgagtgcggcaaagaagccagaaggaaccagaatcccagtgccctacacccaccaccagacacactcacacccacacacgttctcagacacacacaagagtgcttgccggttataccaaaccctactattactgcctgcagaaatcaatttaaaaaaataataataacaataaacaattttaaaaaggacaaaaaaattaatgattgagaaaagaggcatttttttctgacatttggtcctgcttgaaacaacaaaagaagaagaaaaacccaccatcaccaccgattcctttgcttcttttttccttttttcctaccttgtttgaaaaccgtgggcttgggactgtgaattattgcatgacattcaa

SEQ ID NO: 26448 - DNA, 4397 bp, Homo sapiens
ctgccccctacccaacctgacctctgcttcctctcttcccttcttcccacctaaacattcctccacagtggcaatagcaaaggaaaagacatcaacacgattaaatccctccgagtcctccgggtgctacgacctcttaaaaccatcaagcggctgccaaagctcaaggctgtgtttgactgtgtggtgaactcacttaaaaacgtcttcaacatcctcatcgtctacatgctattcatgttcatcttcgccgtggtggctgtgcagctcttcaaggggaaattcttccactgcactgacgagtccaaagagtttgagaaagattgtcgaggcaaatacctcctctacgagaagaatgaggtgaaggcgcgagaccgggagtggaagaagtatgaattccattacgacaatgtgctgtgggctctgctgaccctcttcaccgtgtccacgggagaaggctggccacaggtcctcaagcattcggtggacgccacctttgagaaccagggccccagccccgggtaccgcatggagatgtccattttctacgtcgtctactttgtggtgttccccttcttctttgtcaatatctttgtggccttgatcatcatcaccttccaggagcaaggggacaagatgatggaggaatacagcctggagaaaaatgagagggcctgcattgatttcgccatcagcgccaagccgctgacccgacacatgccgcagaacaagcagagcttccagtaccgcatgtggcagttcgtggtgtctccgcctttcgagtacacgatcatggccatgatcgccctcaacaccatcgtgcttatgatgaagttctatggggcttctgttgcttatgaaaatgccctgcgggtgttcaacatcgtcttcacctccctcttctctctggaatgtgtgctgaaagtcatggcttttgggattctgaattatttccgcgatgcctggaacatcttcgactttgtgactgttctgggcagcatcaccgatatcctcgtgactgagtttgggaataacttcatcaacctgagctttctccgcctcttccgagctgcccggctcatcaaacttctccgtcagggttacaccatccgcattcttctctggacctttgtgcagtccttcaaggccctgccttatgtctgtctgctgatcgccatgctcttcttcatctatgccatcattgggatgcaggtgtttggtaacattggcatcgacgtggaggacgaggacagtgatgaagatgagttccaaatcactgagcacaataacttccggaccttcttccaggccctcatgcttctcttccggagtgccaccggggaagcttggcacaacatcatgctttcctgcctcagcgggaaaccgtgtgataagaactctggcatcctgactcgagagtgtggcaatgaatttgcttatttttactttgtttccttcatcttcctctgctcgtttctgatgctgaatctctttgtcgccgtcatcatggacaactttgagtacctcacccgagactcctccatcctgggcccccaccacctggatgagtacgtgcgtgtctgggccgagtatgaccccgcagcttggggccgcatgccttacctggacatgtatcagatgctgagacacatgtctccgcccctgggtctggggaagaagtgtccggccagagtggcttacaagcggcttctgcggatggacctgcccgtcgcagatgacaacaccgtccacttcaattccaccctcatggctctgatccgcacagccctggacatcaagattgccaagggaggagccgacaaacagcagatggacgctgagctgcggaaggagatgatggcgatttggcccaatctgtcccagaagacgctagacctgctggtcacacctcacaagtccacggacctcaccgtggggaagatctacgcagccatgatgatcatggagtactaccggcagagcaaggccaagaagctgcaggccatgcgcgaggagcaggaccggacacccctcatgttccagcgcatggagcccccgtccccaacgcaggaagggggacctggccagaacgccctcccctccacccagctggacccaggaggagccctgatggctcacgaaagcggcctcaaggagagcccgtcctgggtgacccagcgtgcccaggagatgttccagaagacgggcacatggagtccggaacaaggcccccctaccgacatgcccaacagccagcctaactctcagtccgtggagatgcgagagatgggcagagatggctactccgacagcgagcactacctccccatggaaggccagggccgggctgcctccatgccccgcctccctgcagagaaccagaccatctcagacaccagccccatgaagcgttcagcctccgtgctgggccccaaggcccgacgcctggacgattactcgctggagcgggtcccgcccgaggagaaccagcggcaccaccagcggcgccgcgaccgcagccaccgcgcctctgagcgctccctgggccgctacaccgatgtggacacaggcttggggacagacctgagcatgaccacccaatccggggacctgccgtcgaaggagcgggaccaggagcggggccggcccaaggatcggaagcatcgacagcaccaccaccaccaccaccaccaccaccatcccccgccccccgacaaggaccgctatgcccaggaacggccggaccacggccgggcacgggctcgggaccagcgctggtcccgctcgcccagcgagggccgagagcacatggcgcaccggcagggcagtagttccgtaagtggaagcccagccccctcaacatctggtaccagcactccgcggcggggccgccgccagctcccccagaccccctccaccccccggccacacgtgtcctattcccctgtgatccgtaaggccggcggctcggggcccccgcagcagcagcagcagcagcagcagcagcagcagcagcaggcggtggccaggccgggccgggcggccaccagcggccctcggaggtacccaggccccacggccgagcctctggccggagatcggccgcccacggggggccacagcagcggccgctcgcccaggatggagaggcgggtcccaggcccggcccggagcgagtcccccagggcctgtcgacacggcggggcccggtggccggcatctggcccgcacgtgtccgaggggcccccgggtccccggcaccatggctactaccggggctccgactacgacgaggccgatggcccgggcagcgggggcggcgaggaggccatggccggggcctacgacgcgccaccccccgtacgacacgcgtcctcgggcgccaccgggcgctcgcccaggactccccgggcctcgggcccggcctgcgcctcgccttctcggcacggccggcgactccccaacggctactacccggcgcacggactggccaggccccgcgggccgggctccaggaagggcctgcacgaaccctacagcgagagtgacgatgattggtgctaagcccgggcgaggtggcgcccgcccggccccccacgcaccccacgcacacaccccacccgaggagccgcgcagaggccgcgggggcccagcacagagggcccgggagagggccagccgggagaccccagactctggagaggccagggctgggccacaagggtgtcccgcagagaccctcggccaaaagagaccctcctgggcagccacggcgccccccaaccagccccgatccccccacccacgacaggggctctcgggtgggaggcagggagcagacaaaccacacagccaagggatttgaattaactcagccatttttggagaactttggggaacatgaaaaaaaaaaaaaaaaaaaaaaaaacatttttaaaagaaaaaacggggagaaaaaaatagcttctattgatgagttttatcatctcaattgaatctttcctttccctgatgaagacagctggtggccgagtgcggcaaagaagccagaaggaaccagaatcccagtgccctacacccaccaccagacacactcacacccacacacgttctcagacacacacaagagtgcttgccggttataccaaaccctactattactgcctgcagaaatcaatttaaaaaaataataataacaataaacaattttaaaaaggacaaaaaaattaatgattgagaaaagaggcatttttttctgacatttggtcctgcttgaaacaacaaaagaagaagaaaaacccaccatcaccaccgattcctttgcttcttttttccttttttcctaccttgtttgaaaaccgtgggcttgggactgtgaattattgcatgacattcaa

SEQ ID NO: 26449 - DNA, 6988 bp, Homo sapiens
cgcaccctccttccgcccctccttctccggggtcagccaggaagatgtcccgagctgctatccccggctcggcccgggcagccgccttctgagcccccgacccgaggcgccgagccgccgccgcccgatgggctgggccgtggagcgtctccgcagtcgtagctccagccgccgcgctcccagccccggcagcctcagcatcagcggcggcggcggcggcggcggcggcgtcttccgcatcgttcgccgcagcgtaacccggagccctttgctctttgcagaatggcccgcttcggagacgagatgccggcccgctacgggggaggaggctccggggcagccgccggggtggtcgtgggcagcggaggcgggcgaggagccgggggcagccggcagggcgggcagcccggggcgcaaaggatgtacaagcagtcaatggcgcagagagcgcggaccatggcactctacaaccccatccccgtccgacagaactgcctcacggttaaccggtctctcttcctcttcagcgaagacaacgtggtgagaaaatacgccaaaaagatcaccgaatggcctccctttgaatatatgattttagccaccatcatagcgaattgcatcgtcctcgcactggagcagcatctgcctgatgatgacaagaccccgatgtctgaacggctggatgacacagaaccatacttcattggaattttttgtttcgaggctggaattaaaatcattgcccttgggtttgccttccacaaaggctcctacttgaggaatggctggaatgtcatggactttgtggtggtgctaacgggcatcttggcgacagttgggacggagtttgacctacggacgctgagggcagttcgagtgctgcggccgctcaagctggtgtctggaatcccaagtttacaagtcgtcctgaagtcgatcatgaaggcgatgatccctttgctgcagatcggcctcctcctattttttgcaatccttatttttgcaatcatagggttagaattttatatgggaaaatttcataccacctgctttgaagaggggacagatgacattcagggtgagtctccggctccatgtgggacagaagagcccgcccgcacctgccccaatgggaccaaatgtcagccctactgggaagggcccaacaacgggatcactcagttcgacaacatcctgtttgcagtgctgactgttttccagtgcataaccatggaagggtggactgatctcctctacaatagcaacgatgcctcagggaacacttggaactggttgtacttcatccccctcatcatcatcggctccttttttatgctgaaccttgtgctgggtgtgctgtcaggggagtttgccaaagaaagggaacgggtggagaaccggcgggcttttctgaagctgaggcggcaacaacagattgaacgtgagctcaatgggtacatggaatggatctcaaaagcagaagaggtgatcctcgccgaggatgaaactgacggggagcagaggcatccctttgatggagctctgcggagaaccaccataaagaaaagcaagacagatttgctcaaccccgaagaggctgaggatcagctggctgatatagcctctgtgggttctcccttcgcccgagccagcattaaaagtgccaagctggagaactcgaccttttttcacaaaaaggagaggaggatgcgtttctacatccgccgcatggtcaaaactcaggccttctactggactgtactcagtttggtagctctcaacacgctgtgtgttgctattgttcactacaaccagcccgagtggctctccgacttcctttactatgcagaattcattttcttaggactctttatgtccgaaatgtttataaaaatgtacgggcttgggacgcggccttacttccactcttccttcaactgctttgactgtggggttatcattgggagcatcttcgaggtcatctgggctgtcataaaacctggcacatcctttggaatcagcgtgttacgagccctcaggttattgcgtattttcaaagtcacaaagtactgggcatctctcagaaacctggtcgtctctctcctcaactccatgaagtccatcatcagcctgttgtttctccttttcctgttcattgtcgtcttcgcccttttgggaatgcaactcttcggcggccagtttaatttcgatgaagggactcctcccaccaacttcgatacttttccagcagcaataatgacggtgtttcagatcctgacgggcgaagactggaacgaggtcatgtacgacgggatcaagtctcaggggggcgtgcagggcggcatggtgttctccatctatttcattgtactgacgctctttgggaactacaccctcctgaatgtgttcttggccatcgctgtggacaatctggccaacgcccaggagctcaccaaggacgagcaagaggaagaagaagcagcgaaccagaaacttgccctacagaaagccaaggaggtggcagaagtgagtcctctgtccgcggccaacatgtctatagctgtgaaagagcaacagaagaatcaaaagccagccaagtccgtgtgggagcagcggaccagtgagatgcgaaagcagaacttgctggccagccgggaggccctgtataacgaaatggacccggacgagcgctggaaggctgcctacacgcggcacctgcggccagacatgaagacgcacttggaccggccgctggtggtggacccgcaggagaaccgcaacaacaacaccaacaagagccgggcggccgagcccaccgtggaccagcgcctcggccagcagcgcgccgaggacttcctcaggaaacaggcccgctaccacgatcgggcccgggaccccagcggctcggcgggcctggacgcacggaggccctgggcgggaagccaggaggccgagctgagccgggagggaccctacggccgcgagtcggaccaccacgcccgggagggcagcctggagcaacccgggttctgggagggcgaggccgagcgaggcaaggccggggacccccaccggaggcacgtgcaccggcaggggggcagcagggagagccgcagcgggtccccgcgcacgggcgcggacggggagcatcgacgtcatcgcgcgcaccgcaggcccggggaggagggtccggaggacaaggcggagcggagggcgcggcaccgcgagggcagccggccggcccggggcggcgagggcgagggcgagggccccgacgggggcgagcgcaggagaaggcaccggcatggcgctccagccacgtacgagggggacgcgcggagggaggacaaggagcggaggcatcggaggaggaaagagaaccagggctccggggtccctgtgtcgggccccaacctgtcaaccacccggccaatccagcaggacctgggccgccaagacccacccctggcagaggatattgacaacatgaagaacaacaagctggccaccgcggagtcggccgctccccacggcagccttggccacgccggcctgccccagagcccagccaagatgggaaacagcaccgaccccggccccatgctggccatccctgccatggccaccaacccccagaacgccgccagccgccggacgcccaacaacccggggaacccatccaatcccggcccccccaagacccccgagaatagccttatcgtcaccaaccccagcggcacccagaccaattcagctaagactgccaggaaacccgaccacaccacagtggacatccccccagcctgcccaccccccctcaaccacaccgtcgtacaagtgaacaaaaacgccaacccagacccactgccaaaaaaagaggaagagaagaaggaggaggaggaagacgaccgtggggaagacggccctaagccaatgcctccctatagctccatgttcatcctgtccacgaccaacccccttcgccgcctgtgccattacatcctgaacctgcgctactttgagatgtgcatcctcatggtcattgccatgagcagcatcgccctggccgccgaggaccctgtgcagcccaacgcacctcggaacaacgtgctgcgatactttgactacgtttttacaggcgtctttacctttgagatggtgatcaagatgattgacctggggctcgtcctgcatcagggtgcctacttccgtgacctctggaatattctcgacttcatagtggtcagtggggccctggtagcctttgccttcactggcaatagcaaaggaaaagacatcaacacgattaaatccctccgagtcctccgggtgctacgacctcttaaaaccatcaagcggctgccaaagctcaaggctgtgtttgactgtgtggtgaactcacttaaaaacgtcttcaacatcctcatcgtctacatgctattcatgttcatcttcgccgtggtggctgtgcagctcttcaaggggaaattcttccactgcactgacgagtccaaagagtttgagaaagattgtcgaggcaaatacctcctctacgagaagaatgaggtgaaggcgcgagaccgggagtggaagaagtatgaattccattacgacaatgtgctgtgggctctgctgaccctcttcaccgtgtccacgggagaaggctggccacaggtcctcaagcattcggtggacgccacctttgagaaccagggccccagccccgggtaccgcatggagatgtccattttctacgtcgtctactttgtggtgttccccttcttctttgtcaatatctttgtggccttgatcatcatcaccttccaggagcaaggggacaagatgatggaggaatacagcctggagaaaaatgagagggcctgcattgatttcgccatcagcgccaagccgctgacccgacacatgccgcagaacaagcagagcttccagtaccgcatgtggcagttcgtggtgtctccgcctttcgagtacacgatcatggccatgatcgccctcaacaccatcgtgcttatgatgaagttctatggggcttctgttgcttatgaaaatgccctgcgggtgttcaacatcgtcttcacctccctcttctctctggaatgtgtgctgaaagtcatggcttttgggattctgaattatttccgcgatgcctggaacatcttcgactttgtgactgttctgggcagcatcaccgatatcctcgtgactgagtttgggaataacttcatcaacctgagctttctccgcctcttccgagctgcccggctcatcaaacttctccgtcagggttacaccatccgcattcttctctggacctttgtgcagtccttcaaggccctgccttatgtctgtctgctgatcgccatgctcttcttcatctatgccatcattgggatgcaggtgtttggtaacattggcatcgacgtggaggacgaggacagtgatgaagatgagttccaaatcactgagcacaataacttccggaccttcttccaggccctcatgcttctcttccggagtgccaccggggaagcttggcacaacatcatgctttcctgcctcagcgggaaaccgtgtgataagaactctggcatcctgactcgagagtgtggcaatgaatttgcttatttttactttgtttccttcatcttcctctgctcgtttctgatgctgaatctctttgtcgccgtcatcatggacaactttgagtacctcacccgagactcctccatcctgggcccccaccacctggatgagtacgtgcgtgtctgggccgagtatgaccccgcagcttggggccgcatgccttacctggacatgtatcagatgctgagacacatgtctccgcccctgggtctggggaagaagtgtccggccagagtggcttacaagcggcttctgcggatggacctgcccgtcgcagatgacaacaccgtccacttcaattccaccctcatggctctgatccgcacagccctggacatcaagattgccaagggaggagccgacaaacagcagatggacgctgagctgcggaaggagatgatggcgatttggcccaatctgtcccagaagacgctagacctgctggtcacacctcacaagtccacggacctcaccgtggggaagatctacgcagccatgatgatcatggagtactaccggcagagcaaggccaagaagctgcaggccatgcgcgaggagcaggaccggacacccctcatgttccagcgcatggagcccccgtccccaacgcaggaagggggacctggccagaacgccctcccctccacccagctggacccaggaggagccctgatggctcacgaaagcggcctcaaggagagcccgtcctgggtgacccagcgtgcccaggagatgttccagaagacgggcacatggagtccggaacaaggcccccctaccgacatgcccaacagccagcctaactctcagtccgtggagatgcgagagatgggcagagatggctactccgacagcgagcactacctccccatggaaggccagggccgggctgcctccatgccccgcctccctgcagagaaccagaccatctcagacaccagccccatgaagcgttcagcctccgtgctgggccccaaggcccgacgcctggacgattactcgctggagcgggtcccgcccgaggagaaccagcggcaccaccagcggcgccgcgaccgcagccaccgcgcctctgagcgctccctgggccgctacaccgatgtggacacaggcttggggacagacctgagcatgaccacccaatccggggacctgccgtcgaaggagcgggaccaggagcggggccggcccaaggatcggaagcatcgacagcaccaccaccaccaccaccatcaccaccgattcctttgcttcttttttccttttttcctaccttgtttgaaaaccgtgggcttgggactgtgaattattgcatgacattcaa

SEQ ID NO: 26450 - DNA, 8809 bp, Homo sapiens
cgcaccctccttccgcccctccttctccggggtcagccaggaagatgtcccgagctgctatccccggctcggcccgggcagccgccttctgagcccccgacccgaggcgccgagccgccgccgcccgatgggctgggccgtggagcgtctccgcagtcgtagctccagccgccgcgctcccagccccggcagcctcagcatcagcggcggcggcggcggcggcggcggcgtcttccgcatcgttcgccgcagcgtaacccggagccctttgctctttgcagaatggcccgcttcggagacgagatgccggcccgctacgggggaggaggctccggggcagccgccggggtggtcgtgggcagcggaggcgggcgaggagccgggggcagccggcagggcgggcagcccggggcgcaaaggatgtacaagcagtcaatggcgcagagagcgcggaccatggcactctacaaccccatccccgtccgacagaactgcctcacggttaaccggtctctcttcctcttcagcgaagacaacgtggtgagaaaatacgccaaaaagatcaccgaatggcctccctttgaatatatgattttagccaccatcatagcgaattgcatcgtcctcgcactggagcagcatctgcctgatgatgacaagaccccgatgtctgaacggctggatgacacagaaccatacttcattggaattttttgtttcgaggctggaattaaaatcattgcccttgggtttgccttccacaaaggctcctacttgaggaatggctggaatgtcatggactttgtggtggtgctaacgggcatcttggcgacagttgggacggagtttgacctacggacgctgagggcagttcgagtgctgcggccgctcaagctggtgtctggaatcccaagtttacaagtcgtcctgaagtcgatcatgaaggcgatgatccctttgctgcagatcggcctcctcctattttttgcaatccttatttttgcaatcatagggttagaattttatatgggaaaatttcataccacctgctttgaagaggggacagatgacattcagggtgagtctccggctccatgtgggacagaagagcccgcccgcacctgccccaatgggaccaaatgtcagccctactgggaagggcccaacaacgggatcactcagttcgacaacatcctgtttgcagtgctgactgttttccagtgcataaccatggaagggtggactgatctcctctacaatagcaacgatgcctcagggaacacttggaactggttgtacttcatccccctcatcatcatcggctccttttttatgctgaaccttgtgctgggtgtgctgtcaggggagtttgccaaagaaagggaacgggtggagaaccggcgggcttttctgaagctgaggcggcaacaacagattgaacgtgagctcaatgggtacatggaatggatctcaaaagcagaagaggtgatcctcgccgaggatgaaactgacggggagcagaggcatccctttgatggagctctgcggagaaccaccataaagaaaagcaagacagatttgctcaaccccgaagaggctgaggatcagctggctgatatagcctctgtgggttctcccttcgcccgagccagcattaaaagtgccaagctggagaactcgaccttttttcacaaaaaggagaggaggatgcgtttctacatccgccgcatggtcaaaactcaggccttctactggactgtactcagtttggtagctctcaacacgctgtgtgttgctattgttcactacaaccagcccgagtggctctccgacttcctttactatgcagaattcattttcttaggactctttatgtccgaaatgtttataaaaatgtacgggcttgggacgcggccttacttccactcttccttcaactgctttgactgtggggttatcattgggagcatcttcgaggtcatctgggctgtcataaaacctggcacatcctttggaatcagcgtgttacgagccctcaggttattgcgtattttcaaagtcacaaagtactgggcatctctcagaaacctggtcgtctctctcctcaactccatgaagtccatcatcagcctgttgtttctccttttcctgttcattgtcgtcttcgcccttttgggaatgcaactcttcggcggccagtttaatttcgatgaagggactcctcccaccaacttcgatacttttccagcagcaataatgacggtgtttcagatcctgacgggcgaagactggaacgaggtcatgtacgacgggatcaagtctcaggggggcgtgcagggcggcatggtgttctccatctatttcattgtactgacgctctttgggaactacaccctcctgaatgtgttcttggccatcgctgtggacaatctggccaacgcccaggagctcaccaaggacgagcaagaggaagaagaagcagcgaaccagaaacttgccctacagaaagccaaggaggtggcagaagtgagtcctctgtccgcggccaacatgtctatagctgtgaaagagcaacagaagaatcaaaagccagccaagtccgtgtgggagcagcggaccagtgagatgcgaaagcagaacttgctggccagccgggaggccctgtataacgaaatggacccggacgagcgctggaaggctgcctacacgcggcacctgcggccagacatgaagacgcacttggaccggccgctggtggtggacccgcaggagaaccgcaacaacaacaccaacaagagccgggcggccgagcccaccgtggaccagcgcctcggccagcagcgcgccgaggacttcctcaggaaacaggcccgctaccacgatcgggcccgggaccccagcggctcggcgggcctggacgcacggaggccctgggcgggaagccaggaggccgagctgagccgggagggaccctacggccgcgagtcggaccaccacgcccgggagggcagcctggagcaacccgggttctgggagggcgaggccgagcgaggcaaggccggggacccccaccggaggcacgtgcaccggcaggggggcagcagggagagccgcagcgggtccccgcgcacgggcgcggacggggagcatcgacgtcatcgcgcgcaccgcaggcccggggaggagggtccggaggacaaggcggagcggagggcgcggcaccgcgagggcagccggccggcccggggcggcgagggcgagggcgagggccccgacgggggcgagcgcaggagaaggcaccggcatggcgctccagccacgtacgagggggacgcgcggagggaggacaaggagcggaggcatcggaggaggaaagagaaccagggctccggggtccctgtgtcgggccccaacctgtcaaccacccggccaatccagcaggacctgggccgccaagacccacccctggcagaggatattgacaacatgaagaacaacaagctggccaccgcggagtcggccgctccccacggcagccttggccacgccggcctgccccagagcccagccaagatgggaaacagcaccgaccccggccccatgctggccatccctgccatggccaccaacccccagaacgccgccagccgccggacgcccaacaacccggggaacccatccaatcccggcccccccaagacccccgagaatagccttatcgtcaccaaccccagcggcacccagaccaattcagctaagactgccaggaaacccgaccacaccacagtggacatccccccagcctgcccaccccccctcaaccacaccgtcgtacaagtgaacaaaaacgccaacccagacccactgccaaaaaaagaggaagagaagaaggaggaggaggaagacgaccgtggggaagacggccctaagccaatgcctccctatagctccatgttcatcctgtccacgaccaacccccttcgccgcctgtgccattacatcctgaacctgcgctactttgagatgtgcatcctcatggtcattgccatgagcagcatcgccctggccgccgaggaccctgtgcagcccaacgcacctcggaacaacgtgctgcgatactttgactacgtttttacaggcgtctttacctttgagatggtgatcaagatgattgacctggggctcgtcctgcatcagggtgcctacttccgtgacctctggaatattctcgacttcatagtggtcagtggggccctggtagcctttgccttcactggcaatagcaaaggaaaagacatcaacacgattaaatccctccgagtcctccgggtgctacgacctcttaaaaccatcaagcggctgccaaagctcaaggctgtgtttgactgtgtggtgaactcacttaaaaacgtcttcaacatcctcatcgtctacatgctattcatgttcatcttcgccgtggtggctgtgcagctcttcaaggggaaattcttccactgcactgacgagtccaaagagtttgagaaagattgtcgaggcaaatacctcctctacgagaagaatgaggtgaaggcgcgagaccgggagtggaagaagtatgaattccattacgacaatgtgctgtgggctctgctgaccctcttcaccgtgtccacgggagaaggctggccacaggtcctcaagcattcggtggacgccacctttgagaaccagggccccagccccgggtaccgcatggagatgtccattttctacgtcgtctactttgtggtgttccccttcttctttgtcaatatctttgtggccttgatcatcatcaccttccaggagcaaggggacaagatgatggaggaatacagcctggagaaaaatgagagggcctgcattgatttcgccatcagcgccaagccgctgacccgacacatgccgcagaacaagcagagcttccagtaccgcatgtggcagttcgtggtgtctccgcctttcgagtacacgatcatggccatgatcgccctcaacaccatcgtgcttatgatgaagttctatggggcttctgttgcttatgaaaatgccctgcgggtgttcaacatcgtcttcacctccctcttctctctggaatgtgtgctgaaagtcatggcttttgggattctgaattatttccgcgatgcctggaacatcttcgactttgtgactgttctgggcagcatcaccgatatcctcgtgactgagtttggggcctggtcccgtgctactccacccagccccagaagctgagaagccatccctgagaggggggaaaagggccccaaatgcatcttctccgactcagcgggcagcgaggactcaccctgcagccgaacagtcccagctccctcccgtcctccccattcccgctcgccaaggggaataacttcatcaacctgagctttctccgcctcttccgagctgcccggctcatcaaacttctccgtcagggttacaccatccgcattcttctctggacctttgtgcagtccttcaaggccctgccttatgtctgtctgctgatcgccatgctcttcttcatctatgccatcattgggatgcaggtgtttggtaacattggcatcgacgtggaggacgaggacagtgatgaagatgagttccaaatcactgagcacaataacttccggaccttcttccaggccctcatgcttctcttccggagtgccaccggggaagcttggcacaacatcatgctttcctgcctcagcgggaaaccgtgtgataagaactctggcatcctgactcgagagtgtggcaatgaatttgcttatttttactttgtttccttcatcttcctctgctcgtttctgatgctgaatctctttgtcgccgtcatcatggacaactttgagtacctcacccgagactcctccatcctgggcccccaccacctggatgagtacgtgcgtgtctgggccgagtatgaccccgcagcttggggccgcatgccttacctggacatgtatcagatgctgagacacatgtctccgcccctgggtctggggaagaagtgtccggccagagtggcttacaagcggcttctgcggatggacctgcccgtcgcagatgacaacaccgtccacttcaattccaccctcatggctctgatccgcacagccctggacatcaagattgccaagggaggagccgacaaacagcagatggacgctgagctgcggaaggagatgatggcgatttggcccaatctgtcccagaagacgctagacctgctggtcacacctcacaagtccacggacctcaccgtggggaagatctacgcagccatgatgatcatggagtactaccggcagagcaaggccaagaagctgcaggccatgcgcgaggagcaggaccggacacccctcatgttccagcgcatggagcccccgtccccaacgcaggaagggggacctggccagaacgccctcccctccacccagctggacccaggaggagccctgatggctcacgaaagcggcctcaaggagagcccgtcctgggtgacccagcgtgcccaggagatgttccagaagacgggcacatggagtccggaacaaggcccccctaccgacatgcccaacagccagcctaactctcagtccgtggagatgcgagagatgggcagagatggctactccgacagcgagcactacctccccatggaaggccagggccgggctgcctccatgccccgcctccctgcagagaaccagaggagaaggggccggccacgtgggaataacctcagtaccatctcagacaccagccccatgaagcgttcagcctccgtgctgggccccaaggcccgacgcctggacgattactcgctggagcgggtcccgcccgaggagaaccagcggcaccaccagcggcgccgcgaccgcagccaccgcgcctctgagcgctccctgggccgctacaccgatgtggacacaggcttggggacagacctgagcatgaccacccaatccggggacctgccgtcgaaggagcgggaccaggagcggggccggcccaaggatcggaagcatcgacagcaccaccaccaccaccaccaccaccaccatcccccgccccccgacaaggaccgctatgcccaggaacggccggaccacggccgggcacgggctcgggaccagcgctggtcccgctcgcccagcgagggccgagagcacatggcgcaccggcagggcagtagttccgtaagtggaagcccagccccctcaacatctggtaccagcactccgcggcggggccgccgccagctcccccagaccccctccaccccccggccacacgtgtcctattcccctgtgatccgtaaggccggcggctcggggcccccgcagcagcagcagcagcagcagcagcagcagcagcagcaggcggtggccaggccgggccgggcggccaccagcggccctcggaggtacccaggccccacggccgagcctctggccggagatcggccgcccacggggggccacagcagcggccgctcgcccaggatggagaggcgggtcccaggcccggcccggagcgagtcccccagggcctgtcgacacggcggggcccggtggccggcatctggcccgcacgtgtccgaggggcccccgggtccccggcaccatggctactaccggggctccgactacgacgaggccgatggcccgggcagcgggggcggcgaggaggccatggccggggcctacgacgcgccaccccccgtacgacacgcgtcctcgggcgccaccgggcgctcgcccaggactccccgggcctcgggcccggcctgcgcctcgccttctcggcacggccggcgactccccaacggctactacccggcgcacggactggccaggccccgcgggccgggctccaggaagggcctgcacgaaccctacagcgagagtgacgatgattggtgctaagcccgggcgaggtggcgcccgcccggccccccacgcaccccacgcacacaccccacccgaggagccgcgcagaggccgcgggggcccagcacagagggcccgggagagggccagccgggagaccccagactctggagaggccagggctgggccacaagggtgtcccgcagagaccctcggccaaaagagaccctcctgggcagccacggcgccccccaaccagccccgatccccccacccacgacaggggctctcgggtgggaggcagggagcagacaaaccacacagccaagggatttgaattaactcagccatttttggagaactttggggaacatgaaaaaaaaaaaaaaaaaaaaaaaaacatttttaaaagaaaaaacggggagaaaaaaatagcttctattgatgagttttatcatctcaattgaatctttcctttccctgatgaagacagctggtggccgagtgcggcaaagaagccagaaggaaccagaatcccagtgccctacacccaccaccagacacactcacacccacacacgttctcagacacacacaagagtgcttgccggttataccaaaccctactattactgcctgcagaaatcaatttaaaaaaataataataacaataaacaattttaaaaaggacaaaaaaattaatgattgagaaaagaggcatttttttctgacatttggtcctgcttgaaacaacaaaagaagaagaaaaacccaccatcaccaccgattcctttgcttcttttttccttttttcctaccttgtttgaaaaccgtgggcttgggactgtgaattattgcatgacattcaa

SEQ ID NO: 26451 - DNA, 8781 bp, Homo sapiens
cgcaccctccttccgcccctccttctccggggtcagccaggaagatgtcccgagctgctatccccggctcggcccgggcagccgccttctgagcccccgacccgaggcgccgagccgccgccgcccgatgggctgggccgtggagcgtctccgcagtcgtagctccagccgccgcgctcccagccccggcagcctcagcatcagcggcggcggcggcggcggcggcggcgtcttccgcatcgttcgccgcagcgtaacccggagccctttgctctttgcagaatggcccgcttcggagacgagatgccggcccgctacgggggaggaggctccggggcagccgccggggtggtcgtgggcagcggaggcgggcgaggagccgggggcagccggcagggcgggcagcccggggcgcaaaggatgtacaagcagtcaatggcgcagagagcgcggaccatggcactctacaaccccatccccgtccgacagaactgcctcacggttaaccggtctctcttcctcttcagcgaagacaacgtggtgagaaaatacgccaaaaagatcaccgaatggcctccctttgaatatatgattttagccaccatcatagcgaattgcatcgtcctcgcactggagcagcatctgcctgatgatgacaagaccccgatgtctgaacggctggatgacacagaaccatacttcattggaattttttgtttcgaggctggaattaaaatcattgcccttgggtttgccttccacaaaggctcctacttgaggaatggctggaatgtcatggactttgtggtggtgctaacgggcatcttggcgacagttgggacggagtttgacctacggacgctgagggcagttcgagtgctgcggccgctcaagctggtgtctggaatcccaagtttacaagtcgtcctgaagtcgatcatgaaggcgatgatccctttgctgcagatcggcctcctcctattttttgcaatccttatttttgcaatcatagggttagaattttatatgggaaaatttcataccacctgctttgaagaggggacagatgacattcagggtgagtctccggctccatgtgggacagaagagcccgcccgcacctgccccaatgggaccaaatgtcagccctactgggaagggcccaacaacgggatcactcagttcgacaacatcctgtttgcagtgctgactgttttccagtgcataaccatggaagggtggactgatctcctctacaatagcaacgatgcctcagggaacacttggaactggttgtacttcatccccctcatcatcatcggctccttttttatgctgaaccttgtgctgggtgtgctgtcaggggagtttgccaaagaaagggaacgggtggagaaccggcgggcttttctgaagctgaggcggcaacaacagattgaacgtgagctcaatgggtacatggaatggatctcaaaagcagaagaggtgatcctcgccgaggatgaaactgacggggagcagaggcatccctttgatggagctctgcggagaaccaccataaagaaaagcaagacagatttgctcaaccccgaagaggctgaggatcagctggctgatatagcctctgtgggttctcccttcgcccgagccagcattaaaagtgccaagctggagaactcgaccttttttcacaaaaaggagaggaggatgcgtttctacatccgccgcatggtcaaaactcaggccttctactggactgtactcagtttggtagctctcaacacgctgtgtgttgctattgttcactacaaccagcccgagtggctctccgacttcctttactatgcagaattcattttcttaggactctttatgtccgaaatgtttataaaaatgtacgggcttgggacgcggccttacttccactcttccttcaactgctttgactgtggggttatcattgggagcatcttcgaggtcatctgggctgtcataaaacctggcacatcctttggaatcagcgtgttacgagccctcaggttattgcgtattttcaaagtcacaaagtactgggcatctctcagaaacctggtcgtctctctcctcaactccatgaagtccatcatcagcctgttgtttctccttttcctgttcattgtcgtcttcgcccttttgggaatgcaactcttcggcggccagtttaatttcgatgaagggactcctcccaccaacttcgatacttttccagcagcaataatgacggtgtttcagatcctgacgggcgaagactggaacgaggtcatgtacgacgggatcaagtctcaggggggcgtgcagggcggcatggtgttctccatctatttcattgtactgacgctctttgggaactacaccctcctgaatgtgttcttggccatcgctgtggacaatctggccaacgcccaggagctcaccaaggacgagcaagaggaagaagaagcagcgaaccagaaacttgccctacagaaagccaaggaggtggcagaagtgagtcctctgtccgcggccaacatgtctatagctgtgaaagagcaacagaagaatcaaaagccagccaagtccgtgtgggagcagcggaccagtgagatgcgaaagcagaacttgctggccagccgggaggccctgtataacgaaatggacccggacgagcgctggaaggctgcctacacgcggcacctgcggccagacatgaagacgcacttggaccggccgctggtggtggacccgcaggagaaccgcaacaacaacaccaacaagagccgggcggccgagcccaccgtggaccagcgcctcggccagcagcgcgccgaggacttcctcaggaaacaggcccgctaccacgatcgggcccgggaccccagcggctcggcgggcctggacgcacggaggccctgggcgggaagccaggaggccgagctgagccgggagggaccctacggccgcgagtcggaccaccacgcccgggagggcagcctggagcaacccgggttctgggagggcgaggccgagcgaggcaaggccggggacccccaccggaggcacgtgcaccggcaggggggcagcagggagagccgcagcgggtccccgcgcacgggcgcggacggggagcatcgacgtcatcgcgcgcaccgcaggcccggggaggagggtccggaggacaaggcggagcggagggcgcggcaccgcgagggcagccggccggcccggggcggcgagggcgagggcgagggccccgacgggggcgagcgcaggagaaggcaccggcatggcgctccagccacgtacgagggggacgcgcggagggaggacaaggagcggaggcatcggaggaggaaagagaaccagggctccggggtccctgtgtcgggccccaacctgtcaaccacccggccaatccagcaggacctgggccgccaagacccacccctggcagaggatattgacaacatgaagaacaacaagctggccaccgcggagtcggccgctccccacggcagccttggccacgccggcctgccccagagcccagccaagatgggaaacagcaccgaccccggccccatgctggccatccctgccatggccaccaacccccagaacgccgccagccgccggacgcccaacaacccggggaacccatccaatcccggcccccccaagacccccgagaatagccttatcgtcaccaaccccagcggcacccagaccaattcagctaagactgccaggaaacccgaccacaccacagtggacatccccccagcctgcccaccccccctcaaccacaccgtcgtacaagtgaacaaaaacgccaacccagacccactgccaaaaaaagaggaagagaagaaggaggaggaggaagacgaccgtggggaagacggccctaagccaatgcctccctatagctccatgttcatcctgtccacgaccaacccccttcgccgcctgtgccattacatcctgaacctgcgctactttgagatgtgcatcctcatggtcattgccatgagcagcatcgccctggccgccgaggaccctgtgcagcccaacgcacctcggaacaacgtgctgcgatactttgactacgtttttacaggcgtctttacctttgagatggtgatcaagatgattgacctggggctcgtcctgcatcagggtgcctacttccgtgacctctggaatattctcgacttcatagtggtcagtggggccctggtagcctttgccttcactggcaatagcaaaggaaaagacatcaacacgattaaatccctccgagtcctccgggtgctacgacctcttaaaaccatcaagcggctgccaaagctcaaggctgtgtttgactgtgtggtgaactcacttaaaaacgtcttcaacatcctcatcgtctacatgctattcatgttcatcttcgccgtggtggctgtgcagctcttcaaggggaaattcttccactgcactgacgagtccaaagagtttgagaaagattgtcgaggcaaatacctcctctacgagaagaatgaggtgaaggcgcgagaccgggagtggaagaagtatgaattccattacgacaatgtgctgtgggctctgctgaccctcttcaccgtgtccacgggagaaggctggccacaggtcctcaagcattcggtggacgccacctttgagaaccagggccccagccccgggtaccgcatggagatgtccattttctacgtcgtctactttgtggtgttccccttcttctttgtcaatatctttgtggccttgatcatcatcaccttccaggagcaaggggacaagatgatggaggaatacagcctggagaaaaatgagagggcctgcattgatttcgccatcagcgccaagccgctgacccgacacatgccgcagaacaagcagagcttccagtaccgcatgtggcagttcgtggtgtctccgcctttcgagtacacgatcatggccatgatcgccctcaacaccatcgtgcttatgatgaagttctatggggcttctgttgcttatgaaaatgccctgcgggtgttcaacatcgtcttcacctccctcttctctctggaatgtgtgctgaaagtcatggcttttgggattctgaattatttccgcgatgcctggaacatcttcgactttgtgactgttctgggcagcatcaccgatatcctcgtgactgagtttggggcctggtcccgtgctactccacccagccccagaagctgagaagccatccctgagaggggggaaaagggccccaaatgcatcttctccgactcagcgggcagcgaggactcaccctgcagccgaacagtcccagctccctcccgtcctccccattcccgctcgccaaggggaataacttcatcaacctgagctttctccgcctcttccgagctgcccggctcatcaaacttctccgtcagggttacaccatccgcattcttctctggacctttgtgcagtccttcaaggccctgccttatgtctgtctgctgatcgccatgctcttcttcatctatgccatcattgggatgcaggtgtttggtaacattggcatcgacgtggaggacgaggacagtgatgaagatgagttccaaatcactgagcacaataacttccggaccttcttccaggccctcatgcttctcttccggagtgccaccggggaagcttggcacaacatcatgctttcctgcctcagcgggaaaccgtgtgataagaactctggcatcctgactcgagagtgtggcaatgaatttgcttatttttactttgtttccttcatcttcctctgctcgtttctgatgctgaatctctttgtcgccgtcatcatggacaactttgagtacctcacccgagactcctccatcctgggcccccaccacctggatgagtacgtgcgtgtctgggccgagtatgaccccgcagcttggggccgcatgccttacctggacatgtatcagatgctgagacacatgtctccgcccctgggtctggggaagaagtgtccggccagagtggcttacaagcggcttctgcggatggacctgcccgtcgcagatgacaacaccgtccacttcaattccaccctcatggctctgatccgcacagccctggacatcaagattgccaagggaggagccgacaaacagcagatggacgctgagctgcggaaggagatgatggcgatttggcccaatctgtcccagaagacgctagacctgctggtcacacctcacaagtccacggacctcaccgtggggaagatctacgcagccatgatgatcatggagtactaccggcagagcaaggccaagaagctgcaggccatgcgcgaggagcaggaccggacacccctcatgttccagcgcatggagcccccgtccccaacgcaggaagggggacctggccagaacgccctcccctccacccagctggacccaggaggagccctgatggctcacgaaagcggcctcaaggagagcccgtcctgggtgacccagcgtgcccaggagatgttccagaagacgggcacatggagtccggaacaaggcccccctaccgacatgcccaacagccagcctaactctcagtccgtggagatgcgagagatgggcagagatggctactccgacagcgagcactacctccccatggaaggccagggccgggctgcctccatgccccgcctccctgcagagaaccagaggagaaggggccggccacgtgggaataacctcagtaccatctcagacaccagccccatgaagcgttcagcctccgtgctgggccccaaggcccgacgcctggacgattactcgctggagcgggtcccgcccgaggagaaccagcggcaccaccagcggcgccgcgaccgcagccaccgcgcctctgagcgctccctgggccgctacaccgatgtggacacaggcttggggacagacctgagcatgaccacccaatccggggacctgccgtcgaaggagcgggaccaggagcggggccggcccaaggatcggaagcatcgacagcaccaccaccaccaccaccaccaccaccatcccccgccccccgacaaggaccgctatgcccaggaacggccggaccacggccgggcacgggctcgggaccagcgctggtcccgctcgcccagcgagggccgagagcacatggcgcaccggcagggcagtagttccgtaagtggaagcccagccccctcaacatctggtaccagcactccgcggcggggccgccgccagctcccccagaccccctccaccccccggccacacgtgtcctattcccctgtgatccgtaaggccggcggctcggggccccccagcagcagcaggcggtggccaggccgggccgggcggccaccagcggccctcggaggtacccaggccccacggccgagcctctggccggagatcggccgcccacggggggccacagcagcggccgctcgcccaggatggagaggcgggtcccaggcccggcccggagcgagtcccccagggcctgtcgacacggcggggcccggtggccggcatctggcccgcacgtgtccgaggggcccccgggtccccggcaccatggctactaccggggctccgactacgacgaggccgatggcccgggcagcgggggcggcgaggaggccatggccggggcctacgacgcgccaccccccgtacgacacgcgtcctcgggcgccaccgggcgctcgcccaggactccccgggcctcgggcccggcctgcgcctcgccttctcggcacggccggcgactccccaacggctactacccggcgcacggactggccaggccccgcgggccgggctccaggaagggcctgcacgaaccctacagcgagagtgacgatgattggtgctaagcccgggcgaggtggcgcccgcccggccccccacgcaccccacgcacacaccccacccgaggagccgcgcagaggccgcgggggcccagcacagagggcccgggagagggccagccgggagaccccagactctggagaggccagggctgggccacaagggtgtcccgcagagaccctcggccaaaagagaccctcctgggcagccacggcgccccccaaccagccccgatccccccacccacgacaggggctctcgggtgggaggcagggagcagacaaaccacacagccaagggatttgaattaactcagccatttttggagaactttggggaacatgaaaaaaaaaaaaaaaaaaaaaaaaacatttttaaaagaaaaaacggggagaaaaaaatagcttctattgatgagttttatcatctcaattgaatctttcctttccctgatgaagacagctggtggccgagtgcggcaaagaagccagaaggaaccagaatcccagtgccctacacccaccaccagacacactcacacccacacacgttctcagacacacacaagagtgcttgccggttataccaaaccctactattactgcctgcagaaatcaatttaaaaaaataataataacaataaacaattttaaaaaggacaaaaaaattaatgattgagaaaagaggcatttttttctgacatttggtcctgcttgaaacaacaaaagaagaagaaaaacccaccatcaccaccgattcctttgcttcttttttccttttttcctaccttgtttgaaaaccgtgggcttgggactgtgaattattgcatgacattcaa

SEQ ID NO: 26452 - DNA, 6917 bp, Homo sapiens
cgcaccctccttccgcccctccttctccggggtcagccaggaagatgtcccgagctgctatccccggctcggcccgggcagccgccttctgagcccccgacccgaggcgccgagccgccgccgcccgatgggctgggccgtggagcgtctccgcagtcgtagctccagccgccgcgctcccagccccggcagcctcagcatcagcggcggcggcggcggcggcggcggcgtcttccgcatcgttcgccgcagcgtaacccggagccctttgctctttgcagaatggcccgcttcggagacgagatgccggcccgctacgggggaggaggctccggggcagccgccggggtggtcgtgggcagcggaggcgggcgaggagccgggggcagccggcagggcgggcagcccggggcgcaaaggatgtacaagcagtcaatggcgcagagagcgcggaccatggcactctacaaccccatccccgtccgacagaactgcctcacggttaaccggtctctcttcctcttcagcgaagacaacgtggtgagaaaatacgccaaaaagatcaccgaatggcctccctttgaatatatgattttagccaccatcatagcgaattgcatcgtcctcgcactggagcagcatctgcctgatgatgacaagaccccgatgtctgaacggctggatgacacagaaccatacttcattggaattttttgtttcgaggctggaattaaaatcattgcccttgggtttgccttccacaaaggctcctacttgaggaatggctggaatgtcatggactttgtggtggtgctaacgggcatcttggcgacagttgggacggagtttgacctacggacgctgagggcagttcgagtgctgcggccgctcaagctggtgtctggaatcccaagtttacaagtcgtcctgaagtcgatcatgaaggcgatgatccctttgctgcagatcggcctcctcctattttttgcaatccttatttttgcaatcatagggttagaattttatatgggaaaatttcataccacctgctttgaagaggggacagatgacattcagggtgagtctccggctccatgtgggacagaagagcccgcccgcacctgccccaatgggaccaaatgtcagccctactgggaagggcccaacaacgggatcactcagttcgacaacatcctgtttgcagtgctgactgttttccagtgcataaccatggaagggtggactgatctcctctacaatagcaacgatgcctcagggaacacttggaactggttgtacttcatccccctcatcatcatcggctccttttttatgctgaaccttgtgctgggtgtgctgtcaggggagtttgccaaagaaagggaacgggtggagaaccggcgggcttttctgaagctgaggcggcaacaacagattgaacgtgagctcaatgggtacatggaatggatctcaaaagcagaagaggtgatcctcgccgaggatgaaactgacggggagcagaggcatccctttgatggagctctgcggagaaccaccataaagaaaagcaagacagatttgctcaaccccgaagaggctgaggatcagctggctgatatagcctctgtgggttctcccttcgcccgagccagcattaaaagtgccaagctggagaactcgaccttttttcacaaaaaggagaggaggatgcgtttctacatccgccgcatggtcaaaactcaggccttctactggactgtactcagtttggtagctctcaacacgctgtgtgttgctattgttcactacaaccagcccgagtggctctccgacttcctttactatgcagaattcattttcttaggactctttatgtccgaaatgtttataaaaatgtacgggcttgggacgcggccttacttccactcttccttcaactgctttgactgtggggttatcattgggagcatcttcgaggtcatctgggctgtcataaaacctggcacatcctttggaatcagcgtgttacgagccctcaggttattgcgtattttcaaagtcacaaagtactgggcatctctcagaaacctggtcgtctctctcctcaactccatgaagtccatcatcagcctgttgtttctccttttcctgttcattgtcgtcttcgcccttttgggaatgcaactcttcggcggccagtttaatttcgatgaagggactcctcccaccaacttcgatacttttccagcagcaataatgacggtgtttcagatcctgacgggcgaagactggaacgaggtcatgtacgacgggatcaagtctcaggggggcgtgcagggcggcatggtgttctccatctatttcattgtactgacgctctttgggaactacaccctcctgaatgtgttcttggccatcgctgtggacaatctggccaacgcccaggagctcaccaaggacgagcaagaggaagaagaagcagcgaaccagaaacttgccctacagaaagccaaggaggtggcagaagtgagtcctctgtccgcggccaacatgtctatagctgtgaaagagcaacagaagaatcaaaagccagccaagtccgtgtgggagcagcggaccagtgagatgcgaaagcagaacttgctggccagccgggaggccctgtataacgaaatggacccggacgagcgctggaaggctgcctacacgcggcacctgcggccagacatgaagacgcacttggaccggccgctggtggtggacccgcaggagaaccgcaacaacaacaccaacaagagccgggcggccgagcccaccgtggaccagcgcctcggccagcagcgcgccgaggacttcctcaggaaacaggcccgctaccacgatcgggcccgggaccccagcggctcggcgggcctggacgcacggaggccctgggcgggaagccaggaggccgagctgagccgggagggaccctacggccgcgagtcggaccaccacgcccgggagggcagcctggagcaacccgggttctgggagggcgaggccgagcgaggcaaggccggggacccccaccggaggcacgtgcaccggcaggggggcagcagggagagccgcagcgggtccccgcgcacgggcgcggacggggagcatcgacgtcatcgcgcgcaccgcaggcccggggaggagggtccggaggacaaggcggagcggagggcgcggcaccgcgagggcagccggccggcccggggcggcgagggcgagggcgagggccccgacgggggcgagcgcaggagaaggcaccggcatggcgctccagccacgtacgagggggacgcgcggagggaggacaaggagcggaggcatcggaggaggaaagagaaccagggctccggggtccctgtgtcgggccccaacctgtcaaccacccggccaatccagcaggacctgggccgccaagacccacccctggcagaggatattgacaacatgaagaacaacaagctggccaccgcggagtcggccgctccccacggcagccttggccacgccggcctgccccagagcccagccaagatgggaaacagcaccgaccccggccccatgctggccatccctgccatggccaccaacccccagaacgccgccagccgccggacgcccaacaacccggggaacccatccaatcccggcccccccaagacccccgagaatagccttatcgtcaccaaccccagcggcacccagaccaattcagctaagactgccaggaaacccgaccacaccacagtggacatccccccagcctgcccaccccccctcaaccacaccgtcgtacaagtgaacaaaaacgccaacccagacccactgccaaaaaaagaggaagagaagaaggaggaggaggaagacgaccgtggggaagacggccctaagccaatgcctccctatagctccatgttcatcctgtccacgaccaacccccttcgccgcctgtgccattacatcctgaacctgcgctactttgagatgtgcatcctcatggtcattgccatgagcagcatcgccctggccgccgaggaccctgtgcagcccaacgcacctcggaacaacgtgctgcgatactttgactacgtttttacaggcgtctttacctttgagatggtgatcaagatgattgacctggggctcgtcctgcatcagggtgcctacttccgtgacctctggaatattctcgacttcatagtggtcagtggggccctggtagcctttgccttcactggcaatagcaaaggaaaagacatcaacacgattaaatccctccgagtcctccgggtgctacgacctcttaaaaccatcaagcggctgccaaagctcaaggctgtgtttgactgtgtggtgaactcacttaaaaacgtcttcaacatcctcatcgtctacatgctattcatgttcatcttcgccgtggtggctgtgcagctcttcaaggggaaattcttccactgcactgacgagtccaaagagtttgagaaagattgtcgaggcaaatacctcctctacgagaagaatgaggtgaaggcgcgagaccgggagtggaagaagtatgaattccattacgacaatgtgctgtgggctctgctgaccctcttcaccgtgtccacgggagaaggctggccacaggtcctcaagcattcggtggacgccacctttgagaaccagggccccagccccgggtaccgcatggagatgtccattttctacgtcgtctactttgtggtgttccccttcttctttgtcaatatctttgtggccttgatcatcatcaccttccaggagcaaggggacaagatgatggaggaatacagcctggagaaaaatgagagggcctgcattgatttcgccatcagcgccaagccgctgacccgacacatgccgcagaacaagcagagcttccagtaccgcatgtggcagttcgtggtgtctccgcctttcgagtacacgatcatggccatgatcgccctcaacaccatcgtgcttatgatgaagttctatggggcttctgttgcttatgaaaatgccctgcgggtgttcaacatcgtcttcacctccctcttctctctggaatgtgtgctgaaagtcatggcttttgggattctgaattatttccgcgatgcctggaacatcttcgactttgtgactgttctgggcagcatcaccgatatcctcgtgactgagtttggggcctggtcccgtgctactccacccagccccagaagctgagaagccatccctgagaggggggaaaagggccccaaatgcatcttctccgactcagcgggcagcgaggactcaccctgcagccgaacagtcccagctccctcccgtcctccccattcccgctcgccaaggggaataacttcatcaacctgagctttctccgcctcttccgagctgcccggctcatcaaacttctccgtcagggttacaccatccgcattcttctctggacctttgtgcagtccttcaaggccctgccttatgtctgtctgctgatcgccatgctcttcttcatctatgccatcattgggatgcaggtgtttggtaacattggcatcgacgtggaggacgaggacagtgatgaagatgagttccaaatcactgagcacaataacttccggaccttcttccaggccctcatgcttctcttccggagtgccaccggggaagcttggcacaacatcatgctttcctgcctcagcgggaaaccgtgtgataagaactctggcatcctgactcgagagtgtggcaatgaatttgcttatttttactttgtttccttcatcttcctctgctcgtttctgatgctgaatctctttgtcgccgtcatcatggacaactttgagtacctcacccgagactcctccatcctgggcccccaccacctggatgagtacgtgcgtgtctgggccgagtatgaccccgcagcttggggccgcatgccttacctggacatgtatcagatgctgagacacatgtctccgcccctgggtctggggaagaagtgtccggccagagtggcttacaagcggcttctgcggatggacctgcccgtcgcagatgacaacaccgtccacttcaattccaccctcatggctctgatccgcacagccctggacatcaagattgccaagggaggagccgacaaacagcagatggacgctgagctgcggaaggagatgatggcgatttggcccaatctgtcccagaagacgctagacctgctggtcacacctcacaagtccacggacctcaccgtggggaagatctacgcagccatgatgatcatggagtactaccggcagagcaaggccaagaagctgcaggccatgcgcgaggagcaggtgcgctgttcgccgctctggggacatctgggctggggacagtggcttgcatgtcaccacgggaaccaactggaatatgagggtggctgagccccagggcaggtccctgaaaagtaggggctgtgcacagcagctcacacctgcaatctcagtgctttgagaggccagggcagagggatcgtttgagaccaggatgagaccaccctgggcaacacagtgagactccatctctacaaaataaaacattagccaggcatggtggtgcacacctgtagtcccagctatttaggaggccaagatgggaggatcacttgaggccaggagtgggagaccagtctgggcaacatagaaagacccatatctctacaaaaaaaaaataaaattagctgcatgtggcgccatgcacctgtggtcccagctacttgggaggctgaggcaggagaatcacttgaacctgggaggtggaggttgcagcaagccaagatcaagccactgcactccagcccgggtgataagagcagg

SEQ ID NO: 26453 - DNA, 5681 bp, Homo sapiens
cgcaccctccttccgcccctccttctccggggtcagccaggaagatgtcccgagctgctatccccggctcggcccgggcagccgccttctgagcccccgacccgaggcgccgagccgccgccgcccgatgggctgggccgtggagcgtctccgcagtcgtagctccagccgccgcgctcccagccccggcagcctcagcatcagcggcggcggcggcggcggcggcggcgtcttccgcatcgttcgccgcagcgtaacccggagccctttgctctttgcagaatggcccgcttcggagacgagatgccggcccgctacgggggaggaggctccggggcagccgccggggtggtcgtgggcagcggaggcgggcgaggagccgggggcagccggcagggcgggcagcccggggcgcaaaggatgtacaagcagtcaatggcgcagagagcgcggaccatggcactctacaaccccatccccgtccgacagaactgcctcacggttaaccggtctctcttcctcttcagcgaagacaacgtggtgagaaaatacgccaaaaagatcaccgaatggcctccctttgaatatatgattttagccaccatcatagcgaattgcatcgtcctcgcactggagcagcatctgcctgatgatgacaagaccccgatgtctgaacggctggatgacacagaaccatacttcattggaattttttgtttcgaggctggaattaaaatcattgcccttgggtttgccttccacaaaggctcctacttgaggaatggctggaatgtcatggactttgtggtggtgctaacgggcatcttggcgacagttgggacggagtttgacctacggacgctgagggcagttcgagtgctgcggccgctcaagctggtgtctggaatcccaagtttacaagtcgtcctgaagtcgatcatgaaggcgatgatccctttgctgcagatcggcctcctcctattttttgcaatccttatttttgcaatcatagggttagaattttatatgggaaaatttcataccacctgctttgaagaggggacagatgacattcagggtgagtctccggctccatgtgggacagaagagcccgcccgcacctgccccaatgggaccaaatgtcagccctactgggaagggcccaacaacgggatcactcagttcgacaacatcctgtttgcagtgctgactgttttccagtgcataaccatggaagggtggactgatctcctctacaatagcaacgatgcctcagggaacacttggaactggttgtacttcatccccctcatcatcatcggctccttttttatgctgaaccttgtgctgggtgtgctgtcaggggagtttgccaaagaaagggaacgggtggagaaccggcgggcttttctgaagctgaggcggcaacaacagattgaacgtgagctcaatgggtacatggaatggatctcaaaagcagaagaggtgatcctcgccgaggatgaaactgacggggagcagaggcatccctttgatggagctctgcggagaaccaccataaagaaaagcaagacagatttgctcaaccccgaagaggctgaggatcagctggctgatatagcctctgtgggttctcccttcgcccgagccagcattaaaagtgccaagctggagaactcgaccttttttcacaaaaaggagaggaggatgcgtttctacatccgccgcatggtcaaaactcaggccttctactggactgtactcagtttggtagctctcaacacgctgtgtgttgctattgttcactacaaccagcccgagtggctctccgacttcctttactatgcagaattcattttcttaggactctttatgtccgaaatgtttataaaaatgtacgggcttgggacgcggccttacttccactcttccttcaactgctttgactgtggggttatcattgggagcatcttcgaggtcatctgggctgtcataaaacctggcacatcctttggaatcagcgtgttacgagccctcaggttattgcgtattttcaaagtcacaaagtactgggcatctctcagaaacctggtcgtctctctcctcaactccatgaagtccatcatcagcctgttgtttctccttttcctgttcattgtcgtcttcgcccttttgggaatgcaactcttcggcggccagtttaatttcgatgaagggactcctcccaccaacttcgatacttttccagcagcaataatgacggtgtttcagatcctgacgggcgaagactggaacgaggtcatgtacgacgggatcaagtctcaggggggcgtgcagggcggcatggtgttctccatctatttcattgtactgacgctctttgggaactacaccctcctgaatgtgttcttggccatcgctgtggacaatctggccaacgcccaggagctcaccaaggacgagcaagaggaagaagaagcagcgaaccagaaacttgccctacagaaagccaaggaggtggcagaagtgagtcctctgtccgcggccaacatgtctatagctgtgaaagagcaacagaagaatcaaaagccagccaagtccgtgtgggagcagcggaccagtgagatgcgaaagcagaacttgctggccagccgggaggccctgtataacgaaatggacccggacgagcgctggaaggctgcctacacgcggcacctgcggccagacatgaagacgcacttggaccggccgctggtggtggacccgcaggagaaccgcaacaacaacaccaacaagagccgggcggccgagcccaccgtggaccagcgcctcggccagcagcgcgccgaggacttcctcaggaaacaggcccgctaccacgatcgggcccgggaccccagcggctcggcgggcctggacgcacggaggccctgggcgggaagccaggaggccgagctgagccgggagggaccctacggccgcgagtcggaccaccacgcccgggagggcagcctggagcaacccgggttctgggagggcgaggccgagcgaggcaaggccggggacccccaccggaggcacgtgcaccggcaggggggcagcagggagagccgcagcgggtccccgcgcacgggcgcggacggggagcatcgacgtcatcgcgcgcaccgcaggcccggggaggagggtccggaggacaaggcggagcggagggcgcggcaccgcgagggcagccggccggcccggggcggcgagggcgagggcgagggccccgacgggggcgagcgcaggagaaggcaccggcatggcgctccagccacgtacgagggggacgcgcggagggaggacaaggagcggaggcatcggaggaggaaagagaaccagggctccggggtccctgtgtcgggccccaacctgtcaaccacccggccaatccagcaggacctgggccgccaagacccacccctggcagaggatattgacaacatgaagaacaacaagctggccaccgcggagtcggccgctccccacggcagccttggccacgccggcctgccccagagcccagccaagatgggaaacagcaccgaccccggccccatgctggccatccctgccatggccaccaacccccagaacgccgccagccgccggacgcccaacaacccggggaacccatccaatcccggcccccccaagacccccgagaatagccttatcgtcaccaaccccagcggcacccagaccaattcagctaagactgccaggaaacccgaccacaccacagtggacatccccccagcctgcccaccccccctcaaccacaccgtcgtacaagtgaacaaaaacgccaacccagacccactgccaaaaaaagaggaagagaagaaggaggaggaggaagacgaccgtggggaagacggccctaagccaatgcctccctatagctccatgttcatcctgtccacgaccaacccccttcgccgcctgtgccattacatcctgaacctgcgctactttgagatgtgcatcctcatggtcattgccatgagcagcatcgccctggccgccgaggaccctgtgcagcccaacgcacctcggaacaacgtgctgcgatactttgactacgtttttacaggcgtctttacctttgagatggtgatcaagatgattgacctggggctcgtcctgcatcagggtgcctacttccgtgacctctggaatattctcgacttcatagtggtcagtggggccctggtagcctttgccttcactggcaatagcaaaggaaaagacatcaacacgattaaatccctccgagtcctccgggtgctacgacctcttaaaaccatcaagcggctgccaaagctcaaggctgtgtttgactgtgtggtgaactcacttaaaaacgtcttcaacatcctcatcgtctacatgctattcatgttcatcttcgccgtggtggctgtgcagctcttcaaggggaaattcttccactgcactgacgagtccaaagagtttgagaaagattgtcgaggcaaatacctcctctacgagaagaatgaggtgaaggcgcgagaccgggagtggaagaagtatgaattccattacgacaatgtgctgtgggctctgctgaccctcttcaccgtgtccacgggagaaggctggccacaggtcctcaagcattcggtggacgccacctttgagaaccagggccccagccccgggtaccgcatggagatgtccattttctacgtcgtctactttgtggtgttccccttcttctttgtcaatatctttgtggccttgatcatcatcaccttccaggagcaaggggacaagatgatggaggaatacagcctggagaaaaatgagagggcctgcattgatttcgccatcagcgccaagccgctgacccgacacatgccgcagaacaagcagagcttccagtaccgcatgtggcagttcgtggtgtctccgcctttcgagtacacgatcatggccatgatcgccctcaacaccatcgtgcttatgatgaagttctatggggcttctgttgcttatgaaaatgccctgcgggtgttcaacatcgtcttcacctccctcttctctctggaatgtgtgctgaaagtcatggcttttgggattctgaattatttccgcgatgcctggaacatcttcgactttgtgactgttctgggcagcatcaccgatatcctcgtgactgagtttgggaataacttcatcaacctgagctttctccgcctcttccgagctgcccggctcatcaaacttctccgtcagggttacaccatccgcattcttctctggacctttgtgcagtccttcaagtgccctacacccaccaccagacacactcacacccacacacgttctcagacacacacaagagtgcttgccggttataccaaaccctactattactgcctgcagaaatcaatttaaaaaaataataataacaataaacaattttaaaaaggacaaaaaaattaatgattgagaaaagaggcatttttttctgacatttggtcctgcttgaaacaacaaaagaagaagaaaaacccaccatcaccaccgattcctttgcttcttttttccttttttcctaccttgtttgaaaaccgtgggcttgggactgtgaattattgcatgacattcaa

SEQ ID NO: 26454 - DNA, 1803 bp, Homo sapiens
cgcaccctccttccgcccctccttctccggggtcagccaggaagatgtcccgagctgctatccccggctcggcccgggcagccgccttctgagcccccgacccgaggcgccgagccgccgccgcccgatgggctgggccgtggagcgtctccgcagtcgtagctccagccgccgcgctcccagccccggcagcctcagcatcagcggcggcggcggcggcggcggcggcgtcttccgcatcgttcgccgcagcgtaacccggagccctttgctctttgcagaatggcccgcttcggagacgagatgccggcccgctacgggggaggaggctccggggcagccgccggggtggtcgtgggcagcggaggcgggcgaggagccgggggcagccggcagggcgggcagcccggggcgcaaaggatgtacaagcagtcaatggcgcagagagcgcggaccatggcactctacaaccccatccccgtccgacagaactgcctcacggttaaccggtctctcttcctcttcagcgaagacaacgtggtgagaaaatacgccaaaaagatcaccgaatggcctccctttgaatatatgattttagccaccatcatagcgaattgcatcgtcctcgcactggagcagcatctgcctgatgatgacaagaccccgatgtctgaacggctggatgacacagaaccatacttcattggaattttttgtttcgaggctggaattaaaatcattgcccttgggtttgccttccacaaaggctcctacttgaggaatggctggaatgtcatggactttgtggtggtgctaacgggcatcttggcgacagttgggacggagtttgacctacggacgctgagggcagttcgagtgctgcggccgctcaagctggtgtctggaatcccaagtttacaagtcgtcctgaagtcgatcatgaaggcgatgatccctttgctgcagatcggcctcctcctattttttgcaatccttatttttgcaatcatagggttagaattttatatgggaaaatttcataccacctgctttgaagaggggacagatgacattcagggtgagtctccggctccatgtgggacagaagagcccgcccgcacctgccccaatgggaccaaatgtcagccctactgggaagggcccaacaacgggatcactcagttcgacaacatcctgtttgcagtgctgactgttttccagtgcataaccatggaagggtggactgatctcctctacaatagcaacgatgcctcagggaacacttggaactggttgtacttcatccccctcatcatcatcggctccttttttatgctgaaccttgtgctgggtgtgctgtcaggggagtttgccaaagaaagggaacgggtggagaaccggcgggcttttctgaagctgaggcggcaacaacagattgaacgtgagctcaatgggtacatggaatggatctcaaaagcaggtgaggccctttcatcctggggcccagggatggagatcccaggccacggagtacaaagagagtcatgcagtttggagaaggctaagctgggagggttatgatgggaggagaaagagaacctgaattggtagtcccaaattttatcaacaagaatccagagtctgatatgaagaagtctaagatgaagccaggatctgacatcacgtaacttgaattctgaaatcagacgctggtttacatcccggccctgccactttttacccatgcaccacacatccctgtacctccgtttcctcagctgttacatggaggcgatggtagtg

SEQ ID NO: 26455 - DNA, 329 bp, Homo sapiens
ccgagccagcattaaaagtgccaagctggagaactcgaccttttttcacaaaaaggagaggaggatgcgtttctacatccgccgcatggtcaaaactcaggccttctactggactgtactcagtttggtagctctcaacacgctgtgtgttgctattgttcactacaaccagcccgagtggctctccgacttcctttgtgagtatcacccagccccacccctgccaactccctgatccctccctcacaccctttttccacttctctttctctggtagtatgtgtatcttctttggtcctcattgaatctgccctttcctttagccattt

SEQ ID NO: 26456 - DNA, 398 bp, Homo sapiens
tcgctcccctctcttcctcccaatcccgtgtctcctttgattttgttgtatctttttttttgatttcctttgtttcaattttcgtgtagggcagtagttccgtaagtggaagcccagccccctcaacatctggtaccagcactccgcggcggggccgccgccagctcccccagaccccctccaccccccggccacacgtgtcctattcccctgtgatccgtaaggccggcggctcggggcccccgcagcagcagcagcagcagcagcagcagcagcagcagcaggcggtggccaggccgggccgggcggccaccagcggccctcggaggtacccaggccccacggccgagcctctggccggagatcggccgcccacggggggccacagcagcggccgc

SEQ ID NO: 26457 - DNA, 1487 bp, Homo sapiens
gaggccgagggctgccgctaccaatttcgggtcgcgctgctgggggacgcggcggtgggcaagacgtcgctgctgcggagctacgtggcaggcgcgcctggcgccccggagccggagcccgagcccgagcccacggtgggcgccgagtgctaccgccgcgcgctgcagctgcgggccgggccgcgggtcaagctgcaactctgggacaccgcgggccacgagcgcttcaggtgcatcaccaggtccttttaccggaatgtggtgggtgtcctgctggtctttgatgtgacaaacaggaagtcctttgaacacatccaagactggcaccaggaggtcatggccactcagggcccggacaaggtcatcttcctgctggttggccacaagagtgacctgcagagcacccgctgtgtctcagcccaggaggccgaggagctagctgcctccctgggcatggccttcgtggagacctcggttaaaaacaactgcaatgtggacctggcctttgacaccctcgctgatgctatccagcaggccctgcagcagggggacatcaagctagaagagggctgggggggtgtccggctcatccacaagacccaaatccccaggtcccccagcaggaagcagcactcaggcccatgccagtgttgactctaggagagaaagggttaaagcagtcccagccttagcccacctggtgggatggggagtgttaatatctctctggaggacaaatgacagaagggttcatataaacagtatcctgacacagtcatgcttcctggattttggagtcgaggctttctacagaaaagaaagttctgatggccaggcatggtctcgaactccgcatctcaggtgatctgctcgccttggcctcccaaagtgatgggattgcaggcatgagccaccgtgcccggcttcacacccatttctttaaaaaggatcccgtagcaggcagaaaagccccttccatcctgctcctctgatactgtgcccccttggagatatttccgtcctccacccacgtgtctgtggctggaactgcccagcctgctcctggccccctggaagcctccccacagctggtaatctggacttaaggattgctgggccaccgcctctctgcctaccaccattccatatttaagtggagcccctacgtagaaaggccccggggctttattttagtctccttttcagggatgtcgtgggcgggggagggggttcttggtgctacagccctctccccacccctaaagggacgccgacgctgtttgctgccttcaccacatattagtgcttgaccctggcaggggaccccatggaaaagatggggaagagcaaaatacatggagacgacgcaccctccaggatgctcgctgggattcccacgcccaccactgtcccccaccccatggctgggaggggcctctgaacggaacagtgtccccacagagcgaataaagccaaggcttcttccc

SEQ ID NO: 26458 - DNA, 2788 bp, Homo sapiens
gaagaaatgagtgaggtggatgcttcagcgctgttagtctcctccccatgcccctcctcacttcatctagtttagtccctttatcctgtgaagtaggggtcatcattagcccccttttacagaggagagaattgaggcttcgagagagagaaacttggccaggagtttccactcggtccgacgccctcggtgccccgccgggtgcatcaccaggtccttttaccggaatgtggtgggtgtcctgctggtctttgatgtgacaaacaggaagtcctttgaacacatccaagactggcaccaggaggtcatggccactcagggcccggacaaggtcatcttcctgctggttggccacaagagtgacctgcagagcacccgctgtgtctcagcccaggaggccgaggagctagctgcctccctgggcatggccttcgtggagacctcggttaaaaacaactgcaatgtggacctggcctttgacaccctcgctgatgctatccagcaggccctgcagcagggggacatcaagctagaagagggctgggggggtgtccggctcatccacaagacccaaatccccaggtcccccagcaggaagcagcactcaggcccatgccagtgttgactctaggagagaaagggttaaagcagtcccagccttagcccacctggtgggatggggagtgttaatatctctctggaggacaaatgacagaagggttcatataaacagtatcctgacacagtcatgcttcctggattttggagtcgaggctttctacagaaaagaaagttctgatggccaggcatggtggctcacgcctgtaatcctagcatttttggaggccaaggacagtggatcacctgaggtcaggggttcgagaccagcctggccaacatggtgaaaccctgtctctactaaaaatacaaaaattagccaggcgtggtggtgcatgcctgtaatcccagttactccagaggctaaggcaggagaattgcttgaacctgggaggcagagattgcagtgagccaagactgcgccactgcactccagcctgggcaacagagtgagactctgtttcaaaaaaaaaaaagaaaagaaaagaaaggcctgagagaccagatgtgcaacttcctgtccttgagcctcagtgtccctatctatcgatggggctcataaaagatcccaccttgaagggaggtggtgaccacaaatgagacagtggacaggatgtgctcacccagagcctgccgcgctgtgaattgaatgacaaaagctctcattcccactccctttttcttggctgcgatgtggccactctggcagcattcctgggctcagacactgagaagccagcgtcaggaagctgatgcatgggcaaaggcaggtgcggggaattccagggggagcttggcttggaggcttcttatgtcctcaggctaaaatgattctgggcatgggattaatatgtgacgtcaaacccagggttgctggccaatgcccccccgaccaggcccaggggctgaaaaatggatgttggaggctgggatgaacatgaatgtgtagcaactatgttgggcacacagtggccactgtgatgagccaccaagatccccctttctggctggggaacccatcaaccctctccccagctgctggagtgccactggatgatggacttcagcttgccccactctctgggaaaggccctcccttcagggcagcttgtatccaaagttcatctcctggggggccttaaaggactccctcttgccccagctctggacaactctgaaagtcaaaaccaactttatcagtctctgtgggcttcattgaggacactgttgtgacatcatagccaagttatccccttgcccaatcctgcttccttttcttccccaaacaggtatccatttcaagaatatcccctaataaacatctgcacactcatctccatctcagaatctgcctcctggtaacctaacctatgatgggaactgctaggcagggaatgtcctgggagcaattagggaaggcttcatggaagagacactgtttatgttaggccgaatctcagcaggtgtagggcttagtgggtatcattgtgctgtagcaaaaagcacagccactttgctgggtgcagtggctcacgcctgtaatcccagcactttcggaggcctaggcaggcagttcacttgaggttgggagttcgagaccagtatggccaacacggcgaaaccctgtctatactaaaaatacaaaaattagctgggtgtggtggctcatgcctgtaatcccagcacttaggaggctgaagcatgagaattgcttgagcccaggaggcagaggttgcagcgagccacgatcccgccactgcactccagccctctaacttgggtggcagagcaacactccgtctcataaaaaaagaaaaaagcatagtcacttaactctcttttgtgaccttgagctagttacttggcctccttgagccttggtttcctcctcagtcagtaacatgagactgataatccctccctcctagggttcttagaaggttttcagaatgagtttcttagcttcctccccatggagagggggctgaggggtcttcctgtgcacttggtcctgcctctttttttttttaaacccataaaaattcacctgttttattttgtggggggtggggaatatccattacctcagacatttatattttatttgtattacaaacaatccagttatacgtttttatttctaaatgtacaataaattactgttgactgt

SEQ ID NO: 26459 - DNA, 2817 bp, Homo sapiens
gaggccgagggctgccgctaccaatttcgggtcgcgctgctgggggacgcggcggtgggcaagacgtcgctgctgcggagctacgtggcaggcgcgcctggcgccccggagccggagcccgagcccgagcccacggtgggcgccgagtgctaccgccgcgcgctgcagctgcgggccgggccgcgggtcaagctgcaactctgggacaccgcgggccacgagcgcttcaggtgcatcaccaggtccttttaccggaatgtggtgggtgtcctgctggtctttgatgtgacaaacaggaagtcctttgaacacatccaagactggcaccaggaggtcatggccactcagggcccggacaaggtcatcttcctgctggttggccacaagagtgacctgcagagcacccgctgtgtctcagcccaggaggccgaggagctagctgcctccctgggcatggccttcgtggagacctcggttaaaaacaactgcaatgtggacctggcctttgacaccctcgctgatgctatccagcaggccctgcagcagggggacatcaagctagaagagggctgggggggtgtccggctcatccacaagacccaaatccccaggtcccccagcaggaagcagcactcaggcccatgccagtgttgactctaggagagaaagggttaaagcagtcccagccttagcccacctggtgggatggggagtgttaatatctctctggaggacaaatgacagaagggttcatataaacagtatcctgacacagtcatgcttcctggattttggagtcgaggctttctacagaaaagaaagttctgatggccaggcatggtggctcacgcctgtaatcctagcatttttggaggccaaggacagtggatcacctgaggtcaggggttcgagaccagcctggccaacatggtgaaaccctgtctctactaaaaatacaaaaattagccaggcgtggtggtgcatgcctgtaatcccagttactccagaggctaaggcaggagaattgcttgaacctgggaggcagagattgcagtgagccaagactgcgccactgcactccagcctgggcaacagagtgagactctgtttcaaaaaaaaaaaagaaaagaaaagaaaggcctgagagaccagatgtgcaacttcctgtccttgagcctcagtgtccctatctatcgatggggctcataaaagatcccaccttgaagggaggtggtgaccacaaatgagacagtggacaggatgtgctcacccagagcctgccgcgctgtgaattgaatgacaaaagctctcattcccactccctttttcttggctgcgatgtggccactctggcagcattcctgggctcagacactgagaagccagcgtcaggaagctgatgcatgggcaaaggcaggtgcggggaattccagggggagcttggcttggaggcttcttatgtcctcaggctaaaatgattctgggcatgggattaatatgtgacgtcaaacccagggttgctggccaatgcccccccgaccaggcccaggggctgaaaaatggatgttggaggctgggatgaacatgaatgtgtagcaactatgttgggcacacagtggccactgtgatgagccaccaagatccccctttctggctggggaacccatcaaccctctccccagctgctggagtgccactggatgatggacttcagcttgccccactctctgggaaaggccctcccttcagggcagcttgtatccaaagttcatctcctggggggccttaaaggactccctcttgccccagctctggacaactctgaaagtcaaaaccaactttatcagtctctgtgggcttcattgaggacactgttgtgacatcatagccaagttatccccttgcccaatcctgcttccttttcttccccaaacaggtatccatttcaagaatatcccctaataaacatctgcacactcatctccatctcagaatctgcctcctggtaacctaacctatgatgggaactgctaggcagggaatgtcctgggagcaattagggaaggcttcatggaagagacactgtttatgttaggccgaatctcagcaggtgtagggcttagtgggtatcattgtgctgtagcaaaaagcacagccactttgctgggtgcagtggctcacgcctgtaatcccagcactttcggaggcctaggcaggcagttcacttgaggttgggagttcgagaccagtatggccaacacggcgaaaccctgtctatactaaaaatacaaaaattagctgggtgtggtggctcatgcctgtaatcccagcacttaggaggctgaagcatgagaattgcttgagcccaggaggcagaggttgcagcgagccacgatcccgccactgcactccagccctctaacttgggtggcagagcaacactccgtctcataaaaaaagaaaaaagcatagtcacttaactctcttttgtgaccttgagctagttacttggcctccttgagccttggtttcctcctcagtcagtaacatgagactgataatccctccctcctagggttcttagaaggttttcagaatgagtttcttagcttcctccccatggagagggggctgaggggtcttcctgtgcacttggtcctgcctctttttttttttaaacccataaaaattcacctgttttattttgtggggggtggggaatatccattacctcagacatttatattttatttgtattacaaacaatccagttatacgtttttatttctaaatgtacaataaattactgttgactgt

SEQ ID NO: 26460 - DNA, 549 bp, Homo sapiens
tttttttggagagagacggggtctcgctatgttgaccaacctgcttttgaaattcactgggataagaggcaaggtagagactaggctccctcagagaaactataagtcatttgtctccctaccttccttccctctaggtgctgtgagaagccatctttccgacttcaaaaaacaccgagctgctagaattgaccactatgttgtggaagtcaataaactaataatcaggttagagaaggtaaattttgttgtcttaaaacatttttttctacaaatacacattttctggggaaaaataatcacatttctatagcctgtgttgtatatatcatatacatctgatggtggcagagaaacaccttctctagagaggtgcaaaggacatggtggacagttctagcctgggccagcattccttaagagaatggcccaggttgacaaacttgccacatgcttagcttcccttttcccacctatgaatcccactcaggtgctggaaaacctttcttccttcagattcttcttttgggtgtcccaggcacaatcatc

SEQ ID NO: 26461 - DNA, 3675 bp, Homo sapiens
gagcgaccgatggagatggcggctgcggctgagtgacggacggtggaggcccagagcccgggcctgaagggggggacaaacctgggtgcccgcaggagcccggcagggtactgtgctaaaccctggggagacggcgaagtggaaaacatatagagtctgtgccctcccagattttacagtcttacttggtcacttcacgtatgtacctgcggttataaattgagatgagtgctgtgaaggagaagtccattctgatgctctgagtgtcttacaagtatcaagaacttactatatgtggttgaataaacaatcaaggtaaagagcatcaagtaaaaacttctgcttgttgataagtacttcagacattcccccagtggctgaagtggcatatgaattatgaagttggatcatttggaatgaatgtagagaatgccaagggctcctcctactccagagaggaaacctcatccagggccatgaagccacttcctcaccatctgtgtgctgcttaagctaatgctgcgggaaccatggttccttgggaggaatcaagctgactcttggcatgagattcctgccttcctagggttgagagcggcactgccatggcttctctggacgacccaggggaagtgagggagggcttcctctgccctctgtgcctgaaggatctgcagtctttctatcagcttcactcacattacgaggaagaacactcaggggaagaccgtgatgtcaaagggcaaattaaaagtcttgtccagaaggctaaaaaagcaaaggacaggttgttgaaacgagaaggggatgatcgagcagagtcagggacccaaggatatgagtctttcagctatggaggggttgatccttacatgtgggaaccccaggagcttggtgctgtgagaagccatctttccgacttcaaaaaacaccgagctgctagaattgaccactatgttgtggaagtcaataaactaataatcaggttagagaagctcactgcatttgacagaacaaatactgagtctgcaaagattcgagcaatagaaaagtctgtggtgccttgggtcaacgaccaggatgtccctttctgtccagactgtgggaataagttcagcatccggaaccgccgccaccactgccgcctctgcgggtctattatgtgcaagaagtgtatggagctcatcagccttcccttggcaaacaagctcaccagtgccagcaaggagtccctgagcacccacaccagccccagccagtcacccaacagtgtccatggctcccgccgaggcagcatcagcagcatgagcagtgtcagctcggtcctggatgagaaggacgatgaccggatccgctgctgtacacactgcaaggacacgctgctcaagagagagcagcagattgatgagaaggagcacacacctgacatcgtgaagctctacgagaaattacgactttgcatggagaaagttgaccagaaagctccagaatacatcaggatggcagcatcattaaatgctggggagacaacctacagtctggaacatgccagtgaccttcgagtggaagtgcagaaagtgtatgagctgatagacgctttaagtaagaagatcttaaccttgggcttgaaccaggaccctccaccacatccaagcaatttgcggctgcagagaatgatcagatactcagctacactttttgtgcaggaaaagttgcttggtttgatgtcactgccaaccaaagaacagtttgaggaactgaaaaagaaaaggaaggaggaaatggagaggaagagggccgtggagagacaagctgctctggagtcccagcgaaggcttgaggaaaggcagagtggcctggcttctcgagcggccaacggggaggtggcatctctccgcaggggccctgcccccttgagaaaggctgagggctggctcccactgtcaggaggtcaggggcagagtgaggactcagacccgctcctccagcagatccacaacatcacatcattcatcaggcaggccaaggccgcgggccgcatggatgaagtgcgcactctgcaggagaacctgcggcagctgcaggacgagtatgaccagcagcagacagagaaggccatcgagctgtcccggaggcaggctgaggaggaggacctgcagcgggaacagctgcagatgttgcgtgaacgggagttggaacgagaaagggagcagtttcgggtggcatccctgcacacacggactcggtccctggacttcagagaaatcggcccttttcagctggagcccagcagagagcctcgcacccaccttgcttatgctttggatctaggctcttccccagttccaagcagcacagctcccaagaccccttcacttagctcaactcaacccaccagagtgtggtctgggcccccagccgttggccaggagcgcttaccccagagcagcatgccacagcaacatgaggggccctccttaaacccctttgatgaggaagacctctccagccccatggaagaggccactactggtcctcctgctgcaggggtttccttagacccttcagcccgcatcctgaaagagtacaatcctttcgaggaagaggacgaggaggaggaagcagtggcagggaatccattcattcagccagacagcccagctcctaaccccttcagtgaggaagacgaacatccccagcagaggctctcaagccctctggttcctggtaacccctttgaggaacccacctgtatcaacccctttgagatggacagtgacagtgggccagaggctgaggagcccatagaggaagagctcctcctgcagcagatcgataacatcaaggcatacatctttgatgccaagcagtgcggccgcctggatgaggtagaggtgctgacagagaatctgcgggagctgaagcacaccctggccaagcagaaggggggcactgactgaccagcagtggagagggcacctttgggcccaggggtctggcaggagccagtggagcaggacagagggcaggcaggatggatggggaaggtggcagggtgagaactcagatgcacacaggtgaggggcaggaatctgctgttttgtgttgcgcactttgaggtatttccactacagttgaataataaaatagaaactagaacagggagaatcagcattcagttgctgcttttcctgtttattattactatcttttgtaatcggaggtttaccccttttgaagggactttacatttttactaccgagatataactaaatgcagctctgttgggcccagggcagaaatggctgctgtgtacctcttgggtccatttgctactgcctagtcttggttccttatgcagtattatagggcagcctttttagagcccttcctttagccaagacagagaagatagattccactgagctctattctgctctgacagaagtccatccctagtaggctgtgagttccatttcacctggggccgcctctcccctgctctgcacttcctgtctgtacaatagaagggggaggtgctgctatgaaggggagagtttagacccaggagagcccagcacctctttttaaggtggggtgatgggaatatttcaccagggtctattttctcagtttaagttcttttttgtctctttcaggaagttaagctccca

SEQ ID NO: 26462 - DNA, 2918 bp, Homo sapiens
tttttttggagagagacggggtctcgctatgttgaccaacctgcttttgaaattcactgggataagaggcaaggtagagactaggctccctcagagaaactataagtcatttgtctccctaccttccttccctctaggtgctgtgagaagccatctttccgacttcaaaaaacaccgagctgctagaattgaccactatgttgtggaagtcaataaactaataatcaggttagagaagctcactgcatttgacagaacaaatactgagtctgcaaagattcgagcaatagaaaagtctgtggtgccttgggtcaacgaccaggatgtccctttctgtccagactgtgggaataagttcagcatccggaaccgccgccaccactgccgcctctgcgggtctattatgtgcaagaagtgtatggagctcatcagccttcccttggcaaacaagctcaccagtgccagcaaggagtccctgagcacccacaccagccccagccagtcacccaacagtgtccatggctcccgccgaggcagcatcagcagcatgagcagtgtcagctcggtcctggatgagaaggacgatgaccggatccgctgctgtacacactgcaaggacacgctgctcaagagagagcagcagattgatgagaaggagcacacacctgacatcgtgaagctctacgagaaattacgactttgcatggagaaagttgaccagaaagctccagaatacatcaggatggcagcatcattaaatgctggggagacaacctacagtctggaacatgccagtgaccttcgagtggaagtgcagaaagtgtatgagctgatagacgctttaagtaagaagatcttaaccttgggcttgaaccaggaccctccaccacatccaagcaatttgcggctgcagagaatgatcagatactcagctacactttttgtgcaggaaaagttgcttggtttgatgtcactgccaaccaaagaacagtttgaggaactgaaaaagaaaaggaaggaggaaatggagaggaagagggccgtggagagacaagctgctctggagtcccagcgaaggcttgaggaaaggcagagtggcctggcttctcgagcggccaacggggaggtggcatctctccgcaggggccctgcccccttgagaaaggctgagggctggctcccactgtcaggaggtcaggggcagagtgaggactcagacccgctcctccagcagatccacaacatcacatcattcatcaggcaggccaaggccgcgggccgcatggatgaagtgcgcactctgcaggagaacctgcggcagctgcaggacgagtatgaccagcagcagacagagaaggccatcgagctgtcccggaggcaggctgaggaggaggacctgcagcgggaacagctgcagatgttgcgtgaacgggagttggaacgagaaagggagcagtttcgggtggcatccctgcacacacggactcggtccctggacttcagagaaatcggcccttttcagctggagcccagcagagagcctcgcacccaccttgcttatgctttggatctaggctcttccccagttccaagcagcacagctcccaagaccccttcacttagctcaactcaacccaccagagtgtggtctgggcccccagccgttggccaggagcgcttaccccagagcagcatgccacagcaacatgaggggccctccttaaacccctttgatgaggaagacctctccagccccatggaagaggccactactggtcctcctgctgcaggggtttccttagacccttcagcccgcatcctgaaagagtacaatcctttcgaggaagaggacgaggaggaggaagcagtggcagggaatccattcattcagccagacagcccagctcctaaccccttcagtgaggaagacgaacatccccagcagaggctctcaagccctctggttcctggtaacccctttgaggaacccacctgtatcaacccctttgagatggacagtgacagtgggccagaggctgaggagcccatagaggaagagctcctcctgcagcagatcgataacatcaaggcatacatctttgatgccaagcagtgcggccgcctggatgaggtagaggtgctgacagagaatctgcgggagctgaagcacaccctggccaagcagaaggggggcactgactgaccagcagtggagagggcacctttgggcccaggggtctggcaggagccagtggagcaggacagagggcaggcaggatggatggggaaggtggcagggtgagaactcagatgcacacaggtgaggggcaggaatctgctgttttgtgttgcgcactttgaggtatttccactacagttgaataataaaatagaaactagaacagggagaatcagcattcagttgctgcttttcctgtttattattactatcttttgtaatcggaggtttaccccttttgaagggactttacatttttactaccgagatataactaaatgcagctctgttgggcccagggcagaaatggctgctgtgtacctcttgggtccatttgctactgcctagtcttggttccttatgcagtattatagggcagcctttttagagcccttcctttagccaagacagagaagatagattccactgagctctattctgctctgacagaagtccatccctagtaggctgtgagttccatttcacctggggccgcctctcccctgctctgcacttcctgtctgtacaatagaagggggaggtgctgctatgaaggggagagtttagacccaggagagcccagcacctctttttaaggtggggtgatgggaatatttcaccagggtctattttctcagtttaagttcttttttgtctctttcaggaagttaagctccca

SEQ ID NO: 26463 - DNA, 3519 bp, Homo sapiens
gagcgaccgatggagatggcggctgcggctgagtgacggacggtggaggcccagagcccgggcctgaagggggggacaaacctgggtgcccgcaggagcccggcagggtgtcttacaagtatcaagaacttactatatgtggttgaataaacaatcaaggtaaagagcatcaagtaaaaacttctgcttgttgataagtacttcagacattcccccagtggctgaagtggcatatgaattatgaagttggatcatttggaatgaatgtagagaatgccaagggctcctcctactccagagaggaaacctcatccagggccatgaagccacttcctcaccatctgtgtgctgcttaagctaatgctgcgggaaccatggttccttgggaggaatcaagctgactcttggcatgagattcctgccttcctagggttgagagcggcactgccatggcttctctggacgacccaggggaagtgagggagggcttcctctgccctctgtgcctgaaggatctgcagtctttctatcagcttcactcacattacgaggaagaacactcaggggaagaccgtgatgtcaaagggcaaattaaaagtcttgtccagaaggctaaaaaagcaaaggacaggttgttgaaacgagaaggggatgatcgagcagagtcagggacccaaggatatgagtctttcagctatggaggggttgatccttacatgtgggaaccccaggagcttggtgctgtgagaagccatctttccgacttcaaaaaacaccgagctgctagaattgaccactatgttgtggaagtcaataaactaataatcaggttagagaagctcactgcatttgacagaacaaatactgagtctgcaaagattcgagcaatagaaaagtctgtggtgccttgggtcaacgaccaggatgtccctttctgtccagactgtgggaataagttcagcatccggaaccgccgccaccactgccgcctctgcgggtctattatgtgcaagaagtgtatggagctcatcagccttcccttggcaaacaagctcaccagtgccagcaaggagtccctgagcacccacaccagccccagccagtcacccaacagtgtccatggctcccgccgaggcagcatcagcagcatgagcagtgtcagctcggtcctggatgagaaggacgatgaccggatccgctgctgtacacactgcaaggacacgctgctcaagagagagcagcagattgatgagaaggagcacacacctgacatcgtgaagctctacgagaaattacgactttgcatggagaaagttgaccagaaagctccagaatacatcaggatggcagcatcattaaatgctggggagacaacctacagtctggaacatgccagtgaccttcgagtggaagtgcagaaagtgtatgagctgatagacgctttaagtaagaagatcttaaccttgggcttgaaccaggaccctccaccacatccaagcaatttgcggctgcagagaatgatcagatactcagctacactttttgtgcaggaaaagttgcttggtttgatgtcactgccaaccaaagaacagtttgaggaactgaaaaagaaaaggaaggaggaaatggagaggaagagggccgtggagagacaagctgctctggagtcccagcgaaggcttgaggaaaggcagagtggcctggcttctcgagcggccaacggggaggtggcatctctccgcaggggccctgcccccttgagaaaggctgagggctggctcccactgtcaggaggtcaggggcagagtgaggactcagacccgctcctccagcagatccacaacatcacatcattcatcaggcaggccaaggccgcgggccgcatggatgaagtgcgcactctgcaggagaacctgcggcagctgcaggacgagtatgaccagcagcagacagagaaggccatcgagctgtcccggaggcaggctgaggaggaggacctgcagcgggaacagctgcagatgttgcgtgaacgggagttggaacgagaaagggagcagtttcgggtggcatccctgcacacacggactcggtccctggacttcagagaaatcggcccttttcagctggagcccagcagagagcctcgcacccaccttgcttatgctttggatctaggctcttccccagttccaagcagcacagctcccaagaccccttcacttagctcaactcaacccaccagagtgtggtctgggcccccagccgttggccaggagcgcttaccccagagcagcatgccacagcaacatgaggggccctccttaaacccctttgatgaggaagacctctccagccccatggaagaggccactactggtcctcctgctgcaggggtttccttagacccttcagcccgcatcctgaaagagtacaatcctttcgaggaagaggacgaggaggaggaagcagtggcagggaatccattcattcagccagacagcccagctcctaaccccttcagtgaggaagacgaacatccccagcagaggctctcaagccctctggttcctggtaacccctttgaggaacccacctgtatcaacccctttgagatggacagtgacagtgggccagaggctgaggagcccatagaggaagagctcctcctgcagcagatcgataacatcaaggcatacatctttgatgccaagcagtgcggccgcctggatgaggtagaggtgctgacagagaatctgcgggagctgaagcacaccctggccaagcagaaggggggcactgactgaccagcagtggagagggcacctttgggcccaggggtctggcaggagccagtggagcaggacagagggcaggcaggatggatggggaaggtggcagggtgagaactcagatgcacacaggtgaggggcaggaatctgctgttttgtgttgcgcactttgaggtatttccactacagttgaataataaaatagaaactagaacagggagaatcagcattcagttgctgcttttcctgtttattattactatcttttgtaatcggaggtttaccccttttgaagggactttacatttttactaccgagatataactaaatgcagctctgttgggcccagggcagaaatggctgctgtgtacctcttgggtccatttgctactgcctagtcttggttccttatgcagtattatagggcagcctttttagagcccttcctttagccaagacagagaagatagattccactgagctctattctgctctgacagaagtccatccctagtaggctgtgagttccatttcacctggggccgcctctcccctgctctgcacttcctgtctgtacaatagaagggggaggtgctgctatgaaggggagagtttagacccaggagagcccagcacctctttttaaggtggggtgatgggaatatttcaccagggtctattttctcagtttaagttcttttttgtctctttcaggaagttaagctccca

SEQ ID NO: 26464 - DNA, 3122 bp, Homo sapiens
tcatcctagttgtgcttgttgtgtgtaacctggattgtgtgctgggcatagtagcaagcacaagtacagttctttatgtgtactttgtaaggcagaaatatgtggccagttttagggtccaggagcaccgtggagaatggagagttttctgttgctttcagtcgttgcccttacccatccttgcctacccctggttattgctaaaatgggtaactgacaataaagagattagaagtgggttataggaagcgaggtgggttctagatgcaaaactaataccctgtcccatgtgaaattgtttttgtgattttgtggcgttggggatgacagatgagacttgaggaatgcaaatgtgctaatttcccacttgatgtattggaaagtgtggagcatgtatacatcacctggttaatttcatttggcactattttcttccggtcagctcactgcatttgacagaacaaatactgagtctgcaaagattcgagcaatagaaaagtctgtggtgccttgggtcaacgaccaggatgtccctttctgtccagactgtgggaataagttcagcatccggaaccgccgccaccactgccgcctctgcgggtctattatgtgcaagaagtgtatggagctcatcagccttcccttggcaaacaagctcaccagtgccagcaaggagtccctgagcacccacaccagccccagccagtcacccaacagtgtccatggctcccgccgaggcagcatcagcagcatgagcagtgtcagctcggtcctggatgagaaggacgatgaccggatccgctgctgtacacactgcaaggacacgctgctcaagagagagcagcagattgatgagaaggagcacacacctgacatcgtgaagctctacgagaaattacgactttgcatggagaaagttgaccagaaagctccagaatacatcaggatggcagcatcattaaatgctggggagacaacctacagtctggaacatgccagtgaccttcgagtggaagtgcagaaagtgtatgagctgatagacgctttaagtaagaagatcttaaccttgggcttgaaccaggaccctccaccacatccaagcaatttgcggctgcagagaatgatcagatactcagctacactttttgtgcaggaaaagttgcttggtttgatgtcactgccaaccaaagaacagtttgaggaactgaaaaagaaaaggaaggaggaaatggagaggaagagggccgtggagagacaagctgctctggagtcccagcgaaggcttgaggaaaggcagagtggcctggcttctcgagcggccaacggggaggtggcatctctccgcaggggccctgcccccttgagaaaggctgagggctggctcccactgtcaggaggtcaggggcagagtgaggactcagacccgctcctccagcagatccacaacatcacatcattcatcaggcaggccaaggccgcgggccgcatggatgaagtgcgcactctgcaggagaacctgcggcagctgcaggacgagtatgaccagcagcagacagagaaggccatcgagctgtcccggaggcaggctgaggaggaggacctgcagcgggaacagctgcagatgttgcgtgaacgggagttggaacgagaaagggagcagtttcgggtggcatccctgcacacacggactcggtccctggacttcagagaaatcggcccttttcagctggagcccagcagagagcctcgcacccaccttgcttatgctttggatctaggctcttccccagttccaagcagcacagctcccaagaccccttcacttagctcaactcaacccaccagagtgtggtctgggcccccagccgttggccaggagcgcttaccccagagcagcatgccacagcaacatgaggggccctccttaaacccctttgatgaggaagacctctccagccccatggaagaggccactactggtcctcctgctgcaggggtttccttagacccttcagcccgcatcctgaaagagtacaatcctttcgaggaagaggacgaggaggaggaagcagtggcagggaatccattcattcagccagacagcccagctcctaaccccttcagtgaggaagacgaacatccccagcagaggctctcaagccctctggttcctggtaacccctttgaggaacccacctgtatcaacccctttgagatggacagtgacagtgggccagaggctgaggagcccatagaggaagagctcctcctgcagcagatcgataacatcaaggcatacatctttgatgccaagcagtgcggccgcctggatgaggtagaggtgctgacagagaatctgcgggagctgaagcacaccctggccaagcagaaggggggcactgactgaccagcagtggagagggcacctttgggcccaggggtctggcaggagccagtggagcaggacagagggcaggcaggatggatggggaaggtggcagggtgagaactcagatgcacacaggtgaggggcaggaatctgctgttttgtgttgcgcactttgaggtatttccactacagttgaataataaaatagaaactagaacagggagaatcagcattcagttgctgcttttcctgtttattattactatcttttgtaatcggaggtttaccccttttgaagggactttacatttttactaccgagatataactaaatgcagctctgttgggcccagggcagaaatggctgctgtgtacctcttgggtccatttgctactgcctagtcttggttccttatgcagtattatagggcagcctttttagagcccttcctttagccaagacagagaagatagattccactgagctctattctgctctgacagaagtccatccctagtaggctgtgagttccatttcacctggggccgcctctcccctgctctgcacttcctgtctgtacaatagaagggggaggtgctgctatgaaggggagagtttagacccaggagagcccagcacctctttttaaggtggggtgatgggaatatttcaccagggtctattttctcagtttaagttcttttttgtctctttcaggaagttaagctccca

SEQ ID NO: 26465 - DNA, 481 bp, Homo sapiens
atcagcaattaaaggcttgaggacagatacacagtcacttttcacagtcattgccagaacttgacacacagcttcacaaagtcacaagggtcaaaaatcactatcttcctctgttcaaaagggaaagagctggaaacattggccaagaacattaatgactcctacaatagggaaggactttgtaagcttaaaagcagtgtaagtgcagtggctcacgcctgtaatcctagcacttcaggaggccgaggcgggtggattgcctgagctcaggagttcaagaccagcctgggcaacatgggcctctctaccaaaatacaatacgttctcgggcgtgacggcatgtgcctgtaatcccagctgctcaggaggctgagataggagaattgcttgaacccgggaggcggaggttgcagcgagctgagattgtgccattgcattccagcctgggtgacagagcaggactccgtctcaaaaaaaaaaa

SEQ ID NO: 26466 - DNA, 394 bp, Homo sapiens
cctcctatatggtaagcaactgtaggcactgaggatacaatggggttatggactgaatgtttgtgtccctccccaaattcctgtgttgaagccctaaccccaaaggtggctatatttggagatgagacctctacagaagtaactaaggttaaatgggatcataagggtggggccctgattcaataagattagtgtccttgtaagaagagaaaccaaacagcttgctatctcacacgtgcacgctccctctctctgtgcatactcaccaaggaaagactatgtgaagacatggctatctacaggccaagagaaggaccctcatcagaaactgaacaggccagaatgttgatcttggacttctggcttccagaacggtgagaaaataaacttctgt

SEQ ID NO: 26467 - DNA, 568 bp, Homo sapiens
cagtggttaagtgtaaaatgtttattttagtgaaatacaagaaggtgagcaatttccaatttccgtttaacttgacttattaaaaataagtctcattcacattcttctagtattattgtatactgctataaaatttaaaccagaaaagtgcttctccttgtcagtagctatctgcccaaaaaaatgaatatgacaattccagatctcatctgccatctctaagaaagccacttggaaatgttagataggtcccatgggtcctgatccagggatctgtccctgggtccccatcaggctcggctgcaggcagttgcctaaggcgtcttccgccttcagccacgctgcaatccttgctccaggcactgcggcaggttctctccatgcccccaggaagactctccaaacccgaccagctcatttctcctgccccggaggatccagacgccctggcagctcctgggctccagaaccgagaatgggatgctgcctccaatcccaattgccctaagtttctttccagagggccgggagactgctccaagtttgctgtggcgggcgagcggccgcg

SEQ ID NO: 26468 - DNA, 576 bp, Homo sapiens
gcgtgagattggtattgtatcaccattttcctgatgaggaaattgagtgacacagattatgtggccatagtcaatgttcgttatatgtgggagttgtgcttctggaaagaatcttacagataaaaaagttgtaagatgggagaacccaatatcatgtaataggttttcacagaagctgcagagtgaatttttgtattttagcaacactaatgttcaaattagtttgggccttcttataaaatgaatcatgactgtcacacattgacccctctaaatctgctcagctcggttttatgctgattgtcagtattgagctgacttctataaaaccgatgagattgctacttttagcttcatttatttttagtttttttttttttcttctgaagctacattgaaacttatgtaaaaatccaactgaagcataaaacaagcactggtgtatgcttgcctgggagctgcctgggagcaagaggagacagtcttgtcttaccaagtatgagagggtgctgaaggtttcttggtggttttcttcaaagttgtatcttgaggatatataacaattgcaaaaaaaaa

SEQ ID NO: 26469 - DNA, 360 bp, Homo sapiens
ctgacaaatttctccagtgcacccatgcactgtcttgcctctgagaatccctttccacctccactttcctgtctcactccgattcattcttcaggcctctgcttaaattcacttccaccaggaagcttcccctgtgtgagctgctcccttggttgggttgggaacaccagctctgtgttcccatctcctagtatgcattgcatggtgctttcccattccccatggcactgactacagggacaaggcctggagctcgctctcctgggtatctcagtgtctagtaggagctggcacagagcaggtacttcgtaagatttgctgaatgaatgagtgtgccggagaaagctggccagggcttta

SEQ ID NO: 26470 - DNA, 783 bp, Homo sapiens
agcagggggcgctgtgtgtaccgagaatacgagaatacctcgtgggccctgaccttctctctgagagccgggcagaggctccggagccatgcaggccgaaggccggggcacagggggttcgacgggcgatgctgatggcccaggaggccctggcattcctgatggcccagggggcaatgctggcggcccaggagaggcgggtgccacgggcggcagaggtccccggggcgcaggggcagcaagggcctcggggccgggaggaggcgccccgcggggtccgcatggcggcgcggcttcagggctgaatggatgctgcagatgcggggccagggggccggagagccgcctgcttgagttctacctcgccatgcctttcgcgacacccatggaagcagagctggcccgcaggagcctggcccaggatgccccaccgcttcccgtgccaggggtgcttctgaaggagttcactgtgtccggcaacatactgactatccgactgactgctgcagaccaccgccaactgcagctctccatcagctcctgtctccagcagctttccctgttgatgtggatcacgcagtgctttctgcccgtgtttttggctcagcctccctcagggcagaggcgctaagcccagcctggcgccccttcctaggtcatgcctcctcccctagggaatggtcccagcacgagtggccagttcattgtgggggcctgattgtttgtcgctggaggaggacggcttacatgtttgtttctgtagaaaataaaactgagctacga

SEQ ID NO: 26471 - DNA, 1022 bp, Homo sapiens
agcagggggcgctgtgtgtaccgagaatacgagaatacctcgtgggccctgaccttctctctgagagccgggcagaggctccggagccatgcaggccgaaggccggggcacagggggttcgacgggcgatgctgatggcccaggaggccctggcattcctgatggcccagggggcaatgctggcggcccaggagaggcgggtgccacgggcggcagaggtccccggggcgcaggggcagcaagggcctcggggccgggaggaggcgccccgcggggtccgcatggcggcgcggcttcagggctgaatggatgctgcagatgcggggccagggggccggagagccgcctgcttgagttctacctcgccatgcctttcgcgacacccatggaagcagagctggcccgcaggagcctggcccaggatgccccaccgcttcccgtgccaggggtgcttctgaaggagttcactgtgtccggcaacatactgactatgtcagttcaggaccaggacagggatggggcctgggtgggtggcggtcacagcgtggcagggtgggggctgggatccgcctacaccccacggtcaggctgctagaaacctgggaacaccccagcacagggtctcagaacagagacctggtacaccaggcccgccgccacccgagggagcccagggagatgggtgcagaggtgtcgcctttaacgtgatgttctctgcccctcacatttagccgactgactgctgcagaccaccgccaactgcagctctccatcagctcctgtctccagcagctttccctgttgatgtggatcacgcagtgctttctgcccgtgtttttggctcagcctccctcagggcagaggcgctaagcccagcctggcgccccttcctaggtcatgcctcctcccctagggaatggtcccagcacgagtggccagttcattgtgggggcctgattgtttgtcgctggaggaggacggcttacatgtttgtttctgtagaaaataaaactgagctacga

SEQ ID NO: 26472 - DNA, 226 bp, Homo sapiens
ggcgtttgctacagaatggtgaatttatgtatttctcttccactttgacatggacattgcctcattcttcagtagtgtgcatattcaccttaatttattcaaaagctattttacctttttcaataacaccacatcaattaccttaacttattcacttacatcagtcttccccatctacaagaaatattgaaatctattaattactaagggtgttttcaaattaaaa

SEQ ID NO: 26473 - DNA, 210 bp, Homo sapiens
gtatattgtctctggaaagcttccattcctttttaaaaatggtatttgtaccctaggtaatgcctcaaagtgtcatttgtctctaccctgttgagcccttacaaataataataaattgtataattggatacaaattataagattataaaaagaacgataagtatgaaacatacaaagattattaaaaaatgaagaactgaatttacaata

SEQ ID NO: 26474 - DNA, 290 bp, Homo sapiens
accaggagtgtttgaaggcctgctttgtaaccaactgcatcaacattagggaaatcaccaggtgctttcatcattttcttctgtaaaataaaaatttataatgtgcttacaaactacatagctctttgggaagtaggcaaattgaatttttcaaattctcagtggcaagctgggcagtaaaacataattactgatttttaatatgtactttgtggcccttgtaattcaaagatgatgattttgactatcatcactatcagtgtgaaacaacaggagctcaaagagaatcc

SEQ ID NO: 26475 - DNA, 357 bp, Homo sapiens
gatcactggagcccaggagttctgggctgtagttcactatgccagtctggtgtctgcattaagtttggcatcaatatggtaacctccagagagcaggggaccaccaggttacctaaggaggagtgagccagcccaggttgaaaacggaacaggccaaaactctcatgctgattagtagtgagattgagcctttgaatagccactgcactctagcctgggcaacatcgtgagaccccatctcttttaaaaaagaagtggccaagaagcatatgaaaagatgctcaacatcactcatcattagggaaataggaatcaaaaccacagtgaaatactacttcacacccgttaggatggcta

SEQ ID NO: 26476 - DNA, 536 bp, Homo sapiens
aaactgctgttaaaatattgaggtatttacttccagactgatttttctatacatatttatatagctatatatagttattcttttgtaagagtgactataaactgttttgaaactggcttttttaacataacaatatatgtgagcacattttccacatccccaaatatttttgaaaaatatttcttttaaatatctgcatagttttgtacccattataatttggctctggaagaagttcaagatatgccaaatagtcttggcacaatggctcacacctgtaattctgacacttttgggggccgaggtaggaggatcacttgaggccaggagttcgagaccagcttggtcaacctagcaagagctatttccacaaaaaagtgaaaaaactacccgggcgtggtaacactcccatagtcctagctacttaggaggctgaggtcaaaggattgcttgagcccaggagtttgaggctgcagtgagctatggtcgcaccactgcactccagcctgggtgacagagcaagaccttgtctctaa

SEQ ID NO: 26477 - DNA, 381 bp, Homo sapiens
gagacaaagtcttgctctgttgcctaggctggagtgggctggcgcgatctcgccttacttcagcctctacctcccgggttcaagcgattttcctgccttagcttcccctgtagctgggattacaggcacgcaccaccacatccggctattttttgtatttttagtagggatggggtttcaccatgttggctaggctggtctcgaactcccaacctcaagtgatctgtccaccttggcttcccaaagtggtgggattacaggcgggagccactgtgcctggctcttcttctcatttgttagaaaaatttttaaccttagctatcaccagaaggaacattttttcctgcagccccatcttttatctatcaataaggcattaat

SEQ ID NO: 26478 - DNA, 427 bp, Homo sapiens
ggtgcgacggcatttactgaatagctcttatgccagcttgcttcctcaacacgcaagtctacagattcccgactctccaagagttttcacagtaattcctaaacaaggtaaagacagaacaacactgggagatgggtgacatgggtaataggagggtagtatttgtattatgtagtcttttctcccttctgaatcatagaacatccctacttcttggttgttaccactatgtgacttgcatattaattacttccttttccttacatttttctcacttttgaaagaaatttaaattcattatggagttttatgggatgctttctctatcttaaacctactgaaactaaaatcgagttaaatgtatctgctccctgtaatttgtgaagattgaaacaatctggttgaatagtgctcaatatgtgggaac

SEQ ID NO: 26479 - DNA, 411 bp, Homo sapiens
tcaccggtgtccacagtccttgagagcaaaggtggtcccagcagtggagcagagggcaagggtggggcatgtagagtctccagggagccactgttggttagagagggagcccgaagtgggctccggaccccagcagggacagcgtccccttccagcgggggcagccgattgatctgggcacacgagcaggaggagcggcgccacccagggctgacctcacggccctgctcacgtctcggggcattttggcagacccacctagacctgggggacagcctgatttcctgcagccatgacctacaagggtggcagctctctcaggcttgagtaaccaggacacagacctgggccatttaatgcgcaggcagccccaagtcccggcagggccagaagcagagacggcggctgggg

SEQ ID NO: 26480 - DNA, 176 bp, Homo sapiens
ctcaatcatcaaaagaacatctaggtcagattaactaaatctcctaggctgctgtaatgtcaagatttctggcttatctcttaacatcttattgaattttaaaaactgcaagttgaaagcagaaatagaaaatgtaataaaaacatggagaagaatagaattctaattgggatgtt

SEQ ID NO: 26481 - DNA, 466 bp, Homo sapiens
gagtgtgtgtcccactgcggtgcaggatacgggagtactggcagccaggcctcgggcagccctgggggtgcttatggggcaggatggagtcacaccgataacttggggggatcacacacatgcccctacttctccaccctcttcctcttgaacttattattattattattattttgagacggagtttcactcttgttgtccaggctggagtgcaatggcgcgatctcggctcaccacaacctccacctcccaggttcatgcgattctccggcctcagcctccggagtggctgggattgcaggcatgcgccaccacatgtggttaattttgtatttttagtagagacatggtttcaccatgttggccaggctggtctcaaactcccgacctcaggcgatccacctgcctcggcctcccaaagtgctgggattccagtcgtgagccaccacgcccggcccctcttgaa

SEQ ID NO: 26482 - DNA, 379 bp, Homo sapiens
caaaaatagcactggtctgtacatgttgttctggatgtttatttttccatttaacaggtttccaatttatcatgatggctttttacctttatcagtatttaccgggatacttattagtttaatggttgcatgacaatgcactgtatgaatatatataaaattattagtctatttgaccaattcctgattgatagacatttctttttctgtaacaaataatactgcattgaaacttcatgtgtctttgtatatttggaaaaatatttctgtagattaattcttttttttttttttttttttgagacgcagtcttgctctgccgccagactggagtgcagtggcatgatctcagcccactgcaacctctgcctcctggatt

SEQ ID NO: 26483 - DNA, 814 bp, Homo sapiens
accatctgtttctcacacacatccatgagggaagaatcattcccatttaacagacaatgtaactgggcctgaatatagctcagcgacttgccccaggcccaccaggaagtggataaagccatgctcaacccagcacttcttctctctaccttccaccgatcctgcctgctcatcttccctccttggtgaaggcatgtgtgctgtgctctgcttaactaatttccctcagatattcgcatttctgtctttacaatttggcatcccagtgaggtttccctttgtatattttccggttcctatattcccattattcaggtatcatcactcaataaccatttgacagcagtaatgcttttcacatggaaagaattgggtttttattgatggcaaatgttgtgatgaactttcatgcccacttggagccggagcacttttttatagaatgaaccacaatgagaagcgtttccaagaaatgtctttggagtgtggactgagatgtacgtttaggaacaggtcctgtggccagagtggggagagaggggccttcccattgtcaaaatctcatcaatcaaaatgtataatagcaacattattaataaccctatagttgcattgcacttggtgctcttccaagcacttccctagaatcctaaaatgaaggcagggcagatattatatccatgttacaggttaaacaacattgtaacaggactgataacaccatgaatgagaagtcatttgatcaatgggtaagtgtctcatgagaaagagacttttagtaggcctgaaatctgtctttgggggtcatagatgc

SEQ ID NO: 26484 - DNA, 411 bp, Homo sapiens
atattgaaatattatgagctgaataaagtttccaaaaattccataaggctgatgagactctgtcttctctacatcaccaaggtaatcaagggatagactggtgtcccaaagtcattaatataaagaaggtgatttttaaattcttttaattctttgtggctgtattattaaatggataccagatgattatcttggagtagatcatatcttgtagcagatcataatctattttccccatctcatttctctattactttccttccttattcctttatattttgccttcaataaggtacctcttgaatagagtgttatctaaaaaataaattttgtggccagacctaaaaaggcaaatcgagtcaactagcagctaacaggcagattagctgtcaggcagttcatactgcccga

SEQ ID NO: 26485 - DNA, 343 bp, Homo sapiens
ggtgcctgtagtcccagctacttgggaggctgcagcagaattgcttgaacctaggaggcagaggttgcagtgagcagagattgtgccattgcactccagcctgagcaacaaagtgagactcaatctcaaaaaaaaaaaacaaaaaaaggaggaggagaggtgtgtgataagtcctgatggccttaggtgtcctgactgtctaggcagccaaagggcacatggtaagccatccaaaagtgccttcagggcaaaagaatagaaagggggtcgctctgctcgtggggtacacggcagaggagtaagttttatgtcaaagcaggaatctgatcagaggttccgaatt

SEQ ID NO: 26486 - DNA, 1373 bp, Homo sapiens
tagctgggattagaggcatgcgccaccatgcccggctaatgttttgtatttttggtagagatggggtttcgccgtgttggccaggctggtcttgaactcctgacctcatgatccatctgcctgggcctcccaaggtgctgggattataggcgtgagccacgacgcctggccaacaatgtagtattttttctcttttctgaacctctcttccaatccttatatcttctctgactctgatcttcctgcctctcacttaaaaggactcttgtgattactttgcatgcattgggatcatctaggataatctccacatctcaatatgtttaagttaatcacatctggaaagttcctttaaccatgtaaagtaacatattcaaaagttttggagattaggatctgtagatctttgaggatgggaggcattattcagcctactgcagatgtaatttgataaatttttgcttggaatttttgcatctacataaggatattggtctgaagttttcttttgtttaatgtctttatctttggtatcggggtaatgctgacctcatagaatgggttgggaagtgtttcctgtttttggaagagtctgtgtacaattggtatcatttcttaaattttagagtttaccagtaagttttatttgtgggaaggtttaagactacaatttcaatttttaaaatatatatagggctattcaggttatatttcttcttgtgtgaggattggtaattagtattttaaagaaagttcttcatttcatgtagtttatcaaattaatttttgtaaagttgttaatatcctcttatcattttgtataaattgttaaaacgattctaaaattgataagaaaatgcaaagtagttagaatgtagtcaaagcaactctgaaaaaggaacaaagttggaagactaacacaatgtgataccacatttgtcattcctgatattaatagtttgtgcctttttccccttgatcatctggctaaagatttatcaattgtattgatcatctcaaagaatcacattttggtttaattgattttctctgttttctgttttctaattcattggtttctgctttatctttattgtttcgttttgcttattatccaaaaagtttatgatttttgtattacttagaactgtgttatttaacttccacatatttggacattttccagagatctttctgctattgacttctaatttaattacattatggtaaaggaatgtactttatatgacttgaatatgttaaaacatatcaaaacttgtttcatggcccagaatatggtctgtattggtaatatgtttcatgtgcacttgagaagaataaattttgctgttgttgagtagtcttctataaat

SEQ ID NO: 26487 - DNA, 378 bp, Homo sapiens
atccaccctgcctgccaggtggccatagggaccctcgccatactgtctgcttgtggcagtgccctccggcctggggggtcttccagagcagatctctggccaagcgcagtggctcatgcctgtaatctcagcactttcagaggctaaggcaggtggatcacctgaggtcaggagttcgagaccagccttgctaacatggtgaaaccccgtctctactaaaaatacaaaaattagccaggtgtggtggtgcacgcctgtagtcccagctactcaggaggctgaggtaggagaatctcttggacccgggaggtggaggttgcagtgagccgaaatggtgccactgcactccagcctgggcaacagtgagactctgtctta

SEQ ID NO: 26488 - DNA, 356 bp, Homo sapiens
tttttttttgagactgagtctctctcttgcccaggctggagtgcaatggcactatctcggctcacctcagcctccgcttaccgggttcaagcgattctcctgcctcaacctcccgcgtagctgggattacaggcatgcgccaccatgctcggctaattttgtatttttagtagaggcggggtttctccctgttgttcaggctggtctccaactcctgacctcgggtgatccacccgcctcggcctcccaaagtgctgggattacaggcgtgagccaccgcccccggccaccagttcatttttcaagtaatcagcttaaccttcttgccagtcaggccagagccatttaattcagtt

SEQ ID NO: 26489 - DNA, 334 bp, Homo sapiens
acaggtacattttatttattttcaaaaatcacttgcagaaatttagctaatgaactagtaagcaagaaaagtttccttttcttaataaaagcaaaaatacattatttagtgaaaatagaccaaaaagtttcattaacctaaagattaaaaacatatttatttagtttgatagtttatcaaaagcagaagcaggattgtaggattagcataatgatttcctcatctgctgtttcatagttataaagattttgcttacaaaggaagaagtcagattgtccttgtttgcagatgatatgatgttatatatggaaaaacctgaagactctacaaaaaa

SEQ ID NO: 26490 - DNA, 340 bp, Homo sapiens
  misc_feature (97)..(97): n is a, c, g, or t
  misc_feature (102)..(102): n is a, c, g, or t
  misc_feature (113)..(113): n is a, c, g, or t
  misc_feature (124)..(124): n is a, c, g, or t
taatattttcactccatggttggttgaatctgtggatgtggaaactgcagatacaaaggggcctattgtacagggtctatagactttattattagancctcnggagcttatantacaagtaatnatctaatgtggtgataaggataatgctgggattacaggcgtgagccaccgtgcctggcccatatcagctttttaatatcctgcctctttcacgtggccaaatgcatgttttctacagatactgcattattttaaataactgcataatatttcattaaagggatttaccatatcacagtttacccattctcctattattagactttagctcatttcc

SEQ ID NO: 26491 - DNA, 734 bp, Homo sapiens
ggaaaaggcaaaaacgaatggctttttctgcgagaaactaggactaatatagatatttgggagcactgaacatggaggatagagttaaacttgaaaagacatacagagatagaaaagcagcaactgccctttcatttgtatgcaagcacacgatatatgtatgggttttttattttttgcttgatgtattcatttccaaatcaaactataatgtgctctaattgggtctctttgttcagcacgtggttgttgatttgagtactttctccagttgaaaaactgacattttaattttgttattcaatgtgtgatagatttaaataaaaacacccaagattgtgtattgtagatttccttcaacaataattatatataattattttatcaaaataaacaagttaaagtagttttagttattttgtctcattttacatttgggaaaaaaattacaaatcaggggccagagtctggtcatgtttgtcagtgaggaaagacaatttctgattgccagtcccaccaaagcgttggcagattaacacagcattgtagattactttcctaggaagagatgctccttttttctccctttccattattttgctttccttctttccatggtgcattgtccttttgttttcttccctcttatttcgatgcatgtataaacttgagcctttctgctctcacattctttctccccatgatcataattgtttcttcactttattcttaaa

SEQ ID NO: 26492 - DNA, 472 bp, Homo sapiens
agcttaaaccaaaagctattgggttaggaaaaaatgagttagggaaaatggattgggggaacgggttagggaaaaaaccacgagacaaacccaagtttttttggtcctgttttttttgtttgtttgtttgtttttgagacagggtcttgctctgttgcagtggcgcaatcatggttcactgcagctttgacttcctgggctcaagtgatcctcccacctcagcctcctgaatagctgggactacaggcatatgtcaccacacccagctcatttttaaaattatttttttagagatggggtcttgctatgctgtccagactggtctggaacaatgagttcaagcaatcctcacgacttagcttcccaaggtgctgggattacgggtgtgagccaccatgcctggccagtcctaaatgttatacattttgtggaactctctttaaggatagaaaaaaacattaggtatgaaaca

SEQ ID NO: 26493 - DNA, 386 bp, Homo sapiens
gggacaactggaatgctgacccaccccttatgatgacaaatggtggcttcatcttctcacataggtttctcctggaaccccagttactggcagctcttgactcatattgtcataacttgagacggaaaagaaatgattccctcttcaagtcttccttcctgcaaccatttattaatagaaaaatcccagggagagaacggtctgaatcaaacatgtgccaatcattattgagctgcactaactcccaagattgggcaagaagttgtaagcccttgtaccaattacttagccagggaggcccaggttatgatgacagctcacaacagaactcagggaatagaaagggaaaagtacttccaaaagaacagaaaatacattttctgaaa

SEQ ID NO: 26494 - DNA, 466 bp, Homo sapiens
gcaagcaaccttatgaggtaggtcttattagcaagctcatttaaataggaaggagccaagtagggcagaataggtatcttgcactaggtcacatatctaattagtgagcccatgctatgggactctaaggctttgttcttgtacagcctcccaggattatttattctgttttttttaagcttgtctttaggtgcaaattctcaagttcacctctttgcctcattaaattatcatttttaccttctgttttcatctcttttacctccttgaaaatccatctgtacttgtatttctaagaaaacagtaaactaattgaagctccagttactttagattttataatactttcttggctgggtgtggtggctcatgcttgtaatcacactttaggaggccagggtgggaggatagtttgaggccaccctggacaatatagtgagaccccatctcaattgaaaaaaaaaaa

SEQ ID NO: 26495 - DNA, 2193 bp, Homo sapiens
ggtggccgagcgggggaccgggaagcatggcccgggggtcggcggttgcctgggcggcgctcgggccgttgttgtggggctgcgcgctggggctgcagggcgggatgctgtacccccaggagagcccgtcgcgggagtgcaaggagctggacggcctctggagcttccgcgccgacttctctgacaaccgacgccggggcttcgaggagcagtggtaccggcggccgctgtgggagtcaggccccaccgtggacatgccagttccctccagcttcaatgacatcagccaggactggcgtctgcggcattttgtcggctgggtgtggtacgaacgggaggtgatcctgccggagcgatggacccaggacctgcgcacaagagtggtgctgaggattggcagtgcccattcctatgccatcgtgtgggtgaatggggtcgacacgctagagcatgaggggggctacctccccttcgaggccgacatcagcaacctggtccaggtggggcccctgccctcccggctccgaatcactatcgccatcaacaacacactcacccccaccaccctgccaccagggaccatccaatacctgactgacacctccaagtatcccaagggttactttgtccagaacacatattttgactttttcaactacgctggactgcagcggtctgtacttctgtacacgacacccaccacctacatcgatgacatcaccgtcaccaccagcgtggagcaagacagtgggctggtgaattaccagatctctgtcaagggcagtaacctgttcaagttggaagtgcgtcttttggatgcagaaaacaaagtcgtggcgaatgggactgggacccagggccaacttaaggtgccaggtgtcagcctctggtggccgtacctgatgcacgaacgccctgcctatctgtattcattggaggtgcagctgactgcacagacgtcactggggcctgtgtctgacttctacacactccctgtggggatccgcactgtggctgtcaccaagagccagttcctcatcaatgggaaacctttctatttccacggtgtcaacaagcatgaggatgcggacatccgagggaagggcttcgactggccgctgctggtgaaggacttcaacctgcttcgctggcttggtgccaacgctttccgtaccagccactacccctatgcagaggaagtgatgcagatgtgtgaccgctatgggattgtggtcatcgatgagtgtcccggcgtgggcctggcgctgccgcagttcttcaacaacgtttctctgcatcaccacatgcaggtgatggaagaagtggtgcgtagggacaagaaccaccccgcggtcgtgatgtggtctgtggccaacgagcctgcgtcccacctagaatctgctggctactacttgaagatggtgatcgctcacaccaaatccttggacccctcccggcctgtgacctttgtgagcaactctaactatgcagcagacaagggggctccgtatgtggatgtgatctgtttgaacagctactactcttggtatcacgactacgggcacctggagttgattcagctgcagctggccacccagtttgagaactggtataagaagtatcagaagcccattattcagagcgagtatggagcagaaacgattgcagggtttcaccaggatccacctctgatgttcactgaagagtaccagaaaagtctgctagagcagtaccatctgggtctggatcaaaaacgcagaaaatacgtggttggagagctcatttggaattttgccgatttcatgactgaacagtcaccgacgagagtgctggggaataaaaaggggatcttcactcggcagagacaaccaaaaagtgcagcgttccttttgcgagagagatactggaagattgccaatgaaaccaggtatccccactcagtagccaagtcacaatgtttggaaaacagcccgtttacttgagcaagactgataccacctgcgtgtcccttcctccccgagtcagggcgacttccacagcagcagaacaagtgcctcctggactgttcacggcagaccagaacgtttctggcctgggttttgtggtcatctattctagcagggaacactaaaggtggaaataaaagattttctattatggaaataaagagttggcatgaaagtggctactgaa

SEQ ID NO: 26496 - DNA, 495 bp, Homo sapiens
  misc_feature (86)..(86): n is a, c, g, or t
  misc_feature (298)..(298): n is a, c, g, or t
  misc_feature (301)..(301): n is a, c, g, or t
ttcatgtacagacctttcatcccttcttgaaaatgccaaacaatatactaactcagagtcatcaccttcccctaggcatgaagggnctcgacatgattcatgtcgagggttcctccccgagtcagggcgacttccacagcagcagaacaagtgcctcctggactgttcacggcagaccagaacgtttctggcctgggttttgtggtcatctattctagcagggaacactaaaggtggaaataaaagattttctattatggaaataaagagttggcatgaaagtggctactgaacactnganatgaatcatatcgagtgctttcatgccgggaaggcgacagtgcctaagacagaaattcgggaaaaactagccaaaatgtacaagaccacaccggatgtcatctttgtatttggattcagaactcattttggtggtgcagacaactggctgtggcatgaagccctcgacataagggatcctctagatcgtctcag

SEQ ID NO: 26497 - DNA, 529 bp, Homo sapiens
  misc_feature (97)..(97): n is a, c, g, or t
ttcatgtcagtgcttcatcccccacaacctcatggttcctagtcagattcgttaaccactgcgccacgagggaactcccttcttgggcatgaagggnctcgacatgattcatgtcgagggttcctccccgagtcagggcgacttccacagcagcagaacaagtgcctcctggactgttcacggcagaccagaacgtttctggcctgggttttgtggtcatctattctagcagggaacactaaaggtggaaataaaagattttctattatggaaataaagagttggcatgaaagtggctactgaacgctcgacatgattcatgtcgagggctttcatccctacttgtggatcattcccaatattggggaaaaactttagaaatccaagataaaggagggggttgacgtaggaagttatctaagttgcaaaaagggaagttaacagagtctctgcacaattcagaagaaggagagttagaagaaacatttgtcatgcaaggctacctacatatggcatgaaggccctcgat

SEQ ID NO: 26498 - DNA, 473 bp, Homo sapiens
  misc_feature (242)..(242): n is a, c, g, or t
ttcatatccagtgcttcatgccatgattataagtttcccgagactttcccagccatgtagaactgtgagtcaattaaacctcttttctttacaaatcacccagtctgggtatctcttcatagcagcatgagaacggactaacacagcaaccatattcagaatgcatggaagggggctaagattctggaggtggggaaatcagaagattgatgcaagtgtcccagcagaagggcatgaagggnctcgacatgattcatgtcgagggttcctccccgagtcagggcgacttccacagcagcagaacaagtgcctcctggactgttcacggcagaccagaacgtttctggcctgggttttgtggtcatctattctagcagggaacactaaaggtggaaataaaagattttctattatggaaataaagagttggcatgaaagtggctactgaaaagtggctactgaaaagcatctga

SEQ ID NO: 26499 - DNA, 230 bp, Homo sapiens
gaggtgacgctagcagtttacttcatgtcagcccttcatgcccgtattcctccccgagtcagggcgacttccacagcagcagaacaagtgcctcctggactgttcacggcagaccagaacgtttctggcctgggttttgtggtcatctattctagcagggaacactaaaggtggaaataaaagattttctattatggaaataaagagttggcatgaaagtggctactgaa

SEQ ID NO: 26500 - DNA, 365 bp, Homo sapiens
tcggcctcccaaagtgctgggattacaggtgtgaaccatcgtgcctggccccgtgttgtgttctggcggtggaagatgggacagagaggatgggagggtgtctgagccattcctggactgatggaacctgtttcttctgccttttgtggacaggatggtgatcgctcacaccaaatccttggacccctcccggcctgtgacctttgtgagcaactctaactatgcagcagacaagggggtgagcctgggggtccccaccccacttctccctgcctttgcctgggcttgtcctgaagcctggtcatgggaacagccaggaagaaccatgcgctgccagtctgggtgacagcaagaccccgtctcta

SEQ ID NO: 26501 - DNA, 1524 bp, Homo sapiens
gggtttccccggaaacggtaggccattgttcggaatcgagctcggtccggtaagcattccaagcgcgcgaagaaacacagtggctggtgaattaccagatctctgtcaagggcagtaacctgttcaagttggaagtgcgtcttttggatgcagaaaacaaagtcgtggcgaatgggactgggacccagggccaacttaaggtgccaggtgtcagcctctggtggccgtacctgatgcacgaacgccctgcctatctgtattcattggaggtgcagctgactgcacagacgtcactggggcctgtgtctgacttctacacactccctgtggggatccgcactgtggctgtcaccaagagccagttcctcatcaatgggaaacctttctatttccacggtgtcaacaagcatgaggatgcggacatccgagggaagggcttcgactggccgctgctggtgaaggacttcaacctgcttcgctggcttggtgccaacgctttccgtaccagccactacccctatgcagaggaagtgatgcagatgtgtgaccgctatgggattgtggtcatcgatgagtgtcccggcgtgggcctggcgctgccgcagttcttcaacaacgtttctctgcatcaccacatgcaggtgatggaagaagtggtgcgtagggacaagaaccaccccgcggtcgtgatgtggtctgtggccaacgagcctgcgtcccacctagaatctgctggctactacttgaagatggtgatcgctcacaccaaatccttggacccctcccggcctgtgacctttgtgagcaactctaactatgcagcagacaagggggctccgtatgtggatgtgatctgtttgaacagctactactcttggtatcacgactacgggcacctggagttgattcagctgcagctggccacccagtttgagaactggtataagaagtatcagaagcccattattcagagcgagtatggagcagaaacgattgcagggtttcaccaggatccacctctgatgttcactgaagagtaccagaaaagtctgctagagcagtaccatctgggtctggatcaaaaacgcagaaaatacgtggttggagagctcatttggaattttgccgatttcatgactgaacagtcaccgacgagagtgctggggaataaaaaggggatcttcactcggcagagacaaccaaaaagtgcagcgttccttttgcgagagagatactggaagattgccaatgaaaccaggtatccccactcagtagccaagtcacaatgtttggaaaacagcccgtttacttgagcaagactgataccacctgcgtgtcccttcctccccgagtcagggcgacttccacagcagcagaacaagtgcctcctggactgttcacggcagaccagaacgtttctggcctgggttttgtggtcatctattctagcagggaacactaaaggtggaaataaaagattttctattatggaaataaagagttggcatgaaagtggctactgaa

SEQ ID NO: 26502 - DNA, 2407 bp, Homo sapiens
ggtggccgagcgggggaccgggaagcatggcccgggggtcggcggttgcctgggcggcgctcgggccgttgttgtggggctgcgcgctggggctgcagggcgggatgctgtacccccaggagagcccgtcgcgggagtgcaaggagctggacggcctctggagcttccgcgccgacttctctgacaaccgacgccggggcttcgaggagcagtggtaccggcggccgctgtgggagtcaggccccaccgtggacatgccagttccctccagcttcaatgacatcagccaggactggcgtctgcggcattttgtcggctgggtgtggtacgaacgggaggtgatcctgccggagcgatggacccaggacctgcgcacaagagtggtgctgaggattggcagtgcccattcctatgccatcgtgtgggtgaatggggtcgacacgctagagcatgaggggggctacctccccttcgaggccgacatcagcaacctggtccaggtggggcccctgccctcccggctccgaatcactatcgccatcaacaacacactcacccccaccaccctgccaccagggaccatccaatacctgactgacacctccaagtatcccaagggttactttgtccagaacacatattttgactttttcaactacgctggactgcagcggtctgtacttctgtacacgacacccaccacctacatcgatgacatcaccgtcaccaccagcgtggagcaagacagtgggctggtgaattaccagatctctgtcaagggcagtaacctgttcaagttggaagtgcgtcttttggatgcagaaaacaaagtcgtggcgaatgggactgggacccagggccaacttaaggtgccaggtgtcagcctctggtggccgtacctgatgcacgaacgccctgcctatctgtattcattggaggtgcagctgactgcacagacgtcactggggcctgtgtctgacttctacacactccctgtggggatccgcactgtggctgtcaccaagagccagttcctcatcaatgggaaacctttctatttccacggtgtcaacaagcatgaggatgcggacgtgtgttggggctcctgggtccttgtgggggctgcttctggtcaccctccactttcgccttccctgtgtcctgcagttgagggcagctcagggcaatgaggcaaatggctccaaatggagagggggctcatggggtggctctccagggtcctggctctcagaggaagtgcagcttcgacagggacaggggtcacttggctctgctatctcctagatccgagggaagggcttcgactggccgctgctggtgaaggacttcaacctgcttcgctggcttggtgccaacgctttccgtaccagccactacccctatgcagaggaagtgatgcagatgtgtgaccgctatgggattgtggtcatcgatgagtgtcccggcgtgggcctggcgctgccgcagttcttcaacaacgtttctctgcatcaccacatgcaggtgatggaagaagtggtgcgtagggacaagaaccaccccgcggtcgtgatgtggtctgtggccaacgagcctgcgtcccacctagaatctgctggctactacttgaagatggtgatcgctcacaccaaatccttggacccctcccggcctgtgacctttgtgagcaactctaactatgcagcagacaagggggctccgtatgtggatgtgatctgtttgaacagctactactcttggtatcacgactacgggcacctggagttgattcagctgcagctggccacccagtttgagaactggtataagaagtatcagaagcccattattcagagcgagtatggagcagaaacgattgcagggtttcaccaggatccacctctgatgttcactgaagagtaccagaaaagtctgctagagcagtaccatctgggtctggatcaaaaacgcagaaaatacgtggttggagagctcatttggaattttgccgatttcatgactgaacagtcaccgacgagagtgctggggaataaaaaggggatcttcactcggcagagacaaccaaaaagtgcagcgttccttttgcgagagagatactggaagattgccaatgaaaccaggtatccccactcagtagccaagtcacaatgtttggaaaacagcccgtttacttgagcaagactgataccacctgcgtgtcccttcctccccgagtcagggcgacttccacagcagcagaacaagtgcctcctggactgttcacggcagaccagaacgtttctggcctgggttttgtggtcatctattctagcagggaacactaaaggtggaaataaaagattttctattatggaaataaagagttggcatgaaagtggctactgaa

SEQ ID NO: 26503 - DNA, 1119 bp, Homo sapiens
gtacaaaacacaaacaaaaaacaacaaacaaacaaaaaccaaaacaaaaaacccacgcgtacgacctgcttcgctggcttggtgccaacgctttccgtaccagccactacccctatgcagaggaagtgatgcagatgtgtgaccgctatgggattgtggtcatcgatgagtgtcccggcgtgggcctggcgctgccgcagttcttcaacaacgtttctctgcatcaccacatgcaggtgatggaagaagtggtgcgtagggacaagaaccaccccgcggtcgtgatgtggtctgtggccaacgagcctgcgtcccacctagaatctgctggctactacttgaagatggtgatcgctcacaccaaatccttggacccctcccggcctgtgacctttgtgagcaactctaactatgcagcagacaagggggctccgtatgtggatgtgatctgtttgaacagctactactcttggtatcacgactacgggcacctggagttgattcagctgcagctggccacccagtttgagaactggtataagaagtatcagaagcccattattcagagcgagtatggagcagaaacgattgcagggtttcaccaggatccacctctgatgttcactgaagagtaccagaaaagtctgctagagcagtaccatctgggtctggatcaaaaacgcagaaaatacgtggttggagagctcatttggaattttgccgatttcatgactgaacagtcaccgacgagagtgctggggaataaaaaggggatcttcactcggcagagacaaccaaaaagtgcagcgttccttttgcgagagagatactggaagattgccaatgaaaccaggtatccccactcagtagccaagtcacaatgtttggaaaacagcccgtttacttgagcaagactgataccacctgcgtgtcccttcctccccgagtcagggcgacttccacagcagcagaacaagtgcctcctggactgttcacggcagaccagaacgtttctggcctgggttttgtggtcatctattctagcagggaacactaaaggtggaaataaaagattttctattatggaaataaagagttggcatgaaagtggctactgaa

SEQ ID NO: 26504 - DNA, 2491 bp, Homo sapiens
ggtggccgagcgggggaccgggaagcatggcccgggggtcggcggttgcctgggcggcgctcgggccgttgttgtggggctgcgcgctggggctgcagggcgggatgctgtacccccaggagagcccgtcgcgggagtgcaaggagctggacggcctctggagcttccgcgccgacttctctgacaaccgacgccggggcttcgaggagcagtggtaccggcggccgctgtgggagtcaggccccaccgtggacatgccagttccctccagcttcaatgacatcagccaggactggcgtctgcggcattttgtcggctgggtgtggtacgaacgggaggtgatcctgccggagcgatggacccaggacctgcgcacaagagtggtgctgaggattggcagtgcccattcctatgccatcgtgtgggtgaatggggtcgacacgctagagcatgaggggggctacctccccttcgaggccgacatcagcaacctggtccaggtggggcccctgccctcccggctccgaatcactatcgccatcaacaacacactcacccccaccaccctgccaccagggaccatccaatacctgactgacacctccaagtatcccaagggttactttgtccagaacacatattttgactttttcaactacgctggactgcagcggtctgtacttctgtacacgacacccaccacctacatcgatgacatcaccgtcaccaccagcgtggagcaagacagtgggctggtgaattaccagatctctgtcaagggcagtaacctgttcaagttggaagtgcgtcttttggatgcagaaaacaaagtcgtggcgaatgggactgggacccagggccaacttaaggtgccaggtgtcagcctctggtggccgtacctgatgcacgaacgccctgcctatctgtattcattggaggtgcagctgactgcacagacgtcactggggcctgtgtctgacttctacacactccctgtggggatccgcactgtggctgtcaccaagagccagttcctcatcaatgggaaacctttctatttccacggtgtcaacaagcatgaggatgcggacgtgtgttggggctcctgggtccttgtgggggctgcttctggtcaccctccactttcgccttccctgtgtcctgcagttgagggcagctcagggcaatgaggcaaatggctccaaatggagagggggctcatggggtggctctccagggtcctggctctcagaggaagtgcagcttcgacagggacaggggtcacttggctctgctatctcctagatccgagggaagggcttcgactggccgctgctggtgaaggacttcaacctgcttcgctggcttggtgccaacgctttccgtaccagccactacccctatgcagaggaagtgatgcagatgtgtgaccgctatgggattgtggtcatcgatgagtgtcccggcgtgggcctggcgctgccgtgagtctctgctgtgcacctgctccgcctgcccagcccgggggcgtcaccgtgaccctctgtcccttccctcctggcccgcaggcagttcttcaacaacgtttctctgcatcaccacatgcaggtgatggaagaagtggtgcgtagggacaagaaccaccccgcggtcgtgatgtggtctgtggccaacgagcctgcgtcccacctagaatctgctggctactacttgaagatggtgatcgctcacaccaaatccttggacccctcccggcctgtgacctttgtgagcaactctaactatgcagcagacaagggggctccgtatgtggatgtgatctgtttgaacagctactactcttggtatcacgactacgggcacctggagttgattcagctgcagctggccacccagtttgagaactggtataagaagtatcagaagcccattattcagagcgagtatggagcagaaacgattgcagggtttcaccaggatccacctctgatgttcactgaagagtaccagaaaagtctgctagagcagtaccatctgggtctggatcaaaaacgcagaaaatacgtggttggagagctcatttggaattttgccgatttcatgactgaacagtcaccgacgagagtgctggggaataaaaaggggatcttcactcggcagagacaaccaaaaagtgcagcgttccttttgcgagagagatactggaagattgccaatgaaaccaggtatccccactcagtagccaagtcacaatgtttggaaaacagcccgtttacttgagcaagactgataccacctgcgtgtcccttcctccccgagtcagggcgacttccacagcagcagaacaagtgcctcctggactgttcacggcagaccagaacgtttctggcctgggttttgtggtcatctattctagcagggaacactaaaggtggaaataaaagattttctattatggaaataaagagttggcatgaaagtggctactgaa

SEQ ID NO: 26505 - DNA, 818 bp, Homo sapiens
gtgaccaagcagatcgttttggggtagccacttaacaagtatcgtgttaagtggctaccccaaatccttggacccctcccggcctgtgacctttgtgagcaactctaactatgcagcagacaagggggctccgtatgtggatgtgatctgtttgaacagctactactcttggtatcacgactacgggcacctggagttgattcagctgcagctggccacccagtttgagaactggtataagaagtatcagaagcccattattcagagcgagtatggagcagaaacgattgcagggtttcaccaggatccacctctgatgttcactgaagagtaccagaaaagtctgctagagcagtaccatctgggtctggatcaaaaacgcagaaaatacgtggttggagagctcatttggaattttgccgatttcatgactgaacagtcaccgacgagagtgctggggaataaaaaggggatcttcactcggcagagacaaccaaaaagtgcagcgttccttttgcgagagagatactggaagattgccaatgaaaccaggtatccccactcagtagccaagtcacaatgtttggaaaacagcccgtttacttgagcaagactgataccacctgcgtgtcccttcctccccgagtcagggcgacttccacagcagcagaacaagtgcctcctggactgttcacggcagaccagaacgtttctggcctgggttttgtggtcatctattctagcagggaacactaaaggtggaaataaaagattttctattatggaaataaagagttggcatgaaagtggctactgaa

SEQ ID NO: 26506 - DNA, 2192 bp, Homo sapiens
ggtggccgagcgggggaccgggaagcatggcccgggggtcggcggttgcctgggcggcgctcgggccgttgttgtggggctgcgcgctggggctgcagggcgggatgctgtacccccaggagagcccgtcgcgggagtgcaaggagctggacggcctctggagcttccgcgccgacttctctgacaaccgacgccggggcttcgaggagcagtggtaccggcggccgctgtgggagtcaggccccaccgtggacatgccagttccctccagcttcaatgacatcagccaggactggcgtctgcggcattttgtcggctgggtgtggtacgaacgggaggtgatcctgccggagcgatggacccaggacctgcgcacaagagtggtgctgaggattggcagtgcccattcctatgccatcgtgtgggtgaatggggtcgacacgctagagcatgaggggggctacctccccttcgaggccgacatcagcaacctggtccaggtggggcccctgccctcccggctccgaatcactatcgccatcaacaacacactcacccccaccaccctgccaccagggaccatccaatacctgactgacacctccaagtatcccaagggttactttgtccagaacacatattttgactttttcaactacgctggactgcagcggtctgtacttctgtacacgacacccaccacctacatcgatgacatcaccgtcaccaccagcgtggagcaagacagtgggctggtgaattaccagatctctgtcaagggcagtaacctgttcaagttggaagtgcgtcttttggatgcagaaaacaaagtcgtggcgaatgggactgggacccagggccaacttaaggtgccaggtgtcagcctctggtggccgtacctgatgcacgaacgccctgcctatctgtattcattggaggtgcagctgactgcacagacgtcactggggcctgtgtctgacttctacacactccctgtggggatccgcactgtggctgtcaccaagagccagttcctcatcaatgggaaacctttctatttccacggtgtcaacaagcatgaggatgcggacatccgagggaagggcttcgactggccgctgctggtgaaggacttcaacctgcttcgctggcttggtgccaacgctttccgtaccagccactacccctatgcagaggaagtgatgcagatgtgtgaccgctatgggattgtggtcatcgatgagtgtcccggcgtgggcctggcgctgccgtgagtctctgctgtgcacctgctccgcctgcccagcccgggggcgtcaccgtgaccctctgtcccttccctcctggcccgcaggcagttcttcaacaacgtttctctgcatcaccacatgcaggtgatggaagaagtggtgcgtagggacaagaaccaccccgcggtcgtgatgtggtctgtggccaacgagcctgcgtcccacctagaatctgctggctactacttgaagctccgtatgtggatgtgatctgtttgaacagctactactcttggtatcacgactacgggcacctggagttgattcagctgcagctggccacccagtttgagaactggtataagaagtatcagaagcccattattcagagcgagtatggagcagaaacgattgcagggtttcaccaggatccacctctgatgttcactgaagagtaccagaaaagtctgctagagcagtaccatctgggtctggatcaaaaacgcagaaaatacgtggttggagagctcatttggaattttgccgatttcatgactgaacagtcaccgacgagagtgctggggaataaaaaggggatcttcactcggcagagacaaccaaaaagtgcagcgttccttttgcgagagagatactggaagattgccaatgaaaccaggtatccccactcagtagccaagtcacaatgtttggaaaacagcccgtttacttgagcaagactgataccacctgcgtgtcccttcctccccgagtcagggcgacttccacagcagcagaacaagtgcctcctggactgttcacggcagaccagaacgtttctggcctgggttttgtggtcatctattctagcagggaacactaaaggtggaaataaaagattttctattatggaaataaagagttggcatgaaagtggctactgaa

SEQ ID NO: 26507 - DNA, 2571 bp, Homo sapiens
  misc_feature (2274)..(2275): n is a, c, g, or t
ggtggccgagcgggggaccgggaagcatggcccgggggtcggcggttgcctgggcggcgctcgggccgttgttgtggggctgcgcgctggggctgcagggcgggatgctgtacccccaggagagcccgtcgcgggagtgcaaggagctggacggcctctggagcttccgcgccgacttctctgacaaccgacgccggggcttcgaggagcagtggtaccggcggccgctgtgggagtcaggccccaccgtggacatgccagttccctccagcttcaatgacatcagccaggactggcgtctgcggcattttgtcggctgggtgtggtacgaacgggaggtgatcctgccggagcgatggacccaggacctgcgcacaagagtggtgctgaggattggcagtgcccattcctatgccatcgtgtgggtgaatggggtcgacacgctagagcatgaggggggctacctccccttcgaggccgacatcagcaacctggtccaggtggggcccctgccctcccggctccgaatcactatcgccatcaacaacacactcacccccaccaccctgccaccagggaccatccaatacctgactgacacctccaagtatcccaagggttactttgtccagaacacatattttgactttttcaactacgctggactgcagcggtctgtacttctgtacacgacacccaccacctacatcgatgacatcaccgtcaccaccagcgtggagcaagacagtgggctggtgaattaccagatctctgtcaagggcagtaacctgttcaagttggaagtgcgtcttttggatgcagaaaacaaagtcgtggcgaatgggactgggacccagggccaacttaaggtgccaggtgtcagcctctggtggccgtacctgatgcacgaacgccctgcctatctgtattcattggaggtgcagctgactgcacagacgtcactggggcctgtgtctgacttctacacactccctgtggggatccgcactgtggctgtcaccaagagccagttcctcatcaatgggaaacctttctatttccacggtgtcaacaagcatgaggatgcggacatccgagggaagggcttcgactggccgctgctggtgaaggacttcaacctgcttcgctggcttggtgccaacgctttccgtaccagccactacccctatgcagaggaagtgatgcagatgtgtgaccgctatgggattgtggtcatcgatgagtgtcccggcgtgggcctggcgctgccgcagttcttcaacaacgtttctctgcatcaccacatgcaggtgatggaagaagtggtgcgtagggacaagaaccaccccgcggtcgtgatgtggtctgtggccaacgagcctgcgtcccacctagaatctgctggctactacttgaagatggtgatcgctcacaccaaatccttggacccctcccggcctgtgacctttgtgagcaactctaactatgcagcagacaagggggctccgtatgtggatgtgatctgtttgaacagctactactcttggtatcacgactacgggcacctggagttgattcagctgcagctggccacccagtttgagaactggtataagaagtatcagaagcccattattcagagcgagtatggagcagaaacgattgcagggtttcaccaggatccacctctgatgttcactgaagagtaccagaaaagtctgctagagcagtaccatctgggtctggatcaaaaacgcagaaaatacgtggttggagagctcatttggaattttgccgatttcatgactgaacagtcaccgacgagagtgctggggaataaaaaggggatcttcactcggcagagacaaccaaaaagtgcagcgttccttttgcgagagagatactggaagattgccaatgaaaccaggtatccccactcagtagccaagtcacaatgtttggaaaacagcccgtttacttgagcaagactgataccacctgcgtgtcccttcctccccgagtcagggcgacttccacagcagcagaacaagtgcctcctggactgttcacggcagaccagaacgtttctggcctgggttttgtggtcatctattctagcagggaacactaaaggtggaaataaaagattttctattatggaaataaagagttggcatgaaagtggctactgaaaaaaaaaaaaaaaaaaaaaaaaaaaaaaaaaaaaaaaaaaaaaaaacaaaaaaaaaaaaaaaaaaaaaaaaaaaaaaaaannccctttgggggccttttggcccaattcttttttaatttgagcaatgtttttcttggggcccgaatttggcctatttgggcaatttgcccttatggggggtcgtttaaaaattaatggcccgggttttaacaaacgggatatggaaaaaccctgggggttcccaatttaattccttttggaaaaatccccttttcgccgttgtggataaaagaaaaagggcccgccccatatcgcttttccaaaaatttccccaccttaatgggaaaggggaaaatttgagcggtaatttttttgaa

SEQ ID NO: 26508 - DNA, 2247 bp, Homo sapiens
ggtggccgagcgggggaccgggaagcatggcccgggggtcggcggttgcctgggcggcgctcgggccgttgttgtggggctgcgcgctggggctgcagggcgggatgctgtacccccaggagagcccgtcgcgggagtgcaaggagctggacggcctctggagcttccgcgccgacttctctgacaaccgacgccggggcttcgaggagcagtggtaccggcggccgctgtgggagtcaggccccaccgtggacatgccagttccctccagcttcaatgacatcagccaggactggcgtctgcggcattttgtcggctgggtgtggtacgaacgggaggtgatcctgccggagcgatggacccaggacctgcgcacaagagtggtgctgaggattggcagtgcccattcctatgccatcgtgtgggtgaatggggtcgacacgctagagcatgaggggggctacctccccttcgaggccgacatcagcaacctggtccaggtggggcccctgccctcccggctccgaatcactatcgccatcaacaacacactcacccccaccaccctgccaccagggaccatccaatacctgactgacacctccaagtatcccaagggttactttgtccagaacacatattttgactttttcaactacgctggactgcagcggtctgtacttctgtacacgacacccaccacctacatcgatgacatcaccgtcaccaccagcgtggagcaagacagtgggctggtgaattaccagatctctgtcaagggcagtaacctgttcaagttggaagtgcgtcttttggatgcagaaaacaaagtcgtggcgaatgggactgggacccagggccaacttaaggtgccaggtgtcagcctctggtggccgtacctgatgcacgaacgccctgcctatctgtattcattggaggtgcagctgactgcacagacgtcactggggcctgtgtctgacttctacacactccctgtggggatccgcactgtggctgtcaccaagagccagttcctcatcaatgggaaacctttctatttccacggtgtcaacaagcatgaggatgcggacatccgagggaagggcttcgactggccgctgctggtgaaggacttcaacctgcttcgctggcttggtgccaacgctttccgtaccagccactacccctatgcagaggaagtgatgcagatgtgtgaccgctatgggattgtggtcatcgatgagtgtcccggcgtgggcctggcgctgccgcagttcttcaacaacgtttctctgcatcaccacatgcaggtgatggaagaagtggtgcgtagggacaagaaccaccccgcggtcgtgatgtggtctgtggccaacgagcctgcgtcccacctagaatctgctggctactacttgaagatggtgatcgctcacaccaaatccttggacccctcccggcctgtgacctttgtgagcaactctaactatgcagcagacaagggggctccgtatgtggatgtgatctgtttgaacagctactactcttggtatcacgactacgggcacctggagttgattcagctgcagctggccacccagtttgagaactggtataagaagtatcagaagcccattattcagagcgagtatggagcagaaacgattgcagggtttcaccaggatccacctctgatgttcactgaagagtaccagaaaagtctgctagagcagtaccatctgggtctggatcaaaaacgcagaaaatacgtggttggagagctcatttggaattttgccgatttcatgactgaacagtcaccgacgagagtgctggggaataaaaaggggatcttcactcggcagagacaaccaaaaagtgcagcgttccttttgcgagagagatactggaagattgccaatgaaaccaggtatccccactcagtagccaagtcacaatgtttggaaaacagcccgtttacttgagcaagactgataccacctgcgtgtcccttcctccccgagtcagggcgacttccacagcagcagaacaagtgcctcctggactgttcacggcagaccagaacgtttctggcctgggttttgtggtcatctattctagcagggaacactaaaggtggaaataaaagattttctattatggaaataaagagttggcatgaaagtggctactgaaagatgcggccgactcccccctccctcccccccacccgcgccgcccacatcaccc

SEQ ID NO: 26509 - DNA, 2263 bp, Homo sapiens
ggtggccgagcgggggaccgggaagcatggcccgggggtcggcggttgcctgggcggcgctcgggccgttgttgtggggctgcgcgctggggctgcagggcgggatgctgtacccccaggagagcccgtcgcgggagtgcaaggagctggacggcctctggagcttccgcgccgacttctctgacaaccgacgccggggcttcgaggagcagtggtaccggcggccgctgtgggagtcaggccccaccgtggacatgccagttccctccagcttcaatgacatcagccaggactggcgtctgcggcattttgtcggctgggtgtggtacgaacgggaggtgatcctgccggagcgatggacccaggacctgcgcacaagagtggtgctgaggattggcagtgcccattcctatgccatcgtgtgggtgaatggggtcgacacgctagagcatgaggggggctacctccccttcgaggccgacatcagcaacctggtccaggtggggcccctgccctcccggctccgaatcactatcgccatcaacaacacactcacccccaccaccctgccaccagggaccatccaatacctgactgacacctccaagtatcccaagggttactttgtccagaacacatattttgactttttcaactacgctggactgcagcggtctgtacttctgtacacgacacccaccacctacatcgatgacatcaccgtcaccaccagcgtggagcaagacagtgggctggtgaattaccagatctctgtcaagggcagtaacctgttcaagttggaagtgcgtcttttggatgcagaaaacaaagtcgtggcgaatgggactgggacccagggccaacttaaggtgccaggtgtcagcctctggtggccgtacctgatgcacgaacgccctgcctatctgtattcattggaggtgcagctgactgcacagacgtcactggggcctgtgtctgacttctacacactccctgtggggatccgcactgtggctgtcaccaagagccagttcctcatcaatgggaaacctttctatttccacggtgtcaacaagcatgaggatgcggacatccgagggaagggcttcgactggccgctgctggtgaaggacttcaacctgcttcgctggcttggtgccaacgctttccgtaccagccactacccctatgcagaggaagtgatgcagatgtgtgaccgctatgggattgtggtcatcgatgagtgtcccggcgtgggcctggcgctgccgcagttcttcaacaacgtttctctgcatcaccacatgcaggtgatggaagaagtggtgcgtagggacaagaaccaccccgcggtcgtgatgtggtctgtggccaacgagcctgcgtcccacctagaatctgctggctactacttgaagatggtgatcgctcacaccaaatccttggacccctcccggcctgtgacctttgtgagcaactctaactatgcagcagacaagggggctccgtatgtggatgtgatctgtttgaacagctactactcttggtatcacgactacgggcacctggagttgattcagctgcagctggccacccagtttgagaactggtataagaagtatcagaagcccattattcagagcgagtatggagcagaaacgattgcagggtttcaccaggatccacctctgatgttcactgaagagtaccagaaaagtctgctagagcagtaccatctgggtctggatcaaaaacgcagaaaatacgtggttggagagctcatttggaattttgccgatttcatgactgaacagtcaccgacgagagtgctggggaataaaaaggggatcttcactcggcagagacaaccaaaaagtgcagcgttccttttgcgagagagatactggaagattgccaatgaaaccaggtatccccactcagtagccaagtcacaatgtttggaaaacagcccgtttacttgagcaagactgataccacctgcgtgtcccttcctccccgagtcagggcgacttccacagcagcagaacaagtgcctcctggactgttcacggcagaccagaacgtttctggcctgggttttgtggtcatctattctagcagggaacactaaaggtggaaataaaagattttctattatggaaataaagagttggcatgaaagtggctactgaaagggcggtgacaccggtcatggacgtgagctcatcacgacgctctcacattcgactaatataagccagca

SEQ ID NO: 26510 - DNA, 1855 bp, Homo sapiens
ggtggccgagcgggggaccgggaagcatggcccgggggtcggcggttgcctgggcggcgctcgggccgttgttgtggggctgcgcgctggggctgcagggcgggatgctgtacccccaggagagcccgtcgcgggagtgcaaggagctggacggcctctggagcttccgcgccgacttctctgacaaccgacgccggggcttcgaggagcagtggtaccggcggccgctgtgggagtcaggccccaccgtggacatgccagttccctccagcttcaatgacatcagccaggactggcgtctgcggcattttgtcggctgggtgtggtacgaacgggaggtgatcctgccggagcgatggacccaggacctgcgcacaagagtggtgctgaggattggcagtgcccattcctatgccatcgtgtgggtgaatggggtcgacacgctagagcatgaggggggctacctccccttcgaggccgacatcagcaacctggtccaggtggggcccctgccctcccggctccgaatcactatcgccatcaacaacacactcacccccaccaccctgccaccagggaccatccaatacctgactgacacctccaagtatcccaagggttactttgtccagaacacatattttgactttttcaactacgctggactgcagcggtctgtacttctgtacacgacacccaccacctacatcgatgacatcaccgtcaccaccagcgtggagcaagacagtgggctggtgaattaccagatctctgtcaagggcagtaacctgttcaagttggaagtgcgtcttttggatgcagaaaacaaagtcgtggcgaatgggactgggacccagggccaacttaaggtgccaggtgtcagcctctggtggccgtacctgatgcacgaacgccctgcctatctgtattcattggaggtgcagctgactgcacagacgtcactggggcctgtgtctgacttctacacactccctgtggggatccgcactgtggctgtcaccaagagccagttcctcatcaatgggaaacctttctatttccacggtgtcaacaagcatgaggatgcggacatccgagggaagggcttcgactggccgctgctggtgaaggacttcaacctgcttcgctggcttggtgccaacgctttccgtaccagccactacccctatgcagaggaagtgatgcagatgtgtgaccgctatgggattgtggtcatcgatgagtgtcccggcgtgggcctggcgctgccgcagttcttcaacaacgtttctctgcatcaccacatgcaggtgatggaagaagtggtgcgtagggacaagaaccaccccgcggtcgtgatgtggtctgtggccaacgagcctgcgtcccacctagaatctgctggctactacttgaagatggtgatcgctcacaccaaatccttggacccctcccggcctgtgacctttgtgagcaactctaactatgcagcagacaagggggctccgtatgtggatgtgatctgtttgaacagctactactcttggtatcacgactacgggcacctggagttgattcagctgcagctggccacccagtttgagaactggtataagaagtatcagaagcccattattcagagcgagtatggagcagaaacgattgcagggtttcaccaggatccacctctgatgttcactgaagagtaccagaaaagtctgctagagcagtaccatctgggtctggatcaaaaacgattgcagggtttcaccaggatccacctctgatgttcactgaagagtaccagaaaagtctgctagagcagtaccatctgcgtttatgatccagacccaga

SEQ ID NO: 26511 - DNA, 1895 bp, Homo sapiens
ggtggccgagcgggggaccgggaagcatggcccgggggtcggcggttgcctgggcggcgctcgggccgttgttgtggggctgcgcgctggggctgcagggcgggatgctgtacccccaggagagcccgtcgcgggagtgcaaggagctggacggcctctggagcttccgcgccgacttctctgacaaccgacgccggggcttcgaggagcagtggtaccggcggccgctgtgggagtcaggccccaccgtggacatgccagttccctccagcttcaatgacatcagccaggactggcgtctgcggcattttgtcggctgggtgtggtacgaacgggaggtgatcctgccggagcgatggacccaggacctgcgcacaagagtggtgctgaggattggcagtgcccattcctatgccatcgtgtgggtgaatggggtcgacacgctagagcatgaggggggctacctccccttcgaggccgacatcagcaacctggtccaggtggggcccctgccctcccggctccgaatcactatcgccatcaacaacacactcacccccaccaccctgccaccagggaccatccaatacctgactgacacctccaagtatcccaagggttactttgtccagaacacatattttgactttttcaactacgctggactgcagcggtctgtacttctgtacacgacacccaccacctacatcgatgacatcaccgtcaccaccagcgtggagcaagacagtgggctggtgaattaccagatctctgtcaagggcagtaacctgttcaagttggaagtgcgtcttttggatgcagaaaacaaagtcgtggcgaatgggactgggacccagggccaacttaaggtgccaggtgtcagcctctggtggccgtacctgatgcacgaacgccctgcctatctgtattcattggaggtgcagctgactgcacagacgtcactggggcctgtgtctgacttctacacactccctgtggggatccgcactgtggctgtcaccaagagccagttcctcatcaatgggaaacctttctatttccacggtgtcaacaagcatgaggatgcggacatccgagggaagggcttcgactggccgctgctggtgaaggacttcaacctgcttcgctggcttggtgccaacgctttccgtaccagccactacccctatgcagaggaagtgatgcagatgtgtgaccgctatgggattgtggtcatcgatgagtgtcccggcgtgggcctggcgctgccgtgagtctctgctgtgcacctgctccgcctgcccagcccgggggcgtcaccgtgaccctctgtcccttccctcctggcccgcaggcagttcttcaacaacgtttctctgcatcaccacatgcaggtgatggaagaagtggtgcgtagggacaagaaccaccccgcggtcgtgatgtggtctgtggccaacgagcctgcgtcccacctagaatctgctggctactacttgaagtgagtgctccctccctgccctcggctagagtgggaaggagaccctggcaggtggctggcctcggtgggcatgtgctgttcaagatcggcctcgtgtccagcccaatgggaaggccgtccatacccagatagttcaggggaccaaatatctacccacccaaattgtggttttcttttttgttctttttttttctttttgagatggagtctcactatatggcccaggctggagtgcagtggggtgatctccgctcattacaacctctgcctcctgggttcaagtgattctcctgcctcagtctcctgagtagctaggattacaggcacccatgaaccactgtgctggggctgtttttttttttcaaaatgggttctcactctggttgcccaggtt

SEQ ID NO: 26512 - DNA, 304 bp, Homo sapiens
  misc_feature (97)..(97): n is a, c, g, or t
ttcatgtcagtgcttcatcccccacaacctcatggttcctagtcagattcgttaaccactgcgccacgagggaactcccttcttgggcatgaagggnctcgacatgattcatgtcgagggttcctccccgagtcagggcgacttccacagcagcagaacaagtgcctcctggactgttcacggcagaccagaacgtttctggcctgggttttgtggtcatctattctagcagggaacactaaaggtggaaataaaagattttctattatggaaataaagagttggcatgaaagtggctactgaa

SEQ ID NO: 26513 - DNA, 975 bp, Homo sapiens
ggtggccgagcgggggaccgggaagcatggcccgggggtcggcggttgcctgggcggcgctcgggccgttgttgtggggctgcgcgctggggctgcagggcgggatgctgtacccccaggagagcccgtcgcgggagtgcaaggagctggacggcctctggagcttccgcgccgacttctctgacaaccgacgccggggcttcgaggagcagtggtaccggcggccgctgtgggagtcaggccccaccgtggacatgccagttccctccagcttcaatgacatcagccaggactggcgtctgcggcattttgtcggctgggtgtggtacgaacgggaggtgatcctgccggagcgatggacccaggacctgcgcacaagagtggtgctgaggattggcagtgcccattcctatgccatcgtgtgggtgaatggggtcgacacgctagagcatgaggggggctacctccccttcgaggccgacatcagcaacctggtccaggtggggcccctgccctcccggctccgaatcactatcgccatcaacaacacactcacccccaccaccctgccaccagggaccatccaatacctgactgacacctccaagtatcccaagggttactttgtccagaacacatattttgactttttcaactacgctggactgcagcggtctgtacttctgtacacgacacccaccacctacatcgatgacatcaccgtcaccaccagcgtggagcaagacagtgggctggtgaattaccagatctctgtcaagggcagtaacctgttcaagttggaagtgcgtcttttggatgcagaaaacaaagtcgtggcgaatgggactgggacccagggccaacttaaggtgccaggtgtcagcctctggtggccgtacctgatgcacgaacgccctgcctatctgtattcattggagatccgaggaaggcttgactgccgcgctgaatctacgg

SEQ ID NO: 26514 - DNA, 291 bp, Homo sapiens
ttatctaacatttacaattctgccagttctgactcttacattctctttgccttgaatcctaggatccacctctgatgttcactgaagagtaccagaaaagtctgctagagcagtaccatctgggtctggatcaaaaacgcagaaaatacgtggttggagagctcatttggaattttgccgatttcatgactgaacagtgtaagtggcagtttggctcatgggataacgtacccgtcctcattttttcaggttgcctttccaattctggccatttcaattgtaagaatattg

SEQ ID NO: 26515 - DNA, 424 bp, Homo sapiens
tccatccaccgagccagcttctttccacacgaatcatctcttcttccttctctaccatctcttcctgctgccctgcaatcagtctgtccctcttctctcttaaagccttattttgtccttgaacactgtgagaagcccgggcagcaagttacagctctcagctctctgaggacactgtctgggcatttatcctccctttgttacccggccctgcccgaggtcagaaagatccagttcacatctatgtccaccggttactagcggtatcaagtccactggttactagcggtatcaagtttcttagcttctgtgagtctcaggttgatggaaatgaacctcacaagtttgctgtgaagattaaaaatagactgaaaaaaaaaaagtgccctcctcacccaatgtcaatacatgatttctgccagta

SEQ ID NO: 26516 - DNA, 599 bp, Homo sapiens
  misc_feature (1)..(2): n is a, c, g, or t
  misc_feature (5)..(5): n is a, c, g, or t
nnacngcaactctgcttcacaaggaggccctgtgttttcactggaagaaaaaaaaaaaaaggtggcatacaggggtgccttcccaaagtgccaatataccccacccctaccctctcaacagattccccatttcccattttaaataaattttgtctcctaggagccatatcaaggggacctctgtctctgggttgcaactataactacaggggtctgcagatctgttactgttttctcttttccctgctactctgagagttacatttgcacagtgccaacaccctattacttatttattgataaattgattgtcataacattctacaatacactgctccctcacaatgatttctactcaagaacctgcatttattttctactatcccaaatttactctcagttcttccctcaagacttttagaagtcaggagcaccagggtgaggagcagtagcaaggagcccggactgagtgcacactcacagggctttaggacacagagagagtgtctcagaggatgctaactcaacaaccaggctgaggtgctgggtaatagtccacagaattagaaaacttaaacatctgtctaagggattgattg

SEQ ID NO: 26517 - DNA, 1927 bp, Homo sapiens
aaccaattgcaccacgaccggatggaagagcccagctgacacaaccaagacgagtctcagtgtctagggaagcttggggttctgctccttttacttcaggcgaacctgaactcagttaatgcaattttgaagcatgccctgaatagattcagtcattatcaagtcaaactaaaaacggtgaaaggttgcgactattaccaaataggaaaaacctgaagacataagaactacacatgaggaatatgtcatttagcactttcactttttgatctccacagaagacaatgagaagtcataccataacaatgacgacaacttcagtcagcagctggccttactcctcccacagaatgcgctttataaccaatcatagcgaccaaccgccacaaaacttctcagcaacaccaaatgttactacctgtcccatggatgaaaaattgctatctactgtgttaaccacatcctactctgttattttcatcgtgggactggttgggaacataatcgccctctatgtatttctgggtattcaccgtaaaagaaattccattcaaatttatctacttaacgtagccattgcagacctcctactcatcttctgcctccctttccgaataatgtatcatattaaccaaaacaagtggacactaggtgtgattctgtgcaaggttgtgggaacactgttttatatgaacatgtacattagcattattttgcttggattcatcagtttggatcgctatataaaaattaatcggtctatacagcaacggaaggcaataacaaccaaacaaagtatttatgtctgttgtatagtatggatgcttgctcttggtggattcctaactatgattattttaacacttaagaaaggagggcataattccacaatgtgtttccattacagagataagcataacgcaaaaggagaagccatttttaacttcattcttgtggtaatgttctggctaattttcttactaataatcctttcatatattaagattgggaagaatctattgaggatttctaaaaggaggtcaaaatttcctaattctggtaaatatgccactacagctcgtaactcctttattgtacttatcatttttactatatgttttgttccctatcatgcctttcgattcatctacatttcttcacagctaaatgtatcatcttgctactggaaagaaattgttcacaaaaccaatgagatcatgctggttctctcatctttcaatagttgcttagatccagtcatgtatttcctgatgtccagtaacattcgcaaaataatgtgccaacttctttttagacgatttcaaggtgaaccaagtaggagtgaaagcacttcagaatttaaaccaggatactccctgcatgatacatctgtggcagtgaaaatacagtctagttctaaaagtacttgaggtaaacatactaaaatgaattatataatgcagcctcttaattctttgaagaactaaaaaattaggaaacaaagttctagcatttacaaaactcagatctcaaagctctgcttgtatttgtgatatttcatttgcttaactgtaaaccatttcaaggtactatcttttaaatctgtatgtaaaatcttttcaaaatacatttttaagctaatactcttaacatagattatgaagttaagtgaaatttatggctctaacagcaaaataattaaagtgccatagtttctcaagtgactaaagtagttattaaaatcaagcacttgatactaatttgaagtgtgtttaaaagtaaatgatttgggaactgacaatgtgtcagaaaatatatgttcatttatcattttaaaatcttgtataatttgccactgtattcatttatgcctaaatctctataacagatgaaaagataattaataaaatcctaattaaaaaatgag

SEQ ID NO: 26518 - DNA, 1946 bp, Homo sapiens
aaagagatggggtcttgttctgttgcccaggctggagtgcagtggctcaattatagctcactacagccttgaactcctgggttcaagcaatccttctgctgtagcctcccgagtagctaggaccataggcgtgtgctgggaagcccagcctattatttacacttttagttaaagtaactgttattaaaatagcaaatgactcaatgtttggcattccgttgtaggaaaaacctgaagacataagaactacacatgaggaatatgtcatttagcactttcactttttgatctccacagaagacaatgagaagtcataccataacaatgacgacaacttcagtcagcagctggccttactcctcccacagaatgcgctttataaccaatcatagcgaccaaccgccacaaaacttctcagcaacaccaaatgttactacctgtcccatggatgaaaaattgctatctactgtgttaaccacatcctactctgttattttcatcgtgggactggttgggaacataatcgccctctatgtatttctgggtattcaccgtaaaagaaattccattcaaatttatctacttaacgtagccattgcagacctcctactcatcttctgcctccctttccgaataatgtatcatattaaccaaaacaagtggacactaggtgtgattctgtgcaaggttgtgggaacactgttttatatgaacatgtacattagcattattttgcttggattcatcagtttggatcgctatataaaaattaatcggtctatacagcaacggaaggcaataacaaccaaacaaagtatttatgtctgttgtatagtatggatgcttgctcttggtggattcctaactatgattattttaacacttaagaaaggagggcataattccacaatgtgtttccattacagagataagcataacgcaaaaggagaagccatttttaacttcattcttgtggtaatgttctggctaattttcttactaataatcctttcatatattaagattgggaagaatctattgaggatttctaaaaggaggtcaaaatttcctaattctggtaaatatgccactacagctcgtaactcctttattgtacttatcatttttactatatgttttgttccctatcatgcctttcgattcatctacatttcttcacagctaaatgtatcatcttgctactggaaagaaattgttcacaaaaccaatgagatcatgctggttctctcatctttcaatagttgcttagatccagtcatgtatttcctgatgtccagtaacattcgcaaaataatgtgccaacttctttttagacgatttcaaggtgaaccaagtaggagtgaaagcacttcagaatttaaaccaggatactccctgcatgatacatctgtggcagtgaaaatacagtctagttctaaaagtacttgaggtaaacatactaaaatgaattatataatgcagcctcttaattctttgaagaactaaaaaattaggaaacaaagttctagcatttacaaaactcagatctcaaagctctgcttgtatttgtgatatttcatttgcttaactgtaaaccatttcaaggtactatcttttaaatctgtatgtaaaatcttttcaaaatacatttttaagctaatactcttaacatagattatgaagttaagtgaaatttatggctctaacagcaaaataattaaagtgccatagtttctcaagtgactaaagtagttattaaaatcaagcacttgatactaatttgaagtgtgtttaaaagtaaatgatttgggaactgacaatgtgtcagaaaatatatgttcatttatcattttaaaatcttgtataatttgccactgtattcatttatgcctaaatctctataacagatgaaaagataattaataaaatcctaattaaaaaatgag

SEQ ID NO: 26519 - DNA, 1854 bp, Homo sapiens
aaccaattgcaccacgaccggatggaagagcccagctgacacaaccaagacgagtctcagtgtctagggaagcttggggttctgctccttttacttcaggcgaacctgaactcagttaatgcaattttgaagcatgccctgaatagattcagtcattatcaagtcaaactaaaaacggtgaaaggttgcgactattaccaaatagaagacaatgagaagtcataccataacaatgacgacaacttcagtcagcagctggccttactcctcccacagaatgcgctttataaccaatcatagcgaccaaccgccacaaaacttctcagcaacaccaaatgttactacctgtcccatggatgaaaaattgctatctactgtgttaaccacatcctactctgttattttcatcgtgggactggttgggaacataatcgccctctatgtatttctgggtattcaccgtaaaagaaattccattcaaatttatctacttaacgtagccattgcagacctcctactcatcttctgcctccctttccgaataatgtatcatattaaccaaaacaagtggacactaggtgtgattctgtgcaaggttgtgggaacactgttttatatgaacatgtacattagcattattttgcttggattcatcagtttggatcgctatataaaaattaatcggtctatacagcaacggaaggcaataacaaccaaacaaagtatttatgtctgttgtatagtatggatgcttgctcttggtggattcctaactatgattattttaacacttaagaaaggagggcataattccacaatgtgtttccattacagagataagcataacgcaaaaggagaagccatttttaacttcattcttgtggtaatgttctggctaattttcttactaataatcctttcatatattaagattgggaagaatctattgaggatttctaaaaggaggtcaaaatttcctaattctggtaaatatgccactacagctcgtaactcctttattgtacttatcatttttactatatgttttgttccctatcatgcctttcgattcatctacatttcttcacagctaaatgtatcatcttgctactggaaagaaattgttcacaaaaccaatgagatcatgctggttctctcatctttcaatagttgcttagatccagtcatgtatttcctgatgtccagtaacattcgcaaaataatgtgccaacttctttttagacgatttcaaggtgaaccaagtaggagtgaaagcacttcagaatttaaaccaggatactccctgcatgatacatctgtggcagtgaaaatacagtctagttctaaaagtacttgaggtaaacatactaaaatgaattatataatgcagcctcttaattctttgaagaactaaaaaattaggaaacaaagttctagcatttacaaaactcagatctcaaagctctgcttgtatttgtgatatttcatttgcttaactgtaaaccatttcaaggtactatcttttaaatctgtatgtaaaatcttttcaaaatacatttttaagctaatactcttaacatagattatgaagttaagtgaaatttatggctctaacagcaaaataattaaagtgccatagtttctcaagtgactaaagtagttattaaaatcaagcacttgatactaatttgaagtgtgtttaaaagtaaatgatttgggaactgacaatgtgtcagaaaatatatgttcatttatcattttaaaatcttgtataatttgccactgtattcatttatgcctaaatctctataacagatgaaaagataattaataaaatcctaattaaaaaatgag

SEQ ID NO: 26520 - DNA, 468 bp, Homo sapiens
tcaagacagaaagttaactttctgaaaatattcaggacctgaactcagccctggataaagtgaccttatagatagctacagaactgtccccccaaaaacaaaagaatataaattcttctcatcaccacatggcactttgtctaaaactgatcacataatcggaagcaaaacactcctcagcaaatgcataagaactgaaatcataacaaacagtctcttacaccacagcacaatcaaattagaactcaagatttaaacattcactgaaaaccacacaactatatggaaattgaacaacctgctcctgaatgactcttgggtaaataatgaaattaaggtagaaatcaagaattatttgaaactaatgagaactaagagataacatatcagaatctgggatgcagctaaagcattgttaagagggaaatttatagtactaaatgcccacatcaaaaagctagaaagatc

SEQ ID NO: 26521 - DNA, 578 bp, Homo sapiens
gacggctgcaaggagggaaaaattgtgcacctgattccaatacagcaggatgacttaacacaatgacttaccaggaggtcttagctgtgaaaaatcagtcccgtttcagcacgtggatctccttgtcttctctccctacccgctttcctctctttcttaacccaagaagttatccttaatgacccttagatgaaggatcaagaggagagttgaaaagacccccccaggtgaaaaagagtaaacccccatttctggcatcccagggctttagtgaaaacaaacttttttattcctagttctgtccttgaaagctaagaaacctgttctagttatttttatataattaggcagtgggtttcagattttgtcagatattttcagctcaaaatgtattcactgagcagcaaaacgcagggttgtttaatttgtaatttcagttatatattcctgagtacctttctgttctttcatttttgagtactgtgaaataatcatgttagtttttaattcatatattaaaaacaacctgtgcccccacctccccccaaaaaagtcccatagtagtcactgttacccaa

SEQ ID NO: 26522 - DNA, 351 bp, Homo sapiens
gcttgaacctgggaggcggaggttgcagtgagccaagatcacgccactgcactccagcctcggtgaccgagtgagactccagtttgtctaatataaaaatatgtatatatatatagtctaatataaatatatattttgtctaatataagtatatattatatacattttgtctaatgtaaatatatatattttgtctaatataaatatatatatttttgtctaatagaaatacaaatatattttgtctaatatatatattagacaaaagagtgaagaaatataatttcaacattttaaaaaggaaggaaactcattgtttgtaagggatctgatcacatcattgaaatgtgc

SEQ ID NO: 26523 - DNA, 323 bp, Homo sapiens
atggcgtgaacccagaaggcggagcttgcagtgagccgagattgcaccactgcactccagcctgggtgacagagtgagactctgcctcataaaaaaaacaaaaacaaaaacaaaacaaaaaactcccaaacacctaatatatgtttcatgttcttttgagaaagcttaattaggctgggcgtggtggctcatgcctataatcccagctactcaggaggctgaggcaggagaatggcttgaacccagaaggcggagcttgcagtgagccgagattgcaccactgcactccagcctgggtgacagagtgagactctgcctcagaa

SEQ ID NO: 26524 - DNA, 318 bp, Homo sapiens
gcacaatctcgaaccataccccaaacctatcaaatcagaatctctgggataggaatccaagaatctgagttttaacaagtccttcaggtaattccagggcacactaatgaagccataccctagaaatccttgcacacgtgagaataaccagctgtaaatgtttatgaagtgaaaagcagcattaccaaacccagctattagaggaaagtggctgactgagcaagccggctgaatcagtatcagctcctgatggcagagtgcccttactcacggaggaaagataatgtagagttgaaatgggacttggaaagcttgatg

SEQ ID NO: 26525 - DNA, 160 bp, Homo sapiens
aaaaaaggtagtgggggaggacccaggaggtttacactgatggtttttaaatatctgtgaagactattgatttgttttgacctaggaggaaaaactaaaggcaaagccattatgggagatcattaactgtggaaaggagctcagacaggcaggctagatt

SEQ ID NO: 26526 - DNA, 1083 bp, Homo sapiens
gtccagaatgctggagcgtaggtgaaaggacggattggcgacacatttcaacatgagggacccactgacagattgtccgtataataaagtatacaagaacctaaaggagttttctcaaaatggagagaatttctgcaaacaggtcacatctgttcttcagcaaagggcaaacctggaaattagctatgccaaaggacttcagaaactggcaagcaagctgagcaaagcattacagaacacgagaaaaagttgtgttagcagtgcctgggcctgggcctcagagggaatgaaatccacagcggacctgcatcaaaaacttggcaaagcaattgaattggaagcaataaaaccgacttatcaagtcctaaatgtacaagagaagaagagaaaatcacttgacaatgaagttgaaaagacagcaaatcttgtcattagcaactggaatcagcaaattaaggccaagaagaaattaatggttagtaccaagaaacatgaagcacttttccagcttgtagaaagctccaagcaatctatgactgagaaggagaagcggaagctcctcaataaactgacaaaatcaactgaaaagttggaaaaggaagatgaaaattactaccaaaaaaacatggcgggttattctaccagactgaaatgggaaaacacactagagaactgctaccagagcattctggagctggagaaggaaagaattcaacttttatgcaataacttaaaccagtacagccaacatatttctctttttggccaaaccctgaccacatgccacacgcagattcactgtgccatcagcaagattgacattgaaaaagatatccaggctgtaatggaagaaactgcaattttatctacagaaaacaaatctgagttcctgttaacggattactttgaagaagatcctaacagtgcaatggataaagagagacgaaagtctttactaaaaccaaaattattgagactgcagagagacattgaaaaagcctcaaaagacaaggaaggcctggaacgaatgcttaaaacgtactccagcacctcctccttctctgatgcaaagagccagaaaga

SEQ ID NO: 26527 - DNA, 847 bp, Homo sapiens
ctgaataggtgttccataacacactattttatttccccagaaagtaatttggaaagtagatgtaaacgctgatattatgctgtgtcttttatgttttatttccagaaaacttggcaaagcaattgaattggaagcaataaaaccgacttatcaagtcctaaatgtacaagagaagaagagaaaatcacttgacaatgaagttgaaaagacagcaaatcttgtcattagcaactggaatcagcaaattaaggccaagaagaaattaatggttagtaccaagaaacatgaagcacttttccagcttgtagaaagctccaagcaatctatgactgagaaggagaagcggaagctcctcaataaactgacaaaatcaactgaaaagttggaaaaggaagatgaaaattactaccaaaaaaacatggcgggttattctaccagactgaaatgggaaaacacactagagaactgctaccagagcattctggagctggagaaggaaagaattcaacttttatgcaataacttaaaccagtacagccaacatatttctctttttggccaaaccctgaccacatgccacacgcagattcactgtgccatcagcaagattgacattgaaaaagatatccaggctgtaatggaagaaactgcaattttatctacagaaaacaaatctgagttcctgttaacggattactttgtgagtatgaaatggaaaaaaaaagttacattaatggagaatcttaggtactgagggacttacattgaaaaaattgaaagcaaatatcatgttttatcaatgaaaatgatttctcataccccatataaatttaaaaaacccagcatt

SEQ ID NO: 26528 - DNA, 979 bp, Homo sapiens
tgttcctgacacatttcccacagtcctcccccagccctttgctcccgccatttttcctgcctggagtgccctttgccatctttccttgactagacagttacgtcttcttgcctcctcgaagctgtcagctgcctgcactcgtggtgtctgtagcattcgtgaatgcatgtggtcttgtattgctagtttctttaatgttatgcttcaaggcctaactaaatcataaacccattctggaaagagcatatgtgttttagctcacatcttcccagtactgagccaacacagaactcagtcaaaatgtcttccactcctgaggcagtcatagcctgaaacacatacatgatattacatttgggccattaaaggactctaacttgaacaaaagtaaataaggaagcagtaagtatacaacaaatagatttatcaagaaaatgaaatagctatagcaagggtccatcctcaaagaacaatctgctctattaaaaagtgctcggccatgtgacttaaaagttgtgaacaagacaatattttcttattcatcaggtctcgaacaggtagaacaatgtgtgtaaaactaaagattatcctgcttaaaaattttgttttattttataaagttaaaattaaatgcagccagtggaagtatcagaatggacagggaatagcaactcttacttcttcccccttgttagacatccttcttttttcctaaaggaagaagatcctaacagtgcaatggataaagagagacgaaagtctttactaaaaccaaaattattgagactgcagagagacattgaaaaagcctcaaaagacaaggaaggtgtgtaaccatctctttgaatggccagaaaagggaccatatgatgctcagaggtttcattcagagttaggattgatctgcttttgctatttggcaggggtcttctcatttaaagaaccatatatcaaacttcagttgtgtgaacaaaaaaaa

SEQ ID NO: 26529 - DNA, 678 bp, Homo sapiens
gtccagaatgctggagcgtaggtgaaaggacggattggcgacacatttcaacatgagggacccactgacagattgtccgtataataaagtatacaagaacctaaaggagttttctcaaaatggagagaatttctgcaaacaggtcacatctgttcttcagcaaagggcaaacctggaaattagctatgccaaaggacttcagaaactggcaagcaagctgagcaaagcattacagaacacgagaaaaagttgtgttagcagtgcctgggcctgggcctcagagggaatgaaatccacagcggacctgcatcaaaaacttggcaaagcaattgaaatggtcgccaatccgggattggcgaccatttcaatcaggtgatcactgctgaagagaaagtctcctttactagctgcttctgagccctctttgaggtggacggcgaagaagccatcattttgtgagctcattgataccttggtcacatccaccagtggaacctctgacttgatttgtccagacttttggtcagcaagaaggagattattgtttgttaagaggaaaatccgagatgtactcttcccattagcacggttaattcttgttcacgacttcagcaatgatgatcttttcttcaatggcatctctgagtttctgataatagggttcttgttgaattccag

SEQ ID NO: 26530 - DNA, 1169 bp, Homo sapiens
gtccagaatgctggagcgtaggtgaaaggacggattggcgacacatttcaacatgagggacccactgacagattgtccgtataataaagtatacaagaacctaaaggagttttctcaaaatggagagaatttctgcaaacaggtcacatctgttcttcagcaaagggcaaacctggaaattagctatgccaaaggacttcagaaactggcaagcaagctgagcaaagcattacagaacacgagaaaaagttgtgttagcagtgcctgggcctgggcctcagagggaatgaaatccacagcggacctgcatcaaaaacttggcaaagcaattgaattggaagcaataaaaccgacttatcaagtcctaaatgtacaagagaagaagagaaaatcacttgacaatgaagttgaaaagacagcaaatcttgtcattagcaactggaatcagcaaattaaggccaagaagaaattaatggttagtaccaagaaacatgaagcacttttccagcttgtagaaagctccaagcaatctatgactgagaaggagaagcggaagctcctcaataaactgacaaaatcaactgaaaagttggaaaaggaagatgaaaattactaccaaaaaaacatggcgggttattctaccagactgaaatgggaaaacacactagagaactgctaccagagcattctggagctggagaaggaaagaattcaacttttatgcaataacttaaaccagtacagccaacatatttctctttttggccaaaccctgaccacatgccacacgcagattcactgtgccatcagcaagattgacattgaaaaagatatccaggctgtaatggaagaaactgcaattttatctacagaaaacaaatctgagttcctgttaacggattactttgaagaagatcctaacagtgcaatggataaagagagacgaaagtctttactaaaaccaaaattattgagactgcagagagacattgaaaaagcctcaaaagacaaggaaggtgtgtaaccatctctttgaatggccagaaaagggaccatatgatgctcagaggtttcattcagagttaggattgatctgcttttgctatttggcaggggtcttctcatttaaagaaccatatatcaaacttcagttgtgtgaacaaaaaaaa

SEQ ID NO: 26531 - DNA, 1054 bp, Homo sapiens
gtccagaatgctggagcgtaggtgaaaggacggattggcgacacatttcaacatgagggacccactgacagattgtccgtataataaagtatacaagaacctaaaggagttttctcaaaatggagagaatttctgcaaacaggtcacatctgttcttcagcaaagggcaaacctggaaattagctatgccaaaggacttcagaaactggcaagcaagctgagcaaagcattacagaacacgagaaaaagttgtgttagcagtgcctgggcctgggcctcagagggaatgaaatccacagcggacctgcatcaaaaacttggcaaagcaattgaattggaagcaataaaaccgacttatcaagtcctaaatgtacaagagaagaagagaaaatcacttgacaatgaagttgaaaagacagcaaatcttgtcattagcaactggaatcagcaaattaaggccaagaagaaattaatggttagtaccaagaaacatgaagcacttttccagcttgtagaaagctccaagcaatctatgactgagaaggagaagcggaagctcctcaataaactgacaaaatcaactgaaaagttggaaaaggaagatgaaaattactaccaaaaaaacatggcgggttattctaccagactgaaatgggaaaacacactagagaactgctaccagagcattctggagctggagaaggaaagaattcaacttttatgcaataacttaaaccagtacagccaacatatttctctttttggccaaaccctgaccacatgccacacgcagattcactgtgccatcagcaagattgacattgaaaaagatatccaggctgtaatggaagaaactgcaattttatctacagaaaacaaatctgagttcctgttaacggattactttgtgagtatgaaatggaaaaaaaaagttacattaatggagaatcttaggtactgagggacttacattgaaaaaattgaaagcaaatatcatgttttatcaatgaaaatgatttctcataccccatataaatttaaaaaacccagcatt

SEQ ID NO: 26532 - DNA, 939 bp, Homo sapiens
gtccagaatgctggagcgtaggtgaaaggacggattggcgacacatttcaacatgagggacccactgacagattgtccgtataataaagtatacaagaacctaaaggagttttctcaaaatggagagaatttctgcaaacaggtcacatctgttcttcagcaaagggcaaacctggaaattagctatgccaaaggacttcagaaactggcaagcaagctgagcaaagcattacagaacacgagaaaaagttgtgttagcagtgcctgggcctgggcctcagagggaatgaaatccacagcggacctgcatcaaaaacttggcaaagcaattgaattggaagcaataaaaccgacttatcaagtcctaaatgtacaagagaagaagagaaaatcacttgacaatgaagttgaaaagacagcaaatcttgtcattagcaactggaatcagcaaattaaggccaagaagaaattaatggttagtaccaagaaacatgaagcacttttccagcttgtagaaagctccaagcaatctatgactgagaaggagaagcggaagctcctcaataaactgacaaaatcaactgaaaagttggaaaaggaagatgaaaattactaccaaaaaaacatggcgggttattctaccagactgaaatgggaaaacacactagagaactgctaccagtaccagcccaaaggctaggacagcaagaactggaaggaacgaatgaagaacaaattgtcatgatgcttgggccccagacaggctctaaatctgctgaaatctgaatctttctggataactccttgaccacactttgttcatatatactattgtggaacctcaagaggacagtttgaggtcctccagagtatcttgcttctctaccacctattttatataaaaagaacaagataataaaaagcaaaaaatcattagat

SEQ ID NO: 26533 - DNA, 1106 bp, Homo sapiens
gtccagaatgctggagcgtaggtgaaaggacggattggcgacacatttcaacatgagggacccactgacagattgtccgtataataaagtatacaagaacctaaaggagttttctcaaaatggagagaatttctgcaaacaggtcacatctgttcttcagcaaagggcaaacctggaaattagctatgccaaaggacttcagaaactggcaagcaagctgagcaaagcattacagaacacgagaaaaagttgtgttagcagtgcctgggcctgggcctcagagggaatgaaatccacagcggacctgcatcaaaaacttggcaaagcaattgaattggaagcaataaaaccgacttatcaagtcctaaatgtacaagagaagaagagaaaatcagccaagaagaaattaatggttagtaccaagaaacatgaagcacttttccagcttgtagaaagctccaagcaatctatgactgagaaggagaagcggaagctcctcaataaactgacaaaatcaactgaaaagttggaaaaggaagatgaaaattactaccaaaaaaacatggcgggttattctaccagactgaaatgggaaaacacactagagaactgctaccagagcattctggagctggagaaggaaagaattcaacttttatgcaataacttaaaccagtacagccaacatatttctctttttggccaaaccctgaccacatgccacacgcagattcactgtgccatcagcaagattgacattgaaaaagatatccaggctgtaatggaagaaactgcaattttatctacagaaaacaaatctgagttcctgttaacggattactttgaagaagatcctaacagtgcaatggataaagagagacgaaagtctttactaaaaccaaaattattgagactgcagagagacattgaaaaagcctcaaaagacaaggaaggtgtgtaaccatctctttgaatggccagaaaagggaccatatgatgctcagaggtttcattcagagttaggattgatctgcttttgctatttggcaggggtcttctcatttaaagaaccatatatcaaacttcagttgtgtgaacaaaaaaaa

SEQ ID NO: 26534 - DNA, 1131 bp, Homo sapiens
cccgggtgtccgggatgagggacccactgacagattgtccgtataataaagtatacaagaacctaaaggagttttctcaaaatggagagaatttctgcaaacaggtcacatctgttcttcagcaaagggcaaacctggaaattagctatgccaaaggacttcagaaactggcaagcaagctgagcaaagcattacagaacacgagaaaaagttgtgttagcagtgcctgggcctgggcctcagagggaatgaaatccacagcggacctgcatcaaaaacttggcaaagcaattgaattggaagcaataaaaccgacttatcaagtcctaaatgtacaagagaagaagagaaaatcacttgacaatgaagttgaaaagacagcaaatcttgtcattagcaactggaatcagcaaattaaggccaagaagaaattaatggttagtaccaagaaacatgaagcacttttccagcttgtagaaagctccaagcaatctatgactgagaaggagaagcggaagctcctcaataaactgacaaaatcaactgaaaagttggaaaaggaagatgaaaattactaccaaaaaaacatggcgggttattctaccagactgaaatgggaaaacacactagagaactgctaccagagcattctggagctggagaaggaaagaattcaacttttatgcaataacttaaaccagtacagccaacatatttctctttttggccaaaccctgaccacatgccacacgcagattcactgtgccatcagcaagattgacattgaaaaagatatccaggctgtaatggaagaaactgcaattttatctacagaaaacaaatctgagttcctgttaacggattactttgaagaagatcctaacagtgcaatggataaagagagacgaaagtctttactaaaaccaaaattattgagactgcagagagacattgaaaaagcctcaaaagacaaggaaggtgtgtaaccatctctttgaatggccagaaaagggaccatatgatgctcagaggtttcattcagagttaggattgatctgcttttgctatttggcaggggtcttctcatttaaagaaccatatatcaaacttcagttgtgtgaacaaaaaaaa

SEQ ID NO: 26535 - DNA, 1182 bp, Homo sapiens
aatagatcagcttcatttttgaaaagttctcctgggtctttcatatccaggtagaagagacttcatctttattttaagaactcatccaaaagtataataaagtatacaagaacctaaaggagttttctcaaaatggagagaatttctgcaaacaggtcacatctgttcttcagcaaagggcaaacctggaaattagctatgccaaaggacttcagaaactggcaagcaagctgagcaaagcattacagaacacgagaaaaagttgtgttagcagtgcctgggcctgggcctcagagggaatgaaatccacagcggacctgcatcaaaaacttggcaaagcaattgaattggaagcaataaaaccgacttatcaagtcctaaatgtacaagagaagaagagaaaatcacttgacaatgaagttgaaaagacagcaaatcttgtcattagcaactggaatcagcaaattaaggccaagaagaaattaatggttagtaccaagaaacatgaagcacttttccagcttgtagaaagctccaagcaatctatgactgagaaggagaagcggaagctcctcaataaactgacaaaatcaactgaaaagttggaaaaggaagatgaaaattactaccaaaaaaacatggcgggttattctaccagactgaaatgggaaaacacactagagaactgctaccagagcattctggagctggagaaggaaagaattcaacttttatgcaataacttaaaccagtacagccaacatatttctctttttggccaaaccctgaccacatgccacacgcagattcactgtgccatcagcaagattgacattgaaaaagatatccaggctgtaatggaagaaactgcaattttatctacagaaaacaaatctgagttcctgttaacggattactttgaagaagatcctaacagtgcaatggataaagagagacgaaagtctttactaaaaccaaaattattgagactgcagagagacattgaaaaagcctcaaaagacaaggaaggtgtgtaaccatctctttgaatggccagaaaagggaccatatgatgctcagaggtttcattcagagttaggattgatctgcttttgctatttggcaggggtcttctcatttaaagaaccatatatcaaacttcagttgtgtgaacaaaaaaaa

SEQ ID NO: 26536 - DNA, 1083 bp, Homo sapiens
gtccagaatgctggagcgtaggtgaaaggacggattggcgacacatttcaacatgagggacccactgacagattgtccgggcaaacctggaaattagctatgccaaaggacttcagaaactggcaagcaagctgagcaaagcattacagaacacgagaaaaagttgtgttagcagtgcctgggcctgggcctcagagggaatgaaatccacagcggacctgcatcaaaaacttggcaaagcaattgaattggaagcaataaaaccgacttatcaagtcctaaatgtacaagagaagaagagaaaatcacttgacaatgaagttgaaaagacagcaaatcttgtcattagcaactggaatcagcaaattaaggccaagaagaaattaatggttagtaccaagaaacatgaagcacttttccagcttgtagaaagctccaagcaatctatgactgagaaggagaagcggaagctcctcaataaactgacaaaatcaactgaaaagttggaaaaggaagatgaaaattactaccaaaaaaacatggcgggttattctaccagactgaaatgggaaaacacactagagaactgctaccagagcattctggagctggagaaggaaagaattcaacttttatgcaataacttaaaccagtacagccaacatatttctctttttggccaaaccctgaccacatgccacacgcagattcactgtgccatcagcaagattgacattgaaaaagatatccaggctgtaatggaagaaactgcaattttatctacagaaaacaaatctgagttcctgttaacggattactttgaagaagatcctaacagtgcaatggataaagagagacgaaagtctttactaaaaccaaaattattgagactgcagagagacattgaaaaagcctcaaaagacaaggaaggtgtgtaaccatctctttgaatggccagaaaagggaccatatgatgctcagaggtttcattcagagttaggattgatctgcttttgctatttggcaggggtcttctcatttaaagaaccatatatcaaacttcagttgtgtgaacaaaaaaaa

SEQ ID NO: 26537 - DNA, 5084 bp, Homo sapiens
  misc_feature (2194)..(2194): n is a, c, g, or t
  misc_feature (2286)..(2286): n is a, c, g, or t
  misc_feature (3750)..(3750): n is a, c, g, or t
  misc_feature (3948)..(3948): n is a, c, g, or t
agcggggggagcaagacggcagcatctacggttctttctgctcaggaatgggaacccagagtgggcagtagagcggaggcaagccatgcagaggcaggagcagatgagaccctagatgccacgagaagctaaacatgtggggaaaataaagagcagattaactcaggaaaattatatggggagctcttatgctactctgaagatctgagactcgttggagaatttacaatcccaaattaactcagggagaattccaactagactctgaaatgaattagatggagatttaaaatagggcaatttagtgggaagagatacttaatttgaagacagaatcatgaataaactggaggataagcaggaccagatgataccatgaagagaagtttacaggccctctattgccaactgttaagtttcctgctgatcttggcactgaccgaagcgctggcatttgccatccaggaaccatctcccagggaatctcttcaggtcctcccttcaggcactcccccgggaaccatggtgacagcaccccacagctctaccagacatacttctgtggtgatgctgacccccaatcccgatggacccccctcacaggctgcagctcccatggcaacaccgacaccccgtgcagaggggcaccctcctacgcacaccatctccaccatcgctgcgacagtaaccgccccccattctgaaagctccctgtccacagggcccgctccagcagccatggcaaccacatcctccaagccagagggccgccctcgagggcaggctgcccccaccatcctgctgacaaagccaccgggggccaccagccgccccaccacagcgcccccccgcactaccacacgcaggccccccaggcccccaggctcttcccgaaaaggggctggtaattcatcacgccctgtcccgcctgcacctggtggccactccaggagtaaagaaggacagcgaggacgaaatccaagctccacacctctggggcagaagcggcccctggggaaaatctttcagatctacaagggcaacttcacagggtctgtggaaccggagccctctaccctcacccccaggaccccactctggggctactcctcttcaccacagccccagacagtggctgcgaccacagtgcccagcaatacctcatgggcacccaccaccacctccctggggcctgcaaaggacaagccaggccttcgcagagcagcccaggggggtggttctaccttcaccagccaaggagggacaccagatgccacagcagcctcaggtgcccctgtcagtccacaagctgccccagtgccttctcagcgcccccaccacggtgacccacaggatggccccagccatagtgactcttggcttactgttacccctggcaccagcagacctctgtctaccagctctggggtcttcacggctgccacggggcccaccccagctgccttcgataccagtgtctcagccccttcccaggggattcctcagggagcatccacaaccccacaagctccaacccatccctccagggtctcagaaagcactatttctggagccaaggaggagactgtggccaccctcaccatgaccgaccgggtgcccagtcctctctccacagtggtatccacagccacaggcaatttcctcaaccgcctggtccccgccgggacctggaagcctgggacagcagggaacatctcccatgtggccgagggggacaaaccgcagcacagagccaccatctgcctgagcaagatggatatcgcctgggtgatcctggccatcagcgtgcccatctcctcctgctcagatcctatcacctgaaagcatgcccttccacaaatgtgaatacagtactcagggctccatctgaaaatggagtgacccctcttcttcctgtcacacatctgacaagccatggatgactcccagtgacattcctgggaacccaagagagcttaattcccaactctgttttaaaactcaaggaaattgggactccatgacctcctccagagtcttgatggctactgcctcaggagaaacagagcagttgaagcttttcaactaaatgggaaagggaacagttaacatcttgtgtttgcatagagctgcgcagtttacaaaacgcttctgcatatgtcatctctataccctccggtgttcaggacaatanaggatagtggatatcaacttgaagatcatcaagacctggactcaagttgcagtaattagttgggtgatcaagatcaatactattagcttctntgaccttcagttacctgttctgaaaatgggaagagcaatagtgccttcctcaggcagttatcatgtgggctaaataagcttcaaagtgcctgggtcagtgctgggaatatagtagagaccctgtaagtctgacttgtacttttctttcttggatgaaaggtgagaccactgaaatagtgaatgttctaacccctaggtggagctttgtccttgagccacccaatagtcatataacacagtttttctttctagatctctcttgtagaggatgttgggagaacaagaagagaactgtcattaattaagcatccattgtgtgtcaggcattgtgtttggcattttgcatccatgatctctttaattctcattacaagcctatgaagttcatcttaagtgactttccaggtggaatacatggcagagtcacaatttgaacctaggtctttctgtagccaggctggctttcagtaagtaaatgaaatggtgtttgagaagcactggaaactccctgagagaaatataatcaggccaggagcatgaacatgtgaggggaagacagcgtggagcagaactttctgttctgactcccaggccttcccgcagggcaggatctctgcatctggcattctaacaacatgggctgttagagcactggactcgggggcggaggacttggattctgcaacctctaccagcccaggttagcagcatggccttgagcaagttcacctctctaggtttccatgccccaccttctagaataagaatgtaggctgggggaaggggctgatttgtttcagcacctactgtgcaccagggacaatttgaagtgctggcagatgtatgactgcatttaatcttcccaaggaagctgacgctgagagaggttaagtaacttactcaagtcatgcaagtaatagattgtcacctagattctaattctaaattcgatgtcccttttgccctattgactaggcctaagatggcatctgtcactttgattctgtttgcttataactgctcagtagatcagaggcacaaatatctttctaccttagagaggcgtgcaaactatacaaatctgactcacagatacacttttcccctgccagcctgtgttctgtgtctatggcagtgttttgtggggcatgatgggatgtgcccctacaggctgataactgaagagctgttctgtttgtcctgattgctcccctccctctagctctaactctaccaaaactgagctggagctgaggaaacagcacttttcccacttcccagatggttccctctttatggcttctgtcacaccagctagaactcctccaggtgtttcaccatgccagctgcaggagcagagtgaaaggtagtgacaatgaagaacagagacaccagagaaggggacaggggacccgggatcttgtcccagctctgccactcacatacctgtgacctgtggcaagncggccagcactttaggccacagtttttcctctagaataaggaggcggcctgaattagcaagtttcaggctgagcaccacagccccctccttgcccctttcctcttcaaccatctgaagaaagggttttttggaaggaagggagggaaagaggaaagagatccacaatatttgaaaagttctgtaccagctaatctctnaaatccccgttagccctaacactcagaaattccttctatgttttaaagattttttaaaaaggatctagaagactgaaaagcaaattagaagtctttttgatcaaagcagataagataaagtagaaacttaccctatctcctaaccttgtacagagacctttccaggttgagaggccagcaaggctggcagctggaaagaaagctacagaattccccaggcagcctacagggccctgggctctgggctgtgaggtctcagcctatacaggtgccagcttgtgcaactgccccacaccctggcatgaacccacccctgatgctggccagaccctcaggctgctgcgaacagagctggccctctgccaacccccggtgctggcctctctggacagcccagcctgggaccccgactccccagcacagagatggttggcaccaccaggatgtcagatgtggctcttggcttcagctctcctcatccccagaggctctggtgatgatgaacctggggcaggatatactcagtcctcacttcatggcttctccccaagaggcctctgtcacccttgtccttgtgttacccttctgcagtgtgaatctggacaggccaccccacctctctgacctcagaagccttccctgctcacaagccactcaattcacacatggttaatcaacaatatcgagacataattcttcctcctgggccctgggagtctcagggatgaacagacagggtcacatgtcacactgtgctcagtcaagctgtgtggagcccacctcaggccatctgtgcaggtgggcttttgcatcaatctaaggcaggaatcagctggtaagagcatagactggccaggtgcagtggctcacacctgtaatcaatcccagcactttaggaggctgaggcaggcggattacctgaggtcaggagttcgagaccagcctaaccaacatggcaaaaccctgtctctactaaaaatacaaaaattagccagacatggtggcaggcacctgtaatatcccagcttcttgggaggctgaggcaggagaatcgcttgatcccaggaggcagaggttgcagtgagccaagattgcgccactgcactccagcctgggcaacggagctagactccatc

SEQ ID NO: 26538 - DNA, 3834 bp, Homo sapiens
acgctgacggacaaggccggggcgggccagagcctggtcggaggggcgcgcgcgggggcccgaggggcgaaggcgcgagtgcgcgagagcgcgtgcgcgagcggtggggctttctcctgagccgtcggagggagccggagcgcttctcccgagttggtgatagattggtggtcatccaacatgcagaaatgaatgagcagtgaaaagcagcagagccgatgggtcatgaggatgtaagtgcgtttgaaggcttccacaccctctactccaggacagaatcatgaataaactggaggataagcaggaccagatgataccatgaagagaagtttacaggccctctattgccaactgttaagtttcctgctgatcttggcactgaccgaagcgctggcatttgccatccaggaaccatctcccagggaatctcttcaggtcctcccttcaggcactcccccgggaaccatggtgacagcaccccacagctctaccagacatacttctgtggtgatgctgacccccaatcccgatggacccccctcacaggctgcagctcccatggcaacaccgacaccccgtgcagaggggcaccctcctacgcacaccatctccaccatcgctgcgacagtaaccgccccccattctgaaagctccctgtccacagggcccgctccagcagccatggcaaccacatcctccaagccagagggccgccctcgagggcaggctgcccccaccatcctgctgacaaagccaccgggggccaccagccgccccaccacagcgcccccccgcactaccacacgcaggccccccaggcccccaggctcttcccgaaaaggggctggtaattcatcacgccctgtcccgcctgcacctggtggccactccaggagtaaagaaggacagcgaggacgaaatccaagctccacacctctggggcagaagcggcccctggggaaaatctttcagatctacaagggcaacttcacagggtctgtggaaccggagccctctaccctcacccccaggaccccactctggggctactcctcttcaccacagccccagacagtggctgcgaccacagtgcccagcaatacctcatgggcacccaccaccacctccctggggcctgcaaaggacaagccaggccttcgcagagcagcccaggggggtggttctaccttcaccagccaaggagggacaccagatgccacagcagcctcaggtgcccctgtcagtccacaagctgccccagtgccttctcagcgcccccaccacggtgacccacaggatggccccagccatagtgactcttggcttactgttacccctggcaccagcagacctctgtctaccagctctggggtcttcacggctgccacggggcccaccccagctgccttcgataccagtgtctcagccccttcccaggggattcctcagggagcatccacaaccccacaagctccaacccatccctccagggtctcagaaagcactatttctggagccaaggaggagactgtggccaccctcaccatgaccgaccgggtgcccagtcctctctccacagtggtatccacagccacaggcaatttcctcaaccgcctggtccccgccgggacctggaagcctgggacagcagggaacatctcccatgtggccgagggggacaaaccgcagcacagagccaccatctgcctgagcaagatggatatcgcctgggtgatcctggccatcagcgtgcccatctcctcctgctctgtcctgctgacggtgtgctgcatgaagaggaagaagaagaccgccaacccggagaacaacctgagctactggaacaacaccatcaccatggactacttcaacaggcatgctgtggagctgcccagggagatccagtcccttgaaacctctgaggaccagctctcagagccccgctccccagccaatggcgactatagagacactgggatggtccttgttaaccccttctgtcaagaaacactgtttgtgggaaacgatcaagtatctgagatctaactacagcaggcatcactttgccattccgtatttttcgtctctaaattataaatatacaaatatatatattataaatataacctttgtgtaaccctgacttaatgagaaacattttcagctttttttcctatgaattgtcaacatcttttttacaagtgtggtttaaaaaaaaaaaaactttacagaatgatctgtggctttataaaataaaggtatttctaagcaaagcagttgcattgattgcttctcttaataactattcttgagcacctggggatcccaggaaccctggtcaggtgaggtaagagactgacctcctgtagaagctgaatgttacagtggtcaagcgcacgattctttgagtgattcttaaagctctggttcctcttgatttggtgtgaccccatttcctcccttctcatacgcacacctgtaaagggaactggaccgcctcaggggaagacggcagactcatgcacagagaaggaaaagggaacatctcatcacctccgaggatgagtaccctggagccttatgacggcaccattggatgtcatgtttaattccatccaagttgtggatggcaggcaggagcatggagccctcaggaatccatggaggacatcaaggcatcccaaggccatattcccctaacattacttccactgctaacaacaggactgcctttccctggtgggaaaatgctccctttatgcccattcctgtatcccctccaacacccacatctgcattaaacacccgtgcctttctcttggagagggtttagatgcagatcccggccctggagctttaaaatgcttgcccttccttcttcaaggatcaaatgtttattggggttcagctttgttttctcaaaaggccatggtatcgtgcccctgaggaacatgtttatctaagaagctttgaggtagtagagcgataatttttgaaaccttcctcctgcaatctttaaaaaagaaaaaaaagattgcccaaacaaatcatttgggagaagacatcattatactcctacttggcactgcaaacctgctcgcagcaccagccggtggacttgccatccagctctcagcttccactgctccccttgttcccggccggctggctgcctccccgtgctgtgtccagcacggccaacaacgtcagaccctcagagacgcccaaggggcttccagaggtggccgcttctctattttttcctgattgtggctgagagagatgattactgctttgacacttcctttctctaaaagaaaaatagtttgatagtatattttgaatatagatgctcttatagtcagattgggaattgaacttgaatattgggtcatatgtttgtgttgttgctgtagtctatcatgacttttttctttctgcattttccttaaaaaaaaaaaaaagatggccttcaaaagtgtgttctcaatgttgtatgaacctccttcacatgagttcggttgttgtctctcttcaaagactcttcaacccacaaagaagcaactaaatgtttctctaagtttaattttctagcgtgttgttgtcttacctttttaaccttaccataatatttctgttaactgttacatttaatataccaatgtgtgtaagtatacagagaaaaatctgtttgtaaagtaaaatttatatataatatatgtaatcaaagatacatatgttatatatacatatgtggatgtatgacttatttttccttatccacagatttcagctaccatgtatatataaataaacttattttattagccagag

SEQ ID NO: 26539 - DNA, 3900 bp, Homo sapiens
acgctgacggacaaggccggggcgggccagagcctggtcggaggggcgcgcgcgggggcccgaggggcgaaggcgcgagtgcgcgagagcgcgtgcgcgagcggtggggctttctcctgagccgtcggagggagccggagcgcttctcccgagctagtctacacacatggatgggactatggaaatatacatgtgacttttaaacctgaacagtagctgttggtgatagattggtggtcatccaacatgcagaaatgaatgagcagtgaaaagcagcagagccgatgggtcatgaggatgtaagtgcgtttgaaggcttccacaccctctactccaggacagaatcatgaataaactggaggataagcaggaccagatgataccatgaagagaagtttacaggccctctattgccaactgttaagtttcctgctgatcttggcactgaccgaagcgctggcatttgccatccaggaaccatctcccagggaatctcttcaggtcctcccttcaggcactcccccgggaaccatggtgacagcaccccacagctctaccagacatacttctgtggtgatgctgacccccaatcccgatggacccccctcacaggctgcagctcccatggcaacaccgacaccccgtgcagaggggcaccctcctacgcacaccatctccaccatcgctgcgacagtaaccgccccccattctgaaagctccctgtccacagggcccgctccagcagccatggcaaccacatcctccaagccagagggccgccctcgagggcaggctgcccccaccatcctgctgacaaagccaccgggggccaccagccgccccaccacagcgcccccccgcactaccacacgcaggccccccaggcccccaggctcttcccgaaaaggggctggtaattcatcacgccctgtcccgcctgcacctggtggccactccaggagtaaagaaggacagcgaggacgaaatccaagctccacacctctggggcagaagcggcccctggggaaaatctttcagatctacaagggcaacttcacagggtctgtggaaccggagccctctaccctcacccccaggaccccactctggggctactcctcttcaccacagccccagacagtggctgcgaccacagtgcccagcaatacctcatgggcacccaccaccacctccctggggcctgcaaaggacaagccaggccttcgcagagcagcccaggggggtggttctaccttcaccagccaaggagggacaccagatgccacagcagcctcaggtgcccctgtcagtccacaagctgccccagtgccttctcagcgcccccaccacggtgacccacaggatggccccagccatagtgactcttggcttactgttacccctggcaccagcagacctctgtctaccagctctggggtcttcacggctgccacggggcccaccccagctgccttcgataccagtgtctcagccccttcccaggggattcctcagggagcatccacaaccccacaagctccaacccatccctccagggtctcagaaagcactatttctggagccaaggaggagactgtggccaccctcaccatgaccgaccgggtgcccagtcctctctccacagtggtatccacagccacaggcaatttcctcaaccgcctggtccccgccgggacctggaagcctgggacagcagggaacatctcccatgtggccgagggggacaaaccgcagcacagagccaccatctgcctgagcaagatggatatcgcctgggtgatcctggccatcagcgtgcccatctcctcctgctctgtcctgctgacggtgtgctgcatgaagaggaagaagaagaccgccaacccggagaacaacctgagctactggaacaacaccatcaccatggactacttcaacaggcatgctgtggagctgcccagggagatccagtcccttgaaacctctgaggaccagctctcagagccccgctccccagccaatggcgactatagagacactgggatggtccttgttaaccccttctgtcaagaaacactgtttgtgggaaacgatcaagtatctgagatctaactacagcaggcatcactttgccattccgtatttttcgtctctaaattataaatatacaaatatatatattataaatataacctttgtgtaaccctgacttaatgagaaacattttcagctttttttcctatgaattgtcaacatcttttttacaagtgtggtttaaaaaaaaaaaaactttacagaatgatctgtggctttataaaataaaggtatttctaagcaaagcagttgcattgattgcttctcttaataactattcttgagcacctggggatcccaggaaccctggtcaggtgaggtaagagactgacctcctgtagaagctgaatgttacagtggtcaagcgcacgattctttgagtgattcttaaagctctggttcctcttgatttggtgtgaccccatttcctcccttctcatacgcacacctgtaaagggaactggaccgcctcaggggaagacggcagactcatgcacagagaaggaaaagggaacatctcatcacctccgaggatgagtaccctggagccttatgacggcaccattggatgtcatgtttaattccatccaagttgtggatggcaggcaggagcatggagccctcaggaatccatggaggacatcaaggcatcccaaggccatattcccctaacattacttccactgctaacaacaggactgcctttccctggtgggaaaatgctccctttatgcccattcctgtatcccctccaacacccacatctgcattaaacacccgtgcctttctcttggagagggtttagatgcagatcccggccctggagctttaaaatgcttgcccttccttcttcaaggatcaaatgtttattggggttcagctttgttttctcaaaaggccatggtatcgtgcccctgaggaacatgtttatctaagaagctttgaggtagtagagcgataatttttgaaaccttcctcctgcaatctttaaaaaagaaaaaaaagattgcccaaacaaatcatttgggagaagacatcattatactcctacttggcactgcaaacctgctcgcagcaccagccggtggacttgccatccagctctcagcttccactgctccccttgttcccggccggctggctgcctccccgtgctgtgtccagcacggccaacaacgtcagaccctcagagacgcccaaggggcttccagaggtggccgcttctctattttttcctgattgtggctgagagagatgattactgctttgacacttcctttctctaaaagaaaaatagtttgatagtatattttgaatatagatgctcttatagtcagattgggaattgaacttgaatattgggtcatatgtttgtgttgttgctgtagtctatcatgacttttttctttctgcattttccttaaaaaaaaaaaaaagatggccttcaaaagtgtgttctcaatgttgtatgaacctccttcacatgagttcggttgttgtctctcttcaaagactcttcaacccacaaagaagcaactaaatgtttctctaagtttaattttctagcgtgttgttgtcttacctttttaaccttaccataatatttctgttaactgttacatttaatataccaatgtgtgtaagtatacagagaaaaatctgtttgtaaagtaaaatttatatataatatatgtaatcaaagatacatatgttatatatacatatgtggatgtatgacttatttttccttatccacagatttcagctaccatgtatatataaataaacttattttattagccagag

SEQ ID NO: 26540 - DNA, 4041 bp, Homo sapiens
acgctgacggacaaggccggggcgggccagagcctggtcggaggggcgcgcgcgggggcccgaggggcgaaggcgcgagtgcgcgagagcgcgtgcgcgagcggtggggctttctcctgagccgtcggagggagccggagcgcttctcccgagttggtgatagattggtggtcatccaacatgcagaaatgaatgagcagtgaaaagcagcagagccgatgggtcatgaggatgtaagtgcgtttgaaggcttccacaccctctactccaggacagaatcatgaataaactggaggataagcaggaccagatgataccatgaagagaagtttacaggccctctattgccaactgttaaatctccatcagacacctgggaatcacagctggggcccctgctttggccgtttgtcctgctggaatctgatggaggaaagacgctctgagagagtaattagacgcagacagagatctctctccatagtcagaggcagcctagcaggggctgaaggaactgcctgaggatgacaaagaaggggatccatgaacaaggaggtgctaacaggtttcctgctgatcttggcactgaccgaagcgctggcatttgccatccaggaaccatctcccagggaatctcttcaggtcctcccttcaggcactcccccgggaaccatggtgacagcaccccacagctctaccagacatacttctgtggtgatgctgacccccaatcccgatggacccccctcacaggctgcagctcccatggcaacaccgacaccccgtgcagaggggcaccctcctacgcacaccatctccaccatcgctgcgacagtaaccgccccccattctgaaagctccctgtccacagggcccgctccagcagccatggcaaccacatcctccaagccagagggccgccctcgagggcaggctgcccccaccatcctgctgacaaagccaccgggggccaccagccgccccaccacagcgcccccccgcactaccacacgcaggccccccaggcccccaggctcttcccgaaaaggggctggtaattcatcacgccctgtcccgcctgcacctggtggccactccaggagtaaagaaggacagcgaggacgaaatccaagctccacacctctggggcagaagcggcccctggggaaaatctttcagatctacaagggcaacttcacagggtctgtggaaccggagccctctaccctcacccccaggaccccactctggggctactcctcttcaccacagccccagacagtggctgcgaccacagtgcccagcaatacctcatgggcacccaccaccacctccctggggcctgcaaaggacaagccaggccttcgcagagcagcccaggggggtggttctaccttcaccagccaaggagggacaccagatgccacagcagcctcaggtgcccctgtcagtccacaagctgccccagtgccttctcagcgcccccaccacggtgacccacaggatggccccagccatagtgactcttggcttactgttacccctggcaccagcagacctctgtctaccagctctggggtcttcacggctgccacggggcccaccccagctgccttcgataccagtgtctcagccccttcccaggggattcctcagggagcatccacaaccccacaagctccaacccatccctccagggtctcagaaagcactatttctggagccaaggaggagactgtggccaccctcaccatgaccgaccgggtgcccagtcctctctccacagtggtatccacagccacaggcaatttcctcaaccgcctggtccccgccgggacctggaagcctgggacagcagggaacatctcccatgtggccgagggggacaaaccgcagcacagagccaccatctgcctgagcaagatggatatcgcctgggtgatcctggccatcagcgtgcccatctcctcctgctctgtcctgctgacggtgtgctgcatgaagaggaagaagaagaccgccaacccggagaacaacctgagctactggaacaacaccatcaccatggactacttcaacaggcatgctgtggagctgcccagggagatccagtcccttgaaacctctgaggaccagctctcagagccccgctccccagccaatggcgactatagagacactgggatggtccttgttaaccccttctgtcaagaaacactgtttgtgggaaacgatcaagtatctgagatctaactacagcaggcatcactttgccattccgtatttttcgtctctaaattataaatatacaaatatatatattataaatataacctttgtgtaaccctgacttaatgagaaacattttcagctttttttcctatgaattgtcaacatcttttttacaagtgtggtttaaaaaaaaaaaaactttacagaatgatctgtggctttataaaataaaggtatttctaagcaaagcagttgcattgattgcttctcttaataactattcttgagcacctggggatcccaggaaccctggtcaggtgaggtaagagactgacctcctgtagaagctgaatgttacagtggtcaagcgcacgattctttgagtgattcttaaagctctggttcctcttgatttggtgtgaccccatttcctcccttctcatacgcacacctgtaaagggaactggaccgcctcaggggaagacggcagactcatgcacagagaaggaaaagggaacatctcatcacctccgaggatgagtaccctggagccttatgacggcaccattggatgtcatgtttaattccatccaagttgtggatggcaggcaggagcatggagccctcaggaatccatggaggacatcaaggcatcccaaggccatattcccctaacattacttccactgctaacaacaggactgcctttccctggtgggaaaatgctccctttatgcccattcctgtatcccctccaacacccacatctgcattaaacacccgtgcctttctcttggagagggtttagatgcagatcccggccctggagctttaaaatgcttgcccttccttcttcaaggatcaaatgtttattggggttcagctttgttttctcaaaaggccatggtatcgtgcccctgaggaacatgtttatctaagaagctttgaggtagtagagcgataatttttgaaaccttcctcctgcaatctttaaaaaagaaaaaaaagattgcccaaacaaatcatttgggagaagacatcattatactcctacttggcactgcaaacctgctcgcagcaccagccggtggacttgccatccagctctcagcttccactgctccccttgttcccggccggctggctgcctccccgtgctgtgtccagcacggccaacaacgtcagaccctcagagacgcccaaggggcttccagaggtggccgcttctctattttttcctgattgtggctgagagagatgattactgctttgacacttcctttctctaaaagaaaaatagtttgatagtatattttgaatatagatgctcttatagtcagattgggaattgaacttgaatattgggtcatatgtttgtgttgttgctgtagtctatcatgacttttttctttctgcattttccttaaaaaaaaaaaaaagatggccttcaaaagtgtgttctcaatgttgtatgaacctccttcacatgagttcggttgttgtctctcttcaaagactcttcaacccacaaagaagcaactaaatgtttctctaagtttaattttctagcgtgttgttgtcttacctttttaaccttaccataatatttctgttaactgttacatttaatataccaatgtgtgtaagtatacagagaaaaatctgtttgtaaagtaaaatttatatataatatatgtaatcaaagatacatatgttatatatacatatgtggatgtatgacttatttttccttatccacagatttcagctaccatgtatatataaataaacttattttattagccagag

SEQ ID NO: 26541 - DNA, 3612 bp, Homo sapiens
ggtgaggcggcagcttcatgaggaaggagaatgcattgggaagcaagaaaacagaatcatgaataaactggaggataagcaggaccagatgataccatgaagagaagtttacaggccctctattgccaactgttaagtttcctgctgatcttggcactgaccgaagcgctggcatttgccatccaggaaccatctcccagggaatctcttcaggtcctcccttcaggcactcccccgggaaccatggtgacagcaccccacagctctaccagacatacttctgtggtgatgctgacccccaatcccgatggacccccctcacaggctgcagctcccatggcaacaccgacaccccgtgcagaggggcaccctcctacgcacaccatctccaccatcgctgcgacagtaaccgccccccattctgaaagctccctgtccacagggcccgctccagcagccatggcaaccacatcctccaagccagagggccgccctcgagggcaggctgcccccaccatcctgctgacaaagccaccgggggccaccagccgccccaccacagcgcccccccgcactaccacacgcaggccccccaggcccccaggctcttcccgaaaaggggctggtaattcatcacgccctgtcccgcctgcacctggtggccactccaggagtaaagaaggacagcgaggacgaaatccaagctccacacctctggggcagaagcggcccctggggaaaatctttcagatctacaagggcaacttcacagggtctgtggaaccggagccctctaccctcacccccaggaccccactctggggctactcctcttcaccacagccccagacagtggctgcgaccacagtgcccagcaatacctcatgggcacccaccaccacctccctggggcctgcaaaggacaagccaggccttcgcagagcagcccaggggggtggttctaccttcaccagccaaggagggacaccagatgccacagcagcctcaggtgcccctgtcagtccacaagctgccccagtgccttctcagcgcccccaccacggtgacccacaggatggccccagccatagtgactcttggcttactgttacccctggcaccagcagacctctgtctaccagctctggggtcttcacggctgccacggggcccaccccagctgccttcgataccagtgtctcagccccttcccaggggattcctcagggagcatccacaaccccacaagctccaacccatccctccagggtctcagaaagcactatttctggagccaaggaggagactgtggccaccctcaccatgaccgaccgggtgcccagtcctctctccacagtggtatccacagccacaggcaatttcctcaaccgcctggtccccgccgggacctggaagcctgggacagcagggaacatctcccatgtggccgagggggacaaaccgcagcacagagccaccatctgcctgagcaagatggatatcgcctgggtgatcctggccatcagcgtgcccatctcctcctgctctgtcctgctgacggtgtgctgcatgaagaggaagaagaagaccgccaacccggagaacaacctgagctactggaacaacaccatcaccatggactacttcaacaggcatgctgtggagctgcccagggagatccagtcccttgaaacctctgaggaccagctctcagagccccgctccccagccaatggcgactatagagacactgggatggtccttgttaaccccttctgtcaagaaacactgtttgtgggaaacgatcaagtatctgagatctaactacagcaggcatcactttgccattccgtatttttcgtctctaaattataaatatacaaatatatatattataaatataacctttgtgtaaccctgacttaatgagaaacattttcagctttttttcctatgaattgtcaacatcttttttacaagtgtggtttaaaaaaaaaaaaactttacagaatgatctgtggctttataaaataaaggtatttctaagcaaagcagttgcattgattgcttctcttaataactattcttgagcacctggggatcccaggaaccctggtcaggtgaggtaagagactgacctcctgtagaagctgaatgttacagtggtcaagcgcacgattctttgagtgattcttaaagctctggttcctcttgatttggtgtgaccccatttcctcccttctcatacgcacacctgtaaagggaactggaccgcctcaggggaagacggcagactcatgcacagagaaggaaaagggaacatctcatcacctccgaggatgagtaccctggagccttatgacggcaccattggatgtcatgtttaattccatccaagttgtggatggcaggcaggagcatggagccctcaggaatccatggaggacatcaaggcatcccaaggccatattcccctaacattacttccactgctaacaacaggactgcctttccctggtgggaaaatgctccctttatgcccattcctgtatcccctccaacacccacatctgcattaaacacccgtgcctttctcttggagagggtttagatgcagatcccggccctggagctttaaaatgcttgcccttccttcttcaaggatcaaatgtttattggggttcagctttgttttctcaaaaggccatggtatcgtgcccctgaggaacatgtttatctaagaagctttgaggtagtagagcgataatttttgaaaccttcctcctgcaatctttaaaaaagaaaaaaaagattgcccaaacaaatcatttgggagaagacatcattatactcctacttggcactgcaaacctgctcgcagcaccagccggtggacttgccatccagctctcagcttccactgctccccttgttcccggccggctggctgcctccccgtgctgtgtccagcacggccaacaacgtcagaccctcagagacgcccaaggggcttccagaggtggccgcttctctattttttcctgattgtggctgagagagatgattactgctttgacacttcctttctctaaaagaaaaatagtttgatagtatattttgaatatagatgctcttatagtcagattgggaattgaacttgaatattgggtcatatgtttgtgttgttgctgtagtctatcatgacttttttctttctgcattttccttaaaaaaaaaaaaaagatggccttcaaaagtgtgttctcaatgttgtatgaacctccttcacatgagttcggttgttgtctctcttcaaagactcttcaacccacaaagaagcaactaaatgtttctctaagtttaattttctagcgtgttgttgtcttacctttttaaccttaccataatatttctgttaactgttacatttaatataccaatgtgtgtaagtatacagagaaaaatctgtttgtaaagtaaaatttatatataatatatgtaatcaaagatacatatgttatatatacatatgtggatgtatgacttatttttccttatccacagatttcagctaccatgtatatataaataaacttattttattagccagag

SEQ ID NO: 26542 - DNA, 3811 bp, Homo sapiens
  misc_feature (45)..(45): n is a, c, g, or t
gtttgcaaagacagagcctctcatgagaacttggatggtggagtntaaacactcatttaaaaataaatccagatgtagttggctgcagtcatctgacagaaccctgattctctcttcaataatgacgttcatttgtccctcattaattgagagttcttaataatttctccagggtaagaaaactgagtcacacaaggatatatttgtgtaacacaatttcaaaaaggcaaactcttgctcttgttaacgacagaatcatgaataaactggaggataagcaggaccagatgataccatgaagagaagtttacaggccctctattgccaactgttaagtttcctgctgatcttggcactgaccgaagcgctggcatttgccatccaggaaccatctcccagggaatctcttcaggtcctcccttcaggcactcccccgggaaccatggtgacagcaccccacagctctaccagacatacttctgtggtgatgctgacccccaatcccgatggacccccctcacaggctgcagctcccatggcaacaccgacaccccgtgcagaggggcaccctcctacgcacaccatctccaccatcgctgcgacagtaaccgccccccattctgaaagctccctgtccacagggcccgctccagcagccatggcaaccacatcctccaagccagagggccgccctcgagggcaggctgcccccaccatcctgctgacaaagccaccgggggccaccagccgccccaccacagcgcccccccgcactaccacacgcaggccccccaggcccccaggctcttcccgaaaaggggctggtaattcatcacgccctgtcccgcctgcacctggtggccactccaggagtaaagaaggacagcgaggacgaaatccaagctccacacctctggggcagaagcggcccctggggaaaatctttcagatctacaagggcaacttcacagggtctgtggaaccggagccctctaccctcacccccaggaccccactctggggctactcctcttcaccacagccccagacagtggctgcgaccacagtgcccagcaatacctcatgggcacccaccaccacctccctggggcctgcaaaggacaagccaggccttcgcagagcagcccaggggggtggttctaccttcaccagccaaggagggacaccagatgccacagcagcctcaggtgcccctgtcagtccacaagctgccccagtgccttctcagcgcccccaccacggtgacccacaggatggccccagccatagtgactcttggcttactgttacccctggcaccagcagacctctgtctaccagctctggggtcttcacggctgccacggggcccaccccagctgccttcgataccagtgtctcagccccttcccaggggattcctcagggagcatccacaaccccacaagctccaacccatccctccagggtctcagaaagcactatttctggagccaaggaggagactgtggccaccctcaccatgaccgaccgggtgcccagtcctctctccacagtggtatccacagccacaggcaatttcctcaaccgcctggtccccgccgggacctggaagcctgggacagcagggaacatctcccatgtggccgagggggacaaaccgcagcacagagccaccatctgcctgagcaagatggatatcgcctgggtgatcctggccatcagcgtgcccatctcctcctgctctgtcctgctgacggtgtgctgcatgaagaggaagaagaagaccgccaacccggagaacaacctgagctactggaacaacaccatcaccatggactacttcaacaggcatgctgtggagctgcccagggagatccagtcccttgaaacctctgaggaccagctctcagagccccgctccccagccaatggcgactatagagacactgggatggtccttgttaaccccttctgtcaagaaacactgtttgtgggaaacgatcaagtatctgagatctaactacagcaggcatcactttgccattccgtatttttcgtctctaaattataaatatacaaatatatatattataaatataacctttgtgtaaccctgacttaatgagaaacattttcagctttttttcctatgaattgtcaacatcttttttacaagtgtggtttaaaaaaaaaaaaactttacagaatgatctgtggctttataaaataaaggtatttctaagcaaagcagttgcattgattgcttctcttaataactattcttgagcacctggggatcccaggaaccctggtcaggtgaggtaagagactgacctcctgtagaagctgaatgttacagtggtcaagcgcacgattctttgagtgattcttaaagctctggttcctcttgatttggtgtgaccccatttcctcccttctcatacgcacacctgtaaagggaactggaccgcctcaggggaagacggcagactcatgcacagagaaggaaaagggaacatctcatcacctccgaggatgagtaccctggagccttatgacggcaccattggatgtcatgtttaattccatccaagttgtggatggcaggcaggagcatggagccctcaggaatccatggaggacatcaaggcatcccaaggccatattcccctaacattacttccactgctaacaacaggactgcctttccctggtgggaaaatgctccctttatgcccattcctgtatcccctccaacacccacatctgcattaaacacccgtgcctttctcttggagagggtttagatgcagatcccggccctggagctttaaaatgcttgcccttccttcttcaaggatcaaatgtttattggggttcagctttgttttctcaaaaggccatggtatcgtgcccctgaggaacatgtttatctaagaagctttgaggtagtagagcgataatttttgaaaccttcctcctgcaatctttaaaaaagaaaaaaaagattgcccaaacaaatcatttgggagaagacatcattatactcctacttggcactgcaaacctgctcgcagcaccagccggtggacttgccatccagctctcagcttccactgctccccttgttcccggccggctggctgcctccccgtgctgtgtccagcacggccaacaacgtcagaccctcagagacgcccaaggggcttccagaggtggccgcttctctattttttcctgattgtggctgagagagatgattactgctttgacacttcctttctctaaaagaaaaatagtttgatagtatattttgaatatagatgctcttatagtcagattgggaattgaacttgaatattgggtcatatgtttgtgttgttgctgtagtctatcatgacttttttctttctgcattttccttaaaaaaaaaaaaaagatggccttcaaaagtgtgttctcaatgttgtatgaacctccttcacatgagttcggttgttgtctctcttcaaagactcttcaacccacaaagaagcaactaaatgtttctctaagtttaattttctagcgtgttgttgtcttacctttttaaccttaccataatatttctgttaactgttacatttaatataccaatgtgtgtaagtatacagagaaaaatctgtttgtaaagtaaaatttatatataatatatgtaatcaaagatacatatgttatatatacatatgtggatgtatgacttatttttccttatccacagatttcagctaccatgtatatataaataaacttattttattagccagag

SEQ ID NO: 26543 - DNA, 3924 bp, Homo sapiens
acgctgacggacaaggccggggcgggccagagcctggtcggaggggcgcgcgcgggggcccgaggggcgaaggcgcgagtgcgcgagagcgcgtgcgcgagcggtggggctttctcctgagccgtcggagggagccggagcgcttctcccgagttggtgatagattggtggtcatccaacatgcagaaatgaatgagcagtgaaaagcagcagagccgatgggtcatgaggatgtaagtgcgtttgaaggcttccacaccctctactccaggacagaatcatgaataaactggaggataagcaggaccagatgataccatgaagagaagtttacaggccctctattgccaactgttaagtttcctgctgatcttggcactgaccgaagcgctggcatttgccatccaggaaccatctcccagggaatctcttcaggtcctcccttcaggcactcccccgggaaccatggtgacagcaccccacagctctaccagacatacttctgtggtgatgctgacccccaatcccgatggacccccctcacaggctgcagctcccatggcaacaccgacaccccgtgcagaggggcaccctcctacgcacaccatctccaccatcgctgcgacagtaaccgccccccattctgaaagctccctgtccacagggcccgctccagcagccatggcaaccacatcctccaagccagagggccgccctcgagggcaggctgcccccaccatcctgctgacaaagccaccgggggccaccagccgccccaccacagcgcccccccgcactaccacacgcaggccccccaggcccccaggctcttcccgaaaaggggctggtaattcatcacgccctgtcccgcctgcacctggtggccactccaggagtaaagaaggacagcgaggacgaaatccaagctccacacctctggggcagaagcggcccctggggaaaatctttcagatctacaagggcaacttcacagggtctgtggaaccggagccctctaccctcacccccaggaccccactctggggctactcctcttcaccacagccccagacagtggctgcgaccacagtgcccagcaatacctcatgggcacccaccaccacctccctggggcctgcaaaggacaagccaggccttcgcagagcagcccaggggggtggttctaccttcaccagccaaggagggacaccagatgccacagcagcctcaggtgcccctgtcagtccacaagctgccccagtgccttctcagcgcccccaccacggtgacccacaggatggccccagccatagtgactcttggcttactgttacccctggcaccagcagacctctgtctaccagctctggggtcttcacggctgccacggggcccaccccagctgccttcgataccagtgtctcagccccttcccaggggattcctcagggagcatccacaaccccacaagctccaacccatccctccagggtctcagaaagcactatttctggagccaaggaggagactgtggccaccctcaccatgaccgaccgggtgcccagtcctctctccacagtggtatccacagccacaggcaatttcctcaaccgcctggtccccgccgggacctggaagcctgggacagcagggaacatctcccatgtggccgagggggacaaaccgcagcacagagccaccatctgcctgagcaagatggatatcgcctgggtgatcctggccatcagcgtgcccatctcctcctgctctgtcctgctgacggtgtgctgcatgaagaggaagaagaagaccgccaacccggagaacaacctgagctactggaacaacaccatcaccatggactacttcaacaggcatgctgtggagctgcccagggagatccagtcccttgaaacctctgaggaccagctctcagagccccgctccccagccaatggcgactatagagacactgggatggtccttgttaaccccttctgtcaagaaacactgtttgtgggaaacgatcaagtatctgagatctaactacagcaggcatcactttgccattccgtatttttcgtctctaaattataaatatacaaatatatatattataaatataacctttgtgtaaccctgacttaatgagaaacattttcagctttttttcctatgaattgtcaacatcttttttacaagtgtggtttaaaaaaaaaaaaactttacagaatgatctgtggctttataaaataaaggtatttctaagcaaagcagttgcattgattgcttctcttaataactattcttgagcacctggggatcccaggaaccctggtcaggtgaggtaagagactgacctcctgtagaagctgaatgttacagtggtcaagcgcacgattctttgagtgattcttaaagctctggttcctcttgatttggtgtgaccccatttcctcccttctcatacgcacacctgtaaagggaactggaccgcctcaggggaagacggcagactcatgcacagagaaggaaaagggaacatctcatcacctccgaggatgagtaccctggagccttatgacggcaccattggatgtcatgtttaattccatccaagttgtggatggcaggcaggagcatggagccctcaggaatccatggaggacatcaaggcatcccaaggccatattcccctaacattacttccactgctaacaacaggactgcctttccctggtgggaaaatgctccctttatgcccattcctgtatcccctccaacacccacatctgcattaaacacccgtgcctttctcttggagagggtttagatgcagatcccggccctggagctttaaaatgcttgcccttccttcttcaaggatcaaatgtttattggggttcagctttgttttctcaaaaggccatggtatcgtgcccctgaggaacatgtttatctaagaagctttgaggtagtagagcgataatttttgaaaccttcctcctgcaatctttaaaaaagaaaaaaaagattgcccaaacaaatcatttgggagaagacatcattatactcctacttggcactgcaaacctgctcgcagcaccagccggtggacttgccatccagctctcagcttccactgctccccttgttcccggccggctggctgcctccccgtgctgtgtccagcacggccaacaacgtcagaccctcagagacgcccaaggggcttccagaggtggccgcttctctattttttcctgattgtggctgagagagatgattactgctttgacacttcctttctctaaaagaaaaatagtttgatagtatattttgaatatagatgctcttatagtcagattgggaattgaacttgaatattgggtcatatgtttgtgttgttgctgtagtctatcatgacttttttctttctgcattttccttaaaaaaaaaaaaaagatggccttcaaaagtgtgttctcaatgttgtatgaacctccttcacatgagttcggttgttgtctctcttcaaagactcttcaacccacaaagaagcaactaaatgtttctctaagtttaattttctagcgtgttgttgtcttacctttttaaccttaccataatatttctgttaactgttacatttaatataccaatgtgtgtaagtatacagagaaaaatctgtttgtaaagtaaaatttatatataatatatgtaatcaaagatacatatgttatatatacatatgtggatgtatgacttatttttccttatccacagatttcagctaccatgtatatataaataaacttattttattagccagaggattctgttgctaatacattttgcattcttttcaagataagctctaagtcttccttaagcagtaccaacaccactttatatccatctgta

SEQ ID NO: 26544 - DNA, 3891 bp, Homo sapiens
agcggggggagcaagacggcagcatctacggttctttctgctcaggaatgggaacccagagtgggcagtagagcggaggcaagccatgcagaggcaggagcagatgagaccctagatgccacgagaagctaaacatgtggggaaaataaagagcagattaactcaggaaaattatatggggagctcttatgctactctgaagatctgagactcgttggagaatttacaatcccaaattaactcagggagaattccaactagactctgaaatgaattagatggagatttaaaatagggcaatttagtgggaagagatacttaatttgaagacagaatcatgaataaactggaggataagcaggaccagatgataccatgaagagaagtttacaggccctctattgccaactgttaagtttcctgctgatcttggcactgaccgaagcgctggcatttgccatccaggaaccatctcccagggaatctcttcaggtcctcccttcaggcactcccccgggaaccatggtgacagcaccccacagctctaccagacatacttctgtggtgatgctgacccccaatcccgatggacccccctcacaggctgcagctcccatggcaacaccgacaccccgtgcagaggggcaccctcctacgcacaccatctccaccatcgctgcgacagtaaccgccccccattctgaaagctccctgtccacagggcccgctccagcagccatggcaaccacatcctccaagccagagggccgccctcgagggcaggctgcccccaccatcctgctgacaaagccaccgggggccaccagccgccccaccacagcgcccccccgcactaccacacgcaggccccccaggcccccaggctcttcccgaaaaggggctggtaattcatcacgccctgtcccgcctgcacctggtggccactccaggagtaaagaaggacagcgaggacgaaatccaagctccacacctctggggcagaagcggcccctggggaaaatctttcagatctacaagggcaacttcacagggtctgtggaaccggagccctctaccctcacccccaggaccccactctggggctactcctcttcaccacagccccagacagtggctgcgaccacagtgcccagcaatacctcatgggcacccaccaccacctccctggggcctgcaaaggacaagccaggccttcgcagagcagcccaggggggtggttctaccttcaccagccaaggagggacaccagatgccacagcagcctcaggtgcccctgtcagtccacaagctgccccagtgccttctcagcgcccccaccacggtgacccacaggatggccccagccatagtgactcttggcttactgttacccctggcaccagcagacctctgtctaccagctctggggtcttcacggctgccacggggcccaccccagctgccttcgataccagtgtctcagccccttcccaggggattcctcagggagcatccacaaccccacaagctccaacccatccctccagggtctcagaaagcactatttctggagccaaggaggagactgtggccaccctcaccatgaccgaccgggtgcccagtcctctctccacagtggtatccacagccacaggcaatttcctcaaccgcctggtccccgccgggacctggaagcctgggacagcagggaacatctcccatgtggccgagggggacaaaccgcagcacagagccaccatctgcctgagcaagatggatatcgcctgggtgatcctggccatcagcgtgcccatctcctcctgctctgtcctgctgacggtgtgctgcatgaagaggaagaagaagaccgccaacccggagaacaacctgagctactggaacaacaccatcaccatggactacttcaacaggcatgctgtggagctgcccagggagatccagtcccttgaaacctctgaggaccagctctcagagccccgctccccagccaatggcgactatagagacactgggatggtccttgttaaccccttctgtcaagaaacactgtttgtgggaaacgatcaagtatctgagatctaactacagcaggcatcactttgccattccgtatttttcgtctctaaattataaatatacaaatatatatattataaatataacctttgtgtaaccctgacttaatgagaaacattttcagctttttttcctatgaattgtcaacatcttttttacaagtgtggtttaaaaaaaaaaaaactttacagaatgatctgtggctttataaaataaaggtatttctaagcaaagcagttgcattgattgcttctcttaataactattcttgagcacctggggatcccaggaaccctggtcaggtgaggtaagagactgacctcctgtagaagctgaatgttacagtggtcaagcgcacgattctttgagtgattcttaaagctctggttcctcttgatttggtgtgaccccatttcctcccttctcatacgcacacctgtaaagggaactggaccgcctcaggggaagacggcagactcatgcacagagaaggaaaagggaacatctcatcacctccgaggatgagtaccctggagccttatgacggcaccattggatgtcatgtttaattccatccaagttgtggatggcaggcaggagcatggagccctcaggaatccatggaggacatcaaggcatcccaaggccatattcccctaacattacttccactgctaacaacaggactgcctttccctggtgggaaaatgctccctttatgcccattcctgtatcccctccaacacccacatctgcattaaacacccgtgcctttctcttggagagggtttagatgcagatcccggccctggagctttaaaatgcttgcccttccttcttcaaggatcaaatgtttattggggttcagctttgttttctcaaaaggccatggtatcgtgcccctgaggaacatgtttatctaagaagctttgaggtagtagagcgataatttttgaaaccttcctcctgcaatctttaaaaaagaaaaaaaagattgcccaaacaaatcatttgggagaagacatcattatactcctacttggcactgcaaacctgctcgcagcaccagccggtggacttgccatccagctctcagcttccactgctccccttgttcccggccggctggctgcctccccgtgctgtgtccagcacggccaacaacgtcagaccctcagagacgcccaaggggcttccagaggtggccgcttctctattttttcctgattgtggctgagagagatgattactgctttgacacttcctttctctaaaagaaaaatagtttgatagtatattttgaatatagatgctcttatagtcagattgggaattgaacttgaatattgggtcatatgtttgtgttgttgctgtagtctatcatgacttttttctttctgcattttccttaaaaaaaaaaaaaagatggccttcaaaagtgtgttctcaatgttgtatgaacctccttcacatgagttcggttgttgtctctcttcaaagactcttcaacccacaaagaagcaactaaatgtttctctaagtttaattttctagcgtgttgttgtcttacctttttaaccttaccataatatttctgttaactgttacatttaatataccaatgtgtgtaagtatacagagaaaaatctgtttgtaaagtaaaatttatatataatatatgtaatcaaagatacatatgttatatatacatatgtggatgtatgacttatttttccttatccacagatttcagctaccatgtatatataaataaacttattttattagccagag

SEQ ID NO: 26545 - DNA, 3692 bp, Homo sapiens
gaggtaaactgtgtgactgcatggagagccatgagctgcaatagtcacctgagaggaagctgagtaactaaagcaaggcaaagcaaggataatgaagagaagaaaagaaattttaaaagacattcgtgcgacagaatcatgaataaactggaggataagcaggaccagatgataccatgaagagaagtttacaggccctctattgccaactgttaagtttcctgctgatcttggcactgaccgaagcgctggcatttgccatccaggaaccatctcccagggaatctcttcaggtcctcccttcaggcactcccccgggaaccatggtgacagcaccccacagctctaccagacatacttctgtggtgatgctgacccccaatcccgatggacccccctcacaggctgcagctcccatggcaacaccgacaccccgtgcagaggggcaccctcctacgcacaccatctccaccatcgctgcgacagtaaccgccccccattctgaaagctccctgtccacagggcccgctccagcagccatggcaaccacatcctccaagccagagggccgccctcgagggcaggctgcccccaccatcctgctgacaaagccaccgggggccaccagccgccccaccacagcgcccccccgcactaccacacgcaggccccccaggcccccaggctcttcccgaaaaggggctggtaattcatcacgccctgtcccgcctgcacctggtggccactccaggagtaaagaaggacagcgaggacgaaatccaagctccacacctctggggcagaagcggcccctggggaaaatctttcagatctacaagggcaacttcacagggtctgtggaaccggagccctctaccctcacccccaggaccccactctggggctactcctcttcaccacagccccagacagtggctgcgaccacagtgcccagcaatacctcatgggcacccaccaccacctccctggggcctgcaaaggacaagccaggccttcgcagagcagcccaggggggtggttctaccttcaccagccaaggagggacaccagatgccacagcagcctcaggtgcccctgtcagtccacaagctgccccagtgccttctcagcgcccccaccacggtgacccacaggatggccccagccatagtgactcttggcttactgttacccctggcaccagcagacctctgtctaccagctctggggtcttcacggctgccacggggcccaccccagctgccttcgataccagtgtctcagccccttcccaggggattcctcagggagcatccacaaccccacaagctccaacccatccctccagggtctcagaaagcactatttctggagccaaggaggagactgtggccaccctcaccatgaccgaccgggtgcccagtcctctctccacagtggtatccacagccacaggcaatttcctcaaccgcctggtccccgccgggacctggaagcctgggacagcagggaacatctcccatgtggccgagggggacaaaccgcagcacagagccaccatctgcctgagcaagatggatatcgcctgggtgatcctggccatcagcgtgcccatctcctcctgctctgtcctgctgacggtgtgctgcatgaagaggaagaagaagaccgccaacccggagaacaacctgagctactggaacaacaccatcaccatggactacttcaacaggcatgctgtggagctgcccagggagatccagtcccttgaaacctctgaggaccagctctcagagccccgctccccagccaatggcgactatagagacactgggatggtccttgttaaccccttctgtcaagaaacactgtttgtgggaaacgatcaagtatctgagatctaactacagcaggcatcactttgccattccgtatttttcgtctctaaattataaatatacaaatatatatattataaatataacctttgtgtaaccctgacttaatgagaaacattttcagctttttttcctatgaattgtcaacatcttttttacaagtgtggtttaaaaaaaaaaaaactttacagaatgatctgtggctttataaaataaaggtatttctaagcaaagcagttgcattgattgcttctcttaataactattcttgagcacctggggatcccaggaaccctggtcaggtgaggtaagagactgacctcctgtagaagctgaatgttacagtggtcaagcgcacgattctttgagtgattcttaaagctctggttcctcttgatttggtgtgaccccatttcctcccttctcatacgcacacctgtaaagggaactggaccgcctcaggggaagacggcagactcatgcacagagaaggaaaagggaacatctcatcacctccgaggatgagtaccctggagccttatgacggcaccattggatgtcatgtttaattccatccaagttgtggatggcaggcaggagcatggagccctcaggaatccatggaggacatcaaggcatcccaaggccatattcccctaacattacttccactgctaacaacaggactgcctttccctggtgggaaaatgctccctttatgcccattcctgtatcccctccaacacccacatctgcattaaacacccgtgcctttctcttggagagggtttagatgcagatcccggccctggagctttaaaatgcttgcccttccttcttcaaggatcaaatgtttattggggttcagctttgttttctcaaaaggccatggtatcgtgcccctgaggaacatgtttatctaagaagctttgaggtagtagagcgataatttttgaaaccttcctcctgcaatctttaaaaaagaaaaaaaagattgcccaaacaaatcatttgggagaagacatcattatactcctacttggcactgcaaacctgctcgcagcaccagccggtggacttgccatccagctctcagcttccactgctccccttgttcccggccggctggctgcctccccgtgctgtgtccagcacggccaacaacgtcagaccctcagagacgcccaaggggcttccagaggtggccgcttctctattttttcctgattgtggctgagagagatgattactgctttgacacttcctttctctaaaagaaaaatagtttgatagtatattttgaatatagatgctcttatagtcagattgggaattgaacttgaatattgggtcatatgtttgtgttgttgctgtagtctatcatgacttttttctttctgcattttccttaaaaaaaaaaaaaagatggccttcaaaagtgtgttctcaatgttgtatgaacctccttcacatgagttcggttgttgtctctcttcaaagactcttcaacccacaaagaagcaactaaatgtttctctaagtttaattttctagcgtgttgttgtcttacctttttaaccttaccataatatttctgttaactgttacatttaatataccaatgtgtgtaagtatacagagaaaaatctgtttgtaaagtaaaatttatatataatatatgtaatcaaagatacatatgttatatatacatatgtggatgtatgacttatttttccttatccacagatttcagctaccatgtatatataaataaacttattttattagccagag

SEQ ID NO: 26546 - DNA, 414 bp, Homo sapiens
agagctaggcaagcagaagagaaaggacaccagcccagacttacaggaaccctgtgactgattcacagaggcatttttttgtgtgtttattttaattttgttcttattcaagtaacattagaataaaaaataatccaactataaaaaaataaaataaataaataaaagtggcagagaacttggccaaattgtgttccagtgttttgtggaaattagaccttttgatgatatttagctgaggggatttctaaacaaagaattaaaggtacagccagttttcttcttgctactgtgataaaatgaaaggagacagataaatggaagaagaaacaactaagcaactaaaaaaaagtaacacttaatgatttggaagattctcagcctatccagatagcatgctctggacacagtgac

SEQ ID NO: 26547 - DNA, 444 bp, Homo sapiens
ctcatcacctgtggatacctgtcacatcaccgcagtcattccatatgacaacccccatgttcctctcacttctaatttttaaaagtcagtctcaaatctttaactcacagctgcaaactgtactcttaaaatatttgtgaaattgtgcagatgttatttccatctgtccttttgagaactactgatagtgtgatttgggaatatttccaattctggctgaggcagggcagggcgagggccaaacgctagggctggactgggcatagtttacatcagccacaggtgtcaccccgccggtgtcagagggtttgcttccctgaaatagtaactgtttatatcactctgcacttgtaataacatcctgccaaagggccccactttcccacaacttttacactacgcagagatctgacgtcagcgtgtgctgtgagcaaaacatcttcg

SEQ ID NO: 26548 - DNA, 1499 bp, Homo sapiens
catatttgacttggatcatttccctgactgggctaatgtgacacatattgagacttaggaagagccacaagaccacacacacagcccttaccctcctcaggactaccgaaccttctggcacaccttgtacagagttttggggttcacaccccaaaatgacccaacgatgtccacacaccaccaaaacccagccaatgggccacctcttcctccaagcccagatgcagagatggtcatgggcagctggagggtaggctcagaaatgaagggaacccctcagtgggctgctggacccatctttcccaagccttgccattatctctgtgagggaggccaggtagccgagggatcaggatgcaggctgctgtacccgctctgcctcaagcatcccccacacagggctctggttttcactcgcttcgtcctagatagtttaaatgggaatcagatcccctggttgagagctaagacaaccacctaccagtgcccatgtcccttccagctcaccttgagcagcctcagatcatctctgtcactctggaagggacaccccagccagggacggaatgcctggtcttgagcaacctcccactgctggagtgcgagtgggaatcagagcctcctgaagcctctgggaactcctcctgtggccaccaccaaaggatgaggaatctgagttgccaacttcaggacgacacctggcttgccacccacagtgcaccacaggccaacctactcccttcatcacttggttctgttttaatcgactggccccctgtcccacctctccagtgagcctccttcaactccttggtcccctgttgtctgggtcaacatttgccgagacgccttggctggcaccctctggggtcccccttttcttcccaggcaggtcatcttttctgggagatgcttcccctgccatccccaaatagctaggatcacactccaagtatgggcagtgatggcgctctgggggccacagtgggctatctaggtcctccctcacctgaggcccagagtggacacagctgttaatttccactggctatgccacttcagagtctttcatgccagcgtttgagctcctctgggatcgttgagattgagcagcgcttggtgatctctcagcaaacaacccctgcccgtgggccaatctacttgaagttactcggacaaagaccccaaagtggggcaacaactccagagaggctgtgggaatcttcagaagcccccctgtaagagacagacatgagagacaagcatcttctttcccccgcaagtccattttatttccttcttgtgctgctctggaagagaggcagtagcaaagagatgagctcctggatggcattttccagggcaggagaaagtatgagagcctcaggaaaccccatcaaggaccgagtatgtgtctggttccttgggtgggacgattcctgaccacactgtccagctcttgctctcattaaatgctctgtctcccgcggaaagctcca

SEQ ID NO: 26549 - DNA, 1554 bp, Homo sapiens
catatttgacttggatcatttccctgactgggctaatgtgacacatattgagacttaggaagagccacaagaccacacacacagcccttaccctcctcaggactaccgaaccttctggcacaccttgtacagagttttggggttcacaccccaaaatgacccaacgatgtccacacaccaccaaaacccagccaatgggccacctcttcctccaagcccagatgcagagatggtcatgggcagctggagggtaggctcagaaatgaagggaacccctcagtgggctgctggacccatctttcccaagccttgccattatctctgtgagggaggccaggtagccgagggatcaggatgcaggctgctgtacccgctctgcctcaagcatcccccacacagggctctggttttcactcgcttcgtcctagatagtttaaatgggaatcagatcccctggttgagagctaagacaaccacctaccagtgcccatgtcccttccagctcaccttgagcagcctcagatcatctctgtcactctggaagggacaccccagccagggacggaatgcctggtcttgagcaacctcccactgctggagtgcgagtgggaatcagagcctcctgaagcctctgggaactcctcctgtggccaccaccaaaggatgaggaatctgagttgccaacttcaggacgacacctggcttgccacccacagtgcaccacaggccaacctactcccttcatcacttggttctgttttaatcgactggccccctgtcccacctctccagtgagcctccttcaactccttggtcccctgttgtctgggtcaacatttgccgagacgccttggctggcaccctctggggtcccccttttcttcccaggcaggtcatcttttctgggagatgcttcccctgccatccccaaatagctaggatcacactccaagtatgggcagtgatggcgctctgggggccacagtgggctatctaggtcctccctcacctgaggcccagagtggacacagctgttaatttccactggctatgccacttcagagtctttcatgccagcgtttgagctcctctgggtaaaatcttccctttgttgactggccttcacagccatggctggtgacaacagaggatcgttgagattgagcagcgcttggtgatctctcagcaaacaacccctgcccgtgggccaatctacttgaagttactcggacaaagaccccaaagtggggcaacaactccagagaggctgtgggaatcttcagaagcccccctgtaagagacagacatgagagacaagcatcttctttcccccgcaagtccattttatttccttcttgtgctgctctggaagagaggcagtagcaaagagatgagctcctggatggcattttccagggcaggagaaagtatgagagcctcaggaaaccccatcaaggaccgagtatgtgtctggttccttgggtgggacgattcctgaccacactgtccagctcttgctctcattaaatgctctgtctcccgcggaaagctcca

SEQ ID NO: 26550 - DNA, 120 bp, Homo sapiens
aaacctcaagttaggatagcctcatagaaaggctgatgtagagagtctggcaaaactgtctctcccagaaccaggttctgtatcctctctgagtggtgccaggtattgcctgcagccctg

SEQ ID NO: 26551 - DNA, 438 bp, Homo sapiens
ttttttgagacagagtttcgctcatgttgcccaggctggagtacaactgcgcaatcgcgactcactgcaacctccgcctcccggattcaagcggttctcctgcctcagcctgccgagtagctggggctaccggtatgcgccactacgcctggctaattttttagtatttttaatagagacggggtttcgccatgttggccaggctggtctagaacgcctgacctcaggtgatccacccgcctcggcctcccaaaatgccaggattacaggcgtgagccaccactcctggccacattacttgtacttctatttggcatttaggttgttatacatttaggctactagaatgtgcttttaggatcaaccacccctagttccttgcagatttcaagaaggtacttctcgcctggtgttccccatccctggggccagtagtgg

SEQ ID NO: 26552 - DNA, 642 bp, Homo sapiens
gtctgaatccccgcatttcgccaatttgcttggagcgcagaacgccctccgcgaaaggcggctgctgatcccgactttgctccggtatcgcgcagcttgttggcctccgggtcccccgtgccatgcccccgggaggctctccacagacaccgcttgcgccgaattatacgagactgaatgggtttttttggtgtgtgtgtgcaacacaacaatttgtcagctgctgttcacaatgcgctccgccgggcggtggaaacttggctgcggtaacgcacagcaggttggagggcacgacccggaaggaaggaagaggcgaggagggaaaggcggcgaccctaggcccgctggccagccgtttccagcatcaattcagcactgagccggccgcagcagcacagggctgggggctcccggagctgcgtgccagccggggtttcggccagagccgcggaggctgcccggtggtaggtgcgactcttcacctctccggggagcggcggccgacgacccaacccacccgcagcgctgccgtcggcccggctggtcccccgcgcgggcacaaaaacaggcggcagttcgccagctctcttttcccaaacctgaaccgccaagccgaaggttcttccaaagtcgcggttcccc

SEQ ID NO: 26553 - DNA, 501 bp, Homo sapiens
ccttgccacaagtcccaggactaacacaagcaaaagactagatttaaacttgagtctttttgatgctattgcccatgagaatcactcaatttaattatacctgagtggttcactttggttcctttttcccatattatctcctcctccttcatcttttatgcatcctagagacttcttagatcctttgacaaaatgcccaggttgatcaacattgaatatgagtttttccctgaagtgtgaacagatttgtcaatccttttgtaagagaaagtttctggaaagtagttgtgaaagtggagataactttttttctttacagtttcttgctttttataaggagggtacattctaaggcaaggattctttgcttggtaagctggttattggatgtgagacaatgattaacacagcacatgtatacatatgtaacaaaccgcacgttgtgcacatgtaccctagaacttaaataaataaataaataaataaataaataaaaagaaa

SEQ ID NO: 26554 - DNA, 216 bp, Homo sapiens
tacaagcagtgatatgtacagatcttaagtgcacaattaaatgagtttagacaaatgcatatgctcatataataccatctcaattaagatacagaccactgggctgggcacagtggctcatgcctgtaatcccagcacattggggaggccaaggtgggaggatcgcttgagctcaggagtttgagaccagcctgggtaacacggagaaaccatgtc

SEQ ID NO: 26555 - DNA, 302 bp, Homo sapiens
ccttgggtattccattatagcaacagaaaatggactaaaacaagattaacttctattttgaatcatacattattgaactatgtatagatccaggacaaaccttgctccccgatattttcatccaatatacagactttatgcactgcatgggatgctcctctcttcgggattctaaccaacttcttacattttaaactctcagctcaaatgctgcactctctgtgacactgcacttgacacccctaaggcaaacttaggtgcctcttctctctctactgcacttggcatacacatcattacag

SEQ ID NO: 26556 - DNA, 1280 bp, Homo sapiens
  misc_feature (930)..(931): n is a, c, g, or t
aggggaggaagagaggacgagaggccctaagaatcagcaaccataaatcaagaaaagctctctcagccatctgacgtggctagaagctgtattgcagctttgagtgggatttgaaaaagtgaaaacagttcattcaatcaagaaagttgtttttgaaatttgataactacaggggcatggtacttgtaccgtgtcacccagtattgctagtcctggtccattttcagctcatacctgccttctagattgaaattgaggctgtgactttattttcagatcctcaaattgctcatctaagaaacatacacgttataaactgggaacagtggctcacgcctgtaatcccagcactttgggaggccaaggcgggtagatcatttgaggtcggaggttgggaccagcctggccaacatggtgaaactctatctctctgaaaatacaaaaattagctgggcatggtggcatgtgcctgtaatccgagctactcaggaggctgagataggagaatcgcttgaaccctggaggaggaggttgcagtgagccaagatggcgctactactctccaacctgggcagtagagtgagactctgtctcaaaaagaaaaaaagaaatatacaccttataaatgattgcttgtttttaaagcacaccaacttagattttcatagagaaaagtataattccatgaagtccttgccttccagagggagaatacattgtttaaaactgtatccaggcccagaaccatggctcaggactgtatttccagcactttgggaggccaaggcaggtggatcacctgagatcaggagttcgagaccagcctggccaacatggtgaacccgttttataaaatccaaagtggccaggcattgtggtgccacctgagtccaggtcttagagctgggcagaaaatgttgaccctggaanntagttgagaccaaatcaccactgcttcaactggtacaaacagatgtttgggaaaaaataaaaaaaatttgccaatcccttaaggggcgttcacaacctgcgggttaaaaggggctggaacctcgttccactatggcttggaaaaccttttcaggggataaacaaggccccgttctttccaagggggcccttgtgggggaatagggccaattttaaaacgggaattttaaacctttttttaccagcctgggatactttattaaacccccttggtggttccttcgaccctttcgctcccttctgatacctactctcttactgtggtgcgccttccttctctctgtggcgcc

SEQ ID NO: 26557 - DNA, 131 bp, Homo sapiens
ctaccatgtgggttagtttaggagtaaagctggcaacatgtgaaagtttagccctggaccctgtgactgagaggcatatcaactaactctgaattcacaccaagaataccaccttaaagcctgttatatga

SEQ ID NO: 26558 - DNA, 370 bp, Homo sapiens
tcgctagtgtgagtaatgcttctctgaacatcagtgcacaaatatttgttcaaatttctttcaattctatggggagtatgtccagaagtggaattgctggatcaaacggtaatttattgtttaattttttgagaaacagcacaccaatttttacagtggctataacatttcccattcccatcagcaatgcactagagctccaatttttccatctgcttgaaaacacctgttgttttgtgttgctgtcattgttgttgtttatcaaagccatcctaaagtgtgtgaggtggtgtaacattgtggttttgatttgcacatctctaagtattcatgatgctgaggaactttgcatgggcttactggatatttg

SEQ ID NO: 26559 - DNA, 367 bp, Homo sapiens
cataatttattgaataattcatcctttccacactgatttatagtggaatcttaattatataataatttttcatatagatatatctgttctgggctctttattctgttctagtgatcatttttgtatctctgtataatcaatatcatgatgtcttaattactctggctttattatgagttttctataagtcatagaaatgttgtacttgttctagcagctaacatttccttaattaaatacaacagtaatattcattactttttggaaccattgaccttctttcactttatatgtaaaaaattaatatgttaacattgcagttttatagagaaaaatcaaattatgaattaaattacttctaaacgta

SEQ ID NO: 26560 - DNA, 382 bp, Homo sapiens
tcttctgtcattagacattattcattcttctattttattcattgttgtaacactgcaatcataattattaaacttaaggatgtggaacaattggaaccttcatacatttctggtgagaatgtaaaatcatgcagctgctgtggaaaagtttggtggttcctcaaaaagttaaacatagaattaccacatgacccagcaattccactcctgggtgtatacctatattagtctgcttgggttaccataacaaaatacctcagactggctggctcaaacaatgggaatttttctctcacaattctggaggctggaagtccaagatagaggtgcgagaagggatggtttctggtgaggcctctccccctggcttgcagatggctgc

SEQ ID NO: 26561 - DNA, 296 bp, Homo sapiens
agtgcaaaaattggtacgggggaaacctaattttacaaaaatagaggaaataaaacagacaaattttctgtatccatggcatggagaatcatgcatgcattagaaatgctatttttaaaaagaggctttagtgggaaaactttaaaaactaaaaaataaatttagtaaagttgcagaatacaaaataaacatccaaaaataagtaggatttataaatgacaatagcaaacttcctgaaaaaacaaatcagaaacgcagttgcatttataatagctaccaaaaaaaaaaaatagatg

SEQ ID NO: 26562 - DNA, 404 bp, Homo sapiens
gtttctcagcatctcatctgtttgtatgtctcctggaagccttgcaaccctgaccctactgatagagcccagctgttgtctcttacctgttcatgacacccaccttccttgttaactgtctgatgataggctcaacggagactgaggtgtttgtaacaagggtgatagcaaacatggagcatggtactattgtggtgactttgtactgactcatcatcatcaataaaataacttacttcgtgaggaactctgcacatatttcctaacatctagttctgttctaggggttatcttaaacttgggaccaactttctaattttttatctctcagggtgaaatgcatccctttcttctttatcccatgcataggtaaacattacccatagtcatgttctagcttttag

SEQ ID NO: 26563 - DNA, 410 bp, Homo sapiens
cattactggagtgcctaagggaaattaccaaagaggctgaaggatagatagctccaagtcattggtggccttttatgacacattatggaattggaattttatcttacaaataatgggaaaattttaagcaaactagtgaaatttaagattatatattagaatgggttaaatgctgagttcagtgaactcagcgtgggcttcagattccacaaaccctatgaaattttgtttcagagagcacatttgaggctttcattagattctcagaagtctttctctctctccccctcccaccctcacacacacacacacacacacacacacacacacaggtgtgcatgcacatgcatgcccaaaagttaagaataccttcttaaaagtaaaaaattaaaaacaaagataaaaaaaaa

SEQ ID NO: 26564 - DNA, 273 bp, Homo sapiens
  misc_feature (145)..(145): n is a, c, g, or t
tgcgcagaattacatcaaaaatggccgcatgcttggcggttagaatgtatgagttgtaagcatctaagcagaacagtgccaaggattctttttcttttgagacagggtctcgctctgtcaaccagaatggaatgcagtagcgcantccccctcccaccctcacacacacacacacacacacacacacacacacaggtgtgcatgcacatgcatgcccaaaagttaagaataccttcttaaaagtaaaaaattaaaaacaaagataaaaaaaaa

SEQ ID NO: 26565 - DNA, 365 bp, Homo sapiens
gaagacttgtgtggctggagagaggccggctgggagcagtggagtgcaatgatgtggaaggggcccccaggacctgcgttgggttttgctctaagcactgagcccttatctgaatggggtgaaccctcaggctctcaggaacactgtctccacctgcttgtctatttctcctcaaaaattagagggcttatctgacagggccacaaggacagaacaaatttcttgaaaattagtaagaatagctttcattattaaaaataaactctagaactggcatggtggctcatgcctgtaatcctcggcactttgggaggccaaggcaggcagatcatgaggtcaggagttcaagaccagcctggccaata

SEQ ID NO: 26566 - DNA, 567 bp, Homo sapiens
cagcgtacctcagttggaaatgcagaaatcacctgtcttctgcatcaatcactctgggagctgcagactggagctgttactatttggccgtcttgggataaggttatatattgatcagttgatgaaaatgtaaccacctattcctgtatttcccctagaagtaatggttcagtatttgctaatttggtattctcagcaacttaattagaccatgactaccttggacaacatgaatcaattgtacttcctttggaaattagtgttttgtttgaaaattctttggagtctaattttagatcttttgtaaattatctgaactttcactatggctcttttaaagttgttattgtcttcggtagtcagaggcttactgtaatatatctagtgtagatttattttctgcttgggcattttttatgcttcccgaattaaaatattaaagggttactttcatcagttatgcgaagagtctcatgcatcatctccttgaatataacctttacatattttgtattacagtttgtattacaatctgtttgtatgcaatctgtattacagtctgctatt

SEQ ID NO: 26567 - DNA, 843 bp, Homo sapiens
ttcattcaggttaaaaaaaatatacatatgtctacatgaaattctggtattccctgttgaaaaccagtcttaagttagaggcattctgcagttgtacggaaagtaagggaaacaaagttaaaatggaaaaaattgaattaagaggcagaagtaatgaatttgatcatttgttcattgccactcattgtagacacttatttttgatctctgtaaacatcagcttatatctcaaagtatgaggtctgaatacttgcttgtgggtgatcatctttgtgtagaatagaaaagacaaagtaggaccaggtgcagtagctcacacctgtaataccggcacttcgagaggccaaggtggtagaattgcttgagcccaggaattcaagaccagcctggacaacatggtgagaccctgtctctactgaaaaaaaaaaaaaaaaaaaaaagaaaaaagaaaatattagctggacatggtggcatgagcctgtaggcccagcatacttgggacattgaagtgtgaggatcacttgagcctgggaggttgaggctgcaatgagcaatgattgtgccaccgcactccaatctggacaacagagtgagacaagaagagagagagagagagacagatagagcgagtgtcttgttgagttcttcagtgttgggtcaaagaagggaaaaaaattgtgcgtataaatagaaaaaaagaaaactaactttttaaggctttaaaaataactgaaagtgaagaccctgagatatgaaaagtgatttttgttaatcagaaaattggtgatttaggtgataatggggtggaagttggaagataggacgtgaggggacagggtattt

SEQ ID NO: 26568 - DNA, 664 bp, Homo sapiens
tacaggcatgcgccaccacgcctggctaattttgtgtttttagtagagacggggtttctccatgttggtcaggctggtctccaactcccgacctcaggtgatctgcccgccttggcctcccaaagtgcagtagctcacacctgtaataccggcacttcgagaggccaaggtggtagaattgcttgagcccaggaattcaagaccagcctggacaacatggtgagaccctgtctctactgaaaaaaaaaaaaaaaaaaaaaagaaaaaagaaaatattagctggacatggtggcatgagcctgtaggcccagcatacttgggacattgaagtgtgaggatcacttgagcctgggaggttgaggctgcaatgagcaatgattgtgccaccgcactccaatctggacaacagagtgagacaagaagagagagagagagagacagatagagcgagtgtcttgttgagttcttcagtgttgggtcaaagaagggaaaaaaattgtgcgtataaatagaaaaaaagaaaactaactttttaaggctttaaaaataactgaaagtgaagaccctgagatatgaaaagtgatttttgttaatcagaaaattggtgatttaggtgataatggggtggaagttggaagataggacgtgaggggacagggtattt

SEQ ID NO: 26569 - DNA, 279 bp, Homo sapiens
aacccacttcccacctcacccccctttcccaattgaccctcaatagtcaaagtgaatggaggctggcaggcaccttggacacaggttctatcccagtctttactctttccaacactccttcagacacctctttctcacttctcctaaatcatatcctcctcccttctagggggagcctgatggctcaccttagtcacagacaggagctgacacctaaccatcgaagcagctctgtggtggaggtgatgcccacaccatggacggaagcagctccacggg

SEQ ID NO: 26570 - DNA, 158 bp, Homo sapiens
ggctggctgggggcaggactacaatcccagaaggaggcagtcatatggtagggctagccaggggtgtccagtcttttggcttccctgggccacattggaagaagaagcattgtctgggccacacctaaaatacactaacacaatagttgatgaactta

SEQ ID NO: 26571 - DNA, 222 bp, Homo sapiens
ctgcccttttccacctgacaggtgcagagaaagtggtcaaggccagtggctgtgaaatggcaaagggccactggttggccaccgagtacataaggggtgggtcccggccaccaacagccctatgggtgtccaagcagccaccaaggtgattccagcccagctcccaggggcaggagatcccgtttttaaaagctcctcataaatgagttagttccgcaagag

SEQ ID NO: 26572 - DNA, 188 bp, Homo sapiens
cctcacaagcatgtcatgaatggtctggagtaaatcataagcggatttatggaaaaaaaagcttttagataatcaagttgtctataattaaagggaaattatttttaatggtctttctaggaattgggttttggtattttctaaaaaccatttatatactgaagaatcttagcactttgggaggccaa

SEQ ID NO: 26573 - DNA, 525 bp, Homo sapiens
taaacaaccagatctcaggagaactcactctcacgaagacagtaccaagccatgaggggtgtgtccccatgatccagccccacctccagcattgggcattacaatacaacatgagatttgggttgggacaaatatccaaactatcagtcggtctgtttgtctctttttctcctctgagctgttgacagtttgctctctctcctgcatctttctgtttttagaaataaatagccagccgggcgcagtgtggctcacgcctgtaatcccagcactttgggaggctgaggcaggcggatcacaaggtcaggagatcgagaccatcctggctaacatggtgaaaccctgtctctactaaaaattcaaaaacactagccgggcatggtggtgggcacctgtagtcccagttacttgggaggctgaggcaggagaatggcgtgaacccgggaggcggagcttgtagtgagccgagatcccgccattgcactccagcctgggcgacagagcgagactccgtctaaaaaaaaa

SEQ ID NO: 26574 - DNA, 218 bp, Homo sapiens
taacaggtacaaaacctaacctggtaaatatagggtgcagcccagaaagcaggcctgaatatgatctctttctaaaagtgttctgggcacttgagaatgcctatggcattctcccacactcaccaatcaagtaactcagttctttatgggtagctgagggtatgtacagaagggccaggattgtctcttttgagagttattcctcatggaagcatgag

SEQ ID NO: 26575 - DNA, 538 bp, Homo sapiens
gaacagaaagctcatagcagtccttggccatagcaattctgacatgcagccaattaccccactactccagggaaatgggatgtttcttgattaaggcctgattctgctccccaggagtgggttccctagtccattgttctctttagttccagggtcttttaccttccctctaagagggctttcctttttcataagaaatgatctgtatctgcagctgagtggatttctttgcatgtttctgcccatagaaatttggggcccttttcattttgtatttttttcagtctcttttagactaagctgaaggactgtcttaaagactttgtgagtttacttagaatctagctgtcatttactcaagccccagaagttatgcctatatattttattttgagacaggctcctctcttctttgggctgcaagtgaacctgccatcagaaaactcttaaatagtttttaaggcttttttttttttttgtagctgaaagtgtccactaggctctgcctaaaatctttcagagatttttgctaaaaaaa

SEQ ID NO: 26576 - DNA, 419 bp, Homo sapiens
ataagcgtgatactttgaattttcctttgaaatcagctggaatatgttactggaaccctcattaattaatggatcaaatgcagtttttgacgtgttcattttatatctgtatgaaagttgtgatttaaaatttgtttagctgtgcacggtggctcgcgcctgtaatcccagcactttgggaggccaaggcaggcagatcacgaggtcaggagttccagaccatcctggccaacatggtgggaccccgtttctactaaaaatacaaaaattagctgggtgtggtggcatgcacctgcaatcccagctactcgggaggctgaggcaggagaattgcttgaacctgggaggcggaggttgcagtgagccaagatcacgccactgcactccagcctgggtgacagagccagagtccgtctcaa

SEQ ID NO: 26577 - DNA, 401 bp, Homo sapiens
gctcctgaggccacggaagccatccagtggaagctgcatgtgaggcagaatgctcagtcaacagcactggacagaaacaagctgggggctacacagcccatcagtttggagaccttgcgaacgtcccgaagtgggacgctcccttgtccttctctcaggcctcccgcttctccagctgcccgtcccagtaggggcagtcagggcgggtgacccggtggaaaataaacctagcagcatgtccgtgacgcttcaggtttgtgggaatgggtgcagcgttcaagacactctcacgcgtatcccttcgtttgatcctcacagcgcctcagtgagacggcagagcacacattagcccccaaagaaactgctactcacaaaagccaagtgtgaacctcaggtcagac

SEQ ID NO: 26578 - DNA, 303 bp, Homo sapiens
ctccaggatggtccccacgcccaaagggaatgaagccacccacagtgtcccaggcagaggtgtcccacctctcctatctgttaactctgccctggacacggtagggacacagccacgtttgtgtcaacaccagcacagtactgaacacaccatacagaaggaagtcactggaacgtgctggatatatgaacacatgcacagatgaactgaggaatcaataaataagtggatgaattttaaagtttttaccaaatgcctaaattcaacactgggctctctcttcccttgttgctctgtctcaag

SEQ ID NO: 26579 - DNA, 409 bp, Homo sapiens
gtaactaacacctatttacatagcatttatattgtattagatataagtaatctagagattatttaaagtatatggaaggatgtgcataggttatatacaaatattgtgccattttatatcagggacttgagcatccttggattttgttaaccataggaggacctggaaccaaacccccatggatactaagggatgacagtaattatatgaagaatgagttaataaataatgagctctgtgatactgtctcttactgctgcattatttaaagacaaatattgctgagggctttcataaccaaggaaacctctatccaaaaggcacaacttaacccttggcctcagaagatcagttcagtttagatagcgaaaaggaaggttttgaaagagaatttaaagaggcttttttt

SEQ ID NO: 26580 - DNA, 431 bp, Homo sapiens
acaccaaaaacacagtgaactgaactggagtttgaaagtgaactgacttaaaatttgaaaatatttttcacaggatagcagagttggaagaggccattggagtcatccagtgcatacgcacggccaaccatgtggagtttacgctttgccttttctagtgctcactgggcatctattttcaaggtggaacccgtagccaatggtccctaaaattattaatgtgtttataaattattgtgcctgtaaaattatgtccattgccattggtagctgacaggctttataaagtgtgaatgagtgaatgattggctatttcttatcagattgaattccttttaggatagttcatatttggcataacttccaaggaggattttcccattattacatatcacctgatcatagctgttgttttggatcagtgtgtattg

SEQ ID NO: 26581 - DNA, 441 bp, Homo sapiens
tgtgggtgcagcctgaggacaaaggcagtgctgcatcccctgatcccctgccccctacaacctcctgcccagcctcttgggtgctcctcagcttgtcgtcagggaggaagcagccatctcctccgatgactgacttcaagcctcaactctcccacagcttctcaaaagccaaggctgaggccaagtcctagctgctgccttgggacaggtcaagggcctcctgcaatctcatgcacaaactggtacccatgagcatgtggcctaagagatttattgacccctctccaagtccttgccagaggaatcctgcacacctatatccacaatgaagggagccatatccccagctgggtagccatatccctaatgatatcacttatgaaaggtgacaagtcctttctaccactcttatttaagtgaaaatatatttagtcaattatg

SEQ ID NO: 26582 - DNA, 373 bp, Homo sapiens
gaagcccttccatcatgattcacttctttgagtagtgtttgctaaattcatacctttgaattaagcacttccttttagggacctctcttcattaatatccactagaaaggagagactcattatgtgtgagtttcaataagtttatccaatccctttgttttcaactgaaaggagggaaacggacaagtgaagaaggtagggcccaggagtgaaggaacaagggtgggaatagtaataatgttgtactttgaaaatctactgggaaaatgatgaacttagactgctgggagaggctaatagaaaatcgggcagtgagcttgatagtaggcaaaggactatcaggccacggggtcaagttaaagcagcacattca

SEQ ID NO: 26583 - DNA, 308 bp, Homo sapiens
tgcccaggtagtcatgtaggtctgtgggccgtgcttccaggctggaccgagacccggtgcatggggtgcttctggtctgagctgaggcccctggaagccacagccaggaggcagcaagggacggctgtcatgtcccctctcccctgtctcccagggtccctgcgggacagatttccctgcctgagcctcctggttgcccataccctggcctcccaaagcccagcctgaagccttaggcaccctacaacctgcttcctctagcagcctgccctgtctcttctctgccgatgttcctgaaactttcctgc

SEQ ID NO: 26584 - DNA, 347 bp, Homo sapiens
atggcttttgttcacagtaagttatatcaattaagttgcttagaatgaacatatagctgaactaataagcatgaaatattttcactgatttataagaatccagaaattatcaatgagttttctttttctattatttaaaaaagtttttgcttggcaaatcttcccctctaggagattaaagtattttttgctcattaatcaatgtaagaacaccttactttacattcattgaactctgaggttatagaactgtgaacttttcgatttgttcggcttggggaatgtcatagttcattctgtgagtggaagttgcctttaaccacatgagaacaaataagggaatatta

SEQ ID NO: 26585 - DNA, 391 bp, Homo sapiens
tcgaccatagacccagtttagtgaactgctgcattctgattttaaccactcaaaacctctttgtgttagatgttttcattgctccccatttcaaaaagagaaactgagctgggcacgatggctcactcctgtaatcccagcactttgggaggctgaagcgggtggatcacctgaggtcaggagttcaagaccagcctggccaacatggtgaaaccccacctctactaaaaatacaaaaaatagctgggtgtggtggtgtgcacttgtaatcccagctacttgggaggctgaggcaggaaaatctcgtgaacccaggaggggcagcttgcagtgagccacgattgtgccactgcactccagcctgggtgacaagagtgagactccatctcaa

SEQ ID NO: 26586 - DNA, 272 bp, Homo sapiens
gctgtgggagcgcccagagccatggagggagagctcggctgtggcggtgctgcaggtctgtgggggagaggacagtccccgcagattcctggggctctgacacatgaagcagtctgtggggccacccctggcgtatgggggaggggacaggctgtgggggtgtccgatgctgtggaggaggagcctacttctgtgggtgccgcaggtgtgtgttacaggagacaggctgtggaggagacagactctgtgggtatgcccggcccgtggggcac

SEQ ID NO: 26587 - DNA, 720 bp, Homo sapiens
tgccgggattacgggtgtgagccactgtgcccagcacccccaaccttttgacaccagggatcagtttcaaaaaagacaatttttcaacgaatgggggtggggttgggggtaggagttagccagatggtctggggatgaaactgttccatgtcagatcatcaggcattagattctcattaggaacatgcaacctagatcccttacgtgcgcagttcacaatagagttcacgctcccatgagaatctgatgccaccgctgatctgacaagagacggagctccggcggtaatgctccctcacctgccactcacctcctgctgcacaacctgattcctaacaagtcacggaccagctggggaccatggacccctgccttggagattcctccactccactgtgggaaggggcaccttctgaaccaacgttttgcatgtgtcttcatcccctgcttgcactccagatctttccttccttcacttaatcacctgttagcatttaccaagtgcttgctctgtcctggacgttatacaatgaggtggccctggaccctggggtcttgctgtgtgtgggcgggggtgatttcccagggatggctctcaaaacagggacgtgaaaatgcatttggagagatcttcaaattccttgaggatttgaaattttcatttttatttcaacaataacttgttcagccaggcgcggtggcccatgcgtggattgccag

SEQ ID NO: 26588 - DNA, 907 bp, Homo sapiens
tgccgggattacgggtgtgagccactgtgcccagcacccccaaccttttgacaccagggatcagtttcaaaaaagacaatttttcaacgaatgggggtggggttgggggtaggagttagccagatggtctggggatgaaactgttccatgtcagatcatcaggcattagattctcattaggaacatgcaacctagatcccttacgtgcgcagttcacaatagagttcacgctcccatgagaatctgatgccaccgctgatctgacaagagacggagctccggcggtaatgctccctcacctgccactcacctcctgctgcacaacctgattcctaacaagtcacggaccagctggggaccatggacccctgccttggagattcctccactccactgtgggaaggggcaccttctgaaccaacgttttgcatgtgtcttcatcccctgcttgcactccagatctttccttccttcacttaatcacctgttagcatttaccaagtgcttgctctgtcctggacgttatacaatgaggtggccctggaccctggggtcttgctgtgtgtgggcgggggtgatttcccagggatggctctcaaaacagggacgtgaaaatgcatttggagagatcttcaaattccttgaggatttgaaattttcatttttatttcaacaataacttgttcagccaggcacggtgctcaggcccgtaatctgagtactttgggagaccaaggtgggtggatcacgaggtcaagagatcaagaccattctggccaacatggtgaaaccccgtctctactaaaagtacaaaaattagctgagcatggtggcgcatgcctttagtcccagctacttgggaggctgaggcaggagaattgcttgaacctgggaggtggaggttgca

SEQ ID NO: 26589 - DNA, 431 bp, Homo sapiens
ccaaatgattaattcacaccacctgaagaggggaggcccaagtaattgggcagttttaaaaaaaaaatttagcagattatctgctaacttagtcctgaattcatatcccttgactcctaggctccttcttaccagcttctaataatggctgtctataaagcaataacctaaactttgtggattaaatatcccagaggtcattaatggctcccttgcattttataagaaatcagatctctaaaatcattcatgaaatataattcactatagatgaaatttctccactttggtacaaagtgtttttggtcctgacactacattttgaagatattaaaaccaaaactaaaagcatggtctacagcttgtattaattatccttgggtagtttatggaagcatttgagttcttaagaaatagttatctcatatgat

SEQ ID NO: 26590 - DNA, 339 bp, Homo sapiens
atataataataataaaacatttgaaatattgtgagaattaccaaaatgtgatacaaagacacaaagaggacaagtgttcttggaaaaatggtgccaataaacttgtatgcggggttgccacaacccttcgatttataaaaaatgtaatatctgggaagtacaataaagggacgtgccataaaataaggcatgcctgtacatctcatttggaaacaagtacactctaaaatccttttagtttccagactaaaatattcctggaaatcaatgtcaaccatctaattacattccagatagttaattctaagacaaaagttccttgggtacacgcattctatt

SEQ ID NO: 26591 - DNA, 840 bp, Homo sapiens
  misc_feature (78)..(78): n is a, c, g, or t
  misc_feature (646)..(646): n is a, c, g, or t
acatggatggatccagcttatatgcagtttggtacttattttcaatgctgctaaaacctgtccaacaatgccagcatngttctcagatcacaccttcaggcactatgcctacctccgagacagtctttctcatcttgttcctgccttgaggttaccaggtagaaaactggtgtcatcagctgtttctcccagcatcatacctcaagaggatccttcccagcagttcctgcagcagagccttgaaagagtgtatagtcttcagcacttggaccctcagggagcccaggagctgctggaattcaccatcagggatctgcaaagacttggagaacttcaatctgaattggcaggagtagctgatttctctgccacctatcttcgctgtcaactacttctcatcaaggccttgcaggaaaagttgtggaatgtagctgcccctttgtatttgaagcagagtgatttggcctcagcagcagcgaaacagattatggaagagacctacaaaatggaattcatgtacagtggtgtggagaataagcaggtggtgattatacatcacatgaggctgcaggccaaagctttgcaacttatagtaacagcacgaactacacgaggacttgaccccttatttgggatgtgtgacaanattttacaggaagtagacttttttcagaggtatttcatcgctgatttgcccacttgcaggaagctttgtggacaaatcctgacttatgccccgagtcatgaatccaaacctgcagaagtggtccaaattttctgaacatgtgcggagagggggttggaatcccgcgcagagagatcacaaggtcgcccacattg

SEQ ID NO: 26592 - DNA, 1222 bp, Homo sapiens
tatttttagtagagatggggtttcaccgtgttagccaggatgatctcgatctcctgacctcatgatccacccgcctcagcctcccaaagtgttgggattacaggcgtgagtcaccgcgcccagctggtattgcttttctattccctttggacatacatgctacagtcccacaatgtagcatttccttggaaactccctttttttttttttttgagatggagtttcgctcttgttgcccaggctggagtacagtggtatgatcttggctcactgcagcctctgcctcctgggttcaagcgattctcctgcctctgcctcccaagtagctgggattacaggcacccaccaccatgcccagctaattttttgtacttttagtagagacaggatttcactatgttggccaggttggtctcaagctcctgacctcagatgatctaccagcctcggccttctgaagtgctgggattcaggtgtgagccactgtgcccagcagggatgcttcatctttctaagaattatcttggctttggactttattcataaatgttttatttctgttagtatgaacaatagactgccttaacaaagtttttttttaaacaaaatcgttcttgttggattttattcagcagcatctatcatgtagataaattcccaggtgtagcattacagcttctgactaatatagctgccattcagacaattaatgttcaaagagttttctaaagtgataaaaccaaagaaaagcatgtggaaaagcagaagcttagaaagttgtggtcactgaatgcactccctggtttttatttgtcagtgaaatctttatgcattcattgttaatattttaattccatggctttgtaggctgtgctgtgtctgaaggggtaacacctagggaaacatgaggccccttatgggaccccccaaatggaacaacttcactttctcttttatgtattgagccctgtgttaacatttcacttaagaagagcaccagtgctttaaaaaaaaaaaaaaaaaaaaaaaaaaggtaaaatattaccattttgatagactgtaaagagttagattcctgttgaagtgttaaggaaatttaactttgtgaaacttttaaaataaagtttataaatgtagctaatctttgaaaaaccaatgcagtaacactgatttgtaaatgttgtggtcaatccctaggtgcattaaagtttcagtcacctgc

SEQ ID NO: 26593 - DNA, 1342 bp, Homo sapiens
tatttttagtagagatggggtttcaccgtgttagccaggatgatctcgatctcctgacctcatgatccacccgcctcagcctcccaaagtgttgggattacaggcgtgagtcaccgcgcccagctggtattgcttttctattccctttggacatacatgctacagtcccacaatgtagcatttccttggaaactccctttttttttttttttgagatggagtttcgctcttgttgcccaggctggagtacagtggtatgatcttggctcactgcagcctctgcctcctgggttcaagcgattctcctgcctctgcctcccaagtagctgggattacaggcacccaccaccatgcccagctaattttttgtacttttagtagagacaggatttcactatgttggccaggttggtctcaagctcctgacctcagatgatctaccagcctcggccttctgaagtgctgggattcaggtgtgagccactgtgcccagcagggatgcttcatctttctaagaattatcttggctttggactttattcataaatgttttatttctgttagtatgaacaatagactgccttaacaaagtttttttttaaacaaaatcgttcttgttggattttattcagcagcatctatcatgtagataaattcccaggtgtagcattacagcttctgactaatatagctgccattcagacaattaatgttcaaagagttttctaaagtgataaaaccaaagaaaagcatgtggaaaagcagaagcttagaaagttgtggtcactgaatgcactccctggtttttatttgtcagtgaaatctttatgcattcattgttaatattttaattccatggctttgtaggctgtgctgtgtctgaaggggtaacacctagggaaacatgaggccccttatgggaccccccaaatggaacaacttcactttctcttttatgtattgagccctgtgttaacatttcacttaagaagagcaccagtgctttaaaaaaaaaaaaaaaaaaaaaaaaaaggtaaaatattaccattttgatagactgtaaagagttagattcctgttgaagtgttaaggaaatttaactttgtgaaacttttaaaataaagtttataaatgtagctaatctttgaaaaaccaatgcagtaacactgatttgtaaatgttgtggtcaatccctaggtgcattaaagtttcagtcacctgccgtgtgtgtgtgtgcccttttatgtttgccttcctagcattcctgtgttcactgtgcatgttcttgaaaatattttcacttgtcagaaaataaactggaaagtcattgaaaacccgtaaa

SEQ ID NO: 26594 - DNA, 1507 bp, Homo sapiens
tatttttagtagagatggggtttcaccgtgttagccaggatgatctcgatctcctgacctcatgatccacccgcctcagcctcccaaagtgttgggattacaggcgtgagtcaccgcgcccagctggtattgcttttctattccctttggacatacatgctacagtcccacaatgtagcatttccttggaaactccctttttttttttttttgagatggagtttcgctcttgttgcccaggctggagtacagtggtatgatcttggctcactgcagcctctgcctcctgggttcaagcgattctcctgcctctgcctcccaagtagctgggattacaggcacccaccaccatgcccagctaattttttgtacttttagtagagacaggatttcactatgttggccaggttggtctcaagctcctgacctcagatgatctaccagcctcggccttctgaagtgctgggattcaggtgtgagccactgtgcccagcagggatgcttcatctttctaagaattatcttggctttggactttattcataaatgttttatttctgttagtatgaacaatagactgccttaacaaagtttttttttaaacaaaatcgttcttgttggattttattcagcagcatctatcatgtagataaattcccaggtgtagcattacagcttctgactaatatagctgccattcagacaattaatgttcaaagagttttctaaagtgataaaaccaaagaaaagcatgtggaaaagcagaagcttagaaagttgtggtcactgaatgcactccctggtttttatttgtcagtgaaatctttatgcattcattgttaatattttaattccatggctttgtaggctgtgctgtgtctgaaggggtaacacctagggaaacatgaggccccttatgggaccccccaaatggaacaacttcactttctcttttatgtattgagccctgtgttaacatttcacttaagaagagcaccagtgctttaaaaaaaaaaaaaaaaaaaaaaaaaaaaaaaaaaaaggggggggccccgcccaaaaattcccccgggggggcccaagtttggggtccccggttttctgtgtgtcacaagggggccccatgatggggaggcccgatattaatatacgcataggcgacctggcgccgggctgtttaaacaacggtctcggagacgtgggaggaacaccctgtgcttaccctggggagaccttgcgtgggaagggacccttatactccggggggggggagccatatattgtgtgcaccaacactttcccctctaagcagagagatttttaaagagcccctaaaggggcaaaaatcatttacacaattttacagcgctgctaattacgcggggttgtaacacaaacggcggcaaataaatatccgctgcgccctgaaaaaatttggggcacaacaggcaaatcatatgactttgagaaacaatttttctcagggacttattactaaaatatcgaa

SEQ ID NO: 26595 - DNA, 462 bp, Homo sapiens
acattaatttatctctgcaccctcagtagtaggtgtcattcccagcctccagtttggaataatatcacatgtgaactttagcttcaattgaggatacttacagcaatttttattctcttcatgcatgccttattggccatctgttttctgggaaaaaatataggtaataagagtgaaaatgaccccatagaaatatgtattggctgccctttctcatatgagaagtcagcaatagacataagtaaaagatgagataagccaggtagttgattctgttaaacgtatctatctagacttagatcaccaaagagaataagtgttccaaaacagccataaattcaaattcatgtgcttccttagagatctgtttatggttctcatatctcctcttatatgtatttgaatgacagaaccattatttaaggcaaggatcgggtgataacatagaggcttccttggttc

SEQ ID NO: 26596 - DNA, 464 bp, Homo sapiens
cattgatttgcctattctggacattacatgtaaatggaatcatacaatatgtgatcttttgtgactagcttctttcagttagcatgatgtattcaaggttcacccatgctgtaccatgtattaatactttattcctttttattgccaaatgatattccatatctattagttgataggcatttgggttatttccactttttggctattatgaataatgttgctatgaacatttgcttacatatttgtgtgggaacatgtgttttcatttttcttggctatatatctaggagtgaggttgctagctcatatggtaactgaatgtttgaggaactaccaaacttttccacagtggccgcacaactattcacaatagcaaagacatggaatcgacctagatgcccatcagtggtggactggataaagaaaatgtggtgtatatacaccatgaaatactacgcagccgt

SEQ ID NO: 26597 - DNA, 373 bp, Homo sapiens
gaattaaaattaagtggatgttcacagttgcccaatatatatgacctgcaaatgatacgaaaaagtgcagcatttagtggcagttaacaagagtgacaagcctggggcagaggtaccaaacctctcccaccagagagctagaagtattttatacagtaactttgatcttatggaagtgaccttcaatgcttattctgaagtaacctatatggtggatacaggatgaacattcagtgccagggagaatcttctcaggttggttctcgttagagtgataaactggctaggggccatagtattggtcctgttaggtttcggtcatggaaaaaaaaattattttggggtcatcctggctctagatgttatgggcaaa

SEQ ID NO: 26598 - DNA, 328 bp, Homo sapiens
gtagagatggggtttcgctatgatgccctggctggtcttgaactcctggcttcaagagatcttcctgtcttggcctcccacagtgctgggattataggcatgaaacaccatacctggcctcactgcaggttttgattagtccccctggctgcatatttgggctcaaaaaaatgcttttcttcatgttactaagtagactgaaatttatctttgtggttacacattatatatcatttgttatttcttaaagtcatgtaggttagtctttcacagtacataccttcgatgtttaccattttgactgaagatataatgctaaagattttat

SEQ ID NO: 26599 - DNA, 183 bp, Homo sapiens
cgtgaggcaaatgaactcatttctttataaattacccagtctcaggtattctgttatagcaacacaaatggactaaaacacagtccctactacctttgataggtatttaaaatgaaaaaaaaaatcccactatacttgtacctttcagtatatagaaattgttcagactagttcaaacaccac

SEQ ID NO: 26600 - DNA, 432 bp, Homo sapiens
cttgctcttcctccccgggctaggcggtgaaccctctctggagccctgcagagtgggactgaggggctgggctctgtttgcattccccctgctccctccacactctgatgagagcttgttttcctccccagacctttggggggcctgtcttgcttgttctgaacccccaccggtccttgcctcttttttcacctgaggtccaggcaagctaccaccccaggaaggccctcagcaccactccacacatctttgccatcgtggcatcagcctatgacctggctcagaatactgggcaggacccatgcatcctcctgtggtgagtggtggccttcctgggtggctgaacccatgggccacactgagggttgatggggcggggcctgaggtcttcactggaagccactggtatgctccactgctgggctacagttc

SEQ ID NO: 26601 - DNA, 253 bp, Homo sapiens
cgatcgagctcggtacgccctccataatgagtgcccatccttagaaggatgggcttgaaccctcctggcaggaaggggcaggctggtgtgtgacagctctgtgctgctgtgcctcaagaagagatttcacctgggccgtatctatacacatctttgccatcgtggcatcagcctatgacctggctcagaatactgggcaggacccatgcatcctcctgtgctcctcccactcaaatgggcacacattatggag

SEQ ID NO: 26602 - DNA, 609 bp, Homo sapiens
tgggactatctttccacatttatgggggtctctccaggctagctgtcacttctgggtggcacatcccacttcctgggttcactggggtggtcctatgtgcccctccctggagaccctaccaaccaacacatccttagctcctcccactgcagtgggcacagtggctcagggaagacggaagccgccaaaaagatcatgcagttcctaagcagcctggagcaggatcagacggggaaccgggagtgtcagccaggagaggggtggtctccaggcctctggcgtctcctggggtcagctgcaggcactgccctttctgatgggactgacgcctccctggacctgcccctagctgggatgcctgctggtgggggctactgctgcctagggatgcttgaacacccctccctgtacaggtggaggatatgctgcctatactcagcagctttggccatgccaagaccatcctcaatgccaatgccagccgcttcggccaggtcttctgcctctacctacagcaaggggtcatcgtgggagcctctgtgtctcattatctacttgagacctccagggtggtgtttcagctgctggcagggctggactccatagagc

SEQ ID NO: 26603 - DNA, 335 bp, Homo sapiens
tagcgggcgcggtgccaaagctgccatccccggctcacagctcctcatatccaccctgccctcatctttatgaattgcgtgtagacccttattgaatccttagaaggatgggcttgaaccctcctggcaggaaggggcaggtaaggggcaacaggtgctacgtccccaggaccgcctttctaattagtacaaagcttccttctgggtcagagccagccctccttgtagcctgcgcattacttgacagctcagcccccattttatggatcaggctctgggaagttgaatgacttgccagggtccctgcagtgggtggcagaactaacccacaacct

SEQ ID NO: 26604 - DNA, 217 bp, Homo sapiens
tctgtttgcattccccctgctccctccacactctgatgagagcttgttttcctccccagacctttggggggcctgtcttgcttgttctgaacccccaccggtccttgcctcttttttcacctgaggtccaggcaagctaccaccccaggaaggccctcagcaccactccgtatgtgactctgccccactgaccctctgctcacctcccaggcagccc

SEQ ID NO: 26605 - DNA, 609 bp, Homo sapiens
cttgctcttcctccccgggctaggcggtgaaccctctctggagccctgcagagtgggactgaggggctgggctctgtttgcattccccctgctccctccacactctgatgagagcttgttttcctccccagacctttggggggcctgtcttgcttgttctgaacccccaccggtccttgcctcttttttcacctgaggtccaggcaagctaccaccccaggaaggccctcagcaccactccacacatctttgccatcgtggcatcagcctatgacctggctcagaatactgggcaggacccatgcatcctcctgtgtgggcacagtggctcagggaagacggaagccgccaaaaagatcatgcagttcctaagcagcctggagcaggatcagacggggaaccgggagtgtcaggtggaggatatgctgcctatactcagcagctttggccatgccaagaccatcctcaatgccaatgccagccgcttcggccaggtcttctgcctctacctacagcaaggggtcatcgtgggagcctctgtgtctcattatctacttgagacctccagggtggtgtttcagctgctggcagggctggactccatagagc

SEQ ID NO: 26606 - DNA, 431 bp, Homo sapiens
gcccctagctgggatgcctgctggtgggggctactgctgcctagggatgcttgaacacccctccctgtacaggtggaggatatgctgcctatactcagcagctttggccatgccaagaccatcctcaatgccaatgccagccgcttcggccaggtcttctgcctctacctacagcagtgagtggcagggttgcagggggcacctacaatcacttacccttcctgggtccttgggctgcttccctggggtccagaccctggtagggcttcttctgcacggggcccctgggtgttctgcatcctgggcactcacacccatcttctgtgcccacagaggggtcatcgtgggagcctctgtgtctcattatctacttgagacctccagggtggtgtttcaggtaaaggcagcccttctatccacccctgcccagt

SEQ ID NO: 26607 - DNA, 1172 bp, Homo sapiens
atatccaactaacgtcttatgtgtatttggatcatataaaataagagatatttcacttactatttctgttttaagctatgaaatacttttaaagatttgtgtgatgtaaaaagactatctttaaagtaataatactcagccaaatatttctgccaaaatccaaaaatttctgggcctaataagggagtcatattagaggatccctttcctgtaactaaagtgtaggctgcgtattaagtggcatagtctagtcataggacctggcttcaaggtcttggccggctcatgatctggttgtaggatttgagttaggttatttgtacccttcatatctgttccttgggtgtcaaattggcacctccgactagaacccccaacacatacaaagtaccttttagctgtaaacttactgtaatttcattatttaattttcattgtttcttgttaatcatcctatcagatgtcttttaaaagagaaatagagcgaaagtaggtgtagaagaggaagactgatgtttggaatgctggctctctgggctattctagttttcacaatatcttccatagttcttaaattctagtaccctggatatgtgttatagatgctattcagctttattaatgctctcaaaataacaagaaaggcagaatacagtgtttctgattcttcattatataggaaaacaggaggtaaatataaataaaatgaaataggtattataatggaaaacagtttttgaaaggagtcctagagcttatactaaagaatcttttcaggacaaaagttaattattgttttagctcttataactgatctaagcaggaggtttgtaatctgggtgaagtaaaaggagcaagagatgtgagcattgagggtgtactgtttctagctcctggaggcagatagctgaggcagcaggaggaggtcacctcaacttcccttttattaggttacttgccttgcaaaaggggtcatttctgcagcttggtgagctcctgggtcctctgaacaccatggacttaactttttgctgtagaaggtagaagggagcttgctctattactgtacattctcttgactttggctagcagaagcaggaagtagagaaagtgtcagatgcttagggctggccttgagtgttagtatagatatataagtaggtatttggaaa

SEQ ID NO: 26608 - DNA, 350 bp, Homo sapiens
agcccctaattggtacttattaggattcaagctccagggtctactatttaaagctctctacaatctaatttcagcctatttctccaatcacttccctcatgccagctgacaaacatttaatcccagccaaactagtttgctcatgtctcatgaacttgtcttgcatttttccgtgtccacatctctgcaaaggcaatgaagtggggcaggaaacatgcactggctgtggcactagacctctgtttaaatcttagctctaactcctattagctataagacctaaagcaagtcactagccctttataagcctcggttgttttcgctggaaaacaaggaataaaaaaaaaaaa

SEQ ID NO: 26609 - DNA, 462 bp, Homo sapiens
atctatagcactctttaaacatcgctttcccttggccactttcttagcctcctcccccgagaaactttattcaaactcatggctttaatgaccataccaccttacaatgatgataccccagggtgtttctcaaacccagttctctccctctgagttctggagagacagatccaattacccagcagtcatatttgggtatttatgggtccctttatttatttatttttgagtcaggatctcactctgttgcccaggttggagtgcagtggtaagataatggttcacagcagcctcaaattcctgagctcaagccatcctcctgcctcagcctcctaagtagctaggactacaggcatgtgccaccatgcccagctgattttcttatttttgtagagacgggggtctctctatgtggtccaggctagtcttgatctcctgggctcaagcaatcatcctacctca

SEQ ID NO: 26610 - DNA, 441 bp, Homo sapiens
ctgttttttcttaccatttcgcattttctatttctttcttttccttattttttgagtcagagtttcactcttgttgcccaggctggagttcaatggcacagtcttggctcactgcaacctctgcctcccgtattcaagcaattctcctgtctcagccttccaagtagctgggattacaggcatgcgctaacatgcctggctaatttttttttttttgtattgttaatagggacagtgtttctccattttggtcaggctggtcttgaactcccgacctcaggtgatccgcccgcttctgcctcccaaaatgctgggattacaggcatgagcgaccgcgcccagccagcactcagcatttatattttacatttgttgaagttgtagatttatacacacattgattgctgctttgttatacacttgcatatacataagatggga

SEQ ID NO: 26611 - DNA, 541 bp, Homo sapiens
ttttcagggccgtctcagtctcataaaaggggatcaggcaggaggagtttgggagaaacctgagaagggcctgatttgcagcatcatgatgggcctctccttggcctctgctgtgctcctggcctccctcctgagtctccaccttggaactgccacacgtgggagtgacatatccaagacctgctgcttccaatacagccacaagccccttccctggacctgggtgcgaagctatgaattcaccagtaacagctgctcccagcgggctgtgatattcactaccaaaagaggcaagaaagtctgtacccatccaaggaaaaaatgggtgcaaaaatacatttctttactgaaaactccgaaacaattgtgactcagctgaattttcatccgaggacgcttggaccccgctcttggctctgcagccctctggggagcctgcggaatcttttctgaaggctacatggacccgctggggaggagagggtgtttcctcccagagttactttaataaaggttgttcatagagttgacttgttcataa

SEQ ID NO: 26612 - DNA, 315 bp, Homo sapiens
gaggcaaagagtctcaatattgacttatccgtgtctctttttcacagattcactaccaaaagaggcaagaaagtctgtacccatccaaggaaaaaatgggtgcaaaaatacatttctttactgaaaactccgaaacaattgtgactcagctgaattttcatccgaggacgcttggaccccgctcttggctctgcagccctctggggagcctgcggaatcttttctgaaggctacatggacccgctggggaggagagggtgtttcctcccagagttactttaataaaggttgttcatagagttgacttgttcataa

SEQ ID NO: 26613 - DNA, 490 bp, Homo sapiens
ttttcagggccgtctcagtctcataaaaggggatcaggcaggaggagtttgggagaaacctgagaagggcctgatttgcagcatcatgatgggcctctccttggcctctgctgtgctcctggcctccctcctgagtttccaatacagccacaagccccttccctggacctgggtgcgaagctatgaattcaccagtaacagctgctcccagcgggctgtgatattcactaccaaaagaggcaagaaagtctgtacccatccaaggaaaaaatgggtgcaaaaatacatttctttactgaaaactccgaaacaattgtgactcagctgaattttcatccgaggacgcttggaccccgctcttggctctgcagccctctggggagcctgcggaatcttttctgaaggctacatggacccgctggggaggagagggtgtttcctcccagagttactttaataaaggttgttcatagagttgacttgttcataa

SEQ ID NO: 26614 - DNA, 422 bp, Homo sapiens
cagccctaaggctgtgtaagacggggcagcagcacctggctcacagcctttgtgttgaaggtcctgagtttggcccaggagcaggtaggaggctcgcctgagaaactgcaggagacatctaactggcttctgtcccagcagcaggctgacggctcgttccaggacctctctccagtgatacataggagcatgcaggggggtttggtgggcaatgatgagactgtggcactcacagcctttgtgaccatcgcccttcatcatgggctggccgtcttccaggatgagggtgcagagccattgaagcagagagtggaagcctccatctcaaaggcaaactcatttttgggggagaaagcaagtgctgggctcctgggtgcccacgcagttgccatcacggcctatgccctgacactgaccaaggc

SEQ ID NO: 26615 - DNA, 266 bp, Homo sapiens
gtagctaatgcagtttgcaaggcattacaatctgtaacctcacatcctgaacttggttggaagaagaggaaggttgttgtctggtgaatgatctgcttgttatctggtaaatattaaaacagctgtggagcagctgaatccagccttggctgttcacaaattttttcttccttctaagatataacatgtgtaaacatctgacctaaggacaaggttctgatcacagggtgcttgtaaatgttttacaactggctttctgggaagga

SEQ ID NO: 26616 - DNA, 814 bp, Homo sapiens
tgtctttaaaaaaaaaaaaaagaagaaagaaatgtattataacattaggagttgtaggcggcaacattacaaccagtatttttctgattacgattttgtatgttacagatattctatattgagcgcattataccaataatcagaaaacattgctgaatcattttgtctttaaagaatcatctaatagggatgggaaggaatacaaaagttgtattaagtaaatgggatgaagctctcagttcagagatcaagatgattggtaagtggaatactatgcagccataaaaaggaacaaaataatatcctttgcaatgtggctggaggttgttatcctaagcgaattaacatagaaacagaaaaccaaataccacatgttctgacttataagtgggagctaaacattgggtactcatgaacataaagatggcagcaatattggggactattagaggggtaagggaaagggggccaaaggttgaaaagctttattgtactatgctcagtgcctcggtgatgggatcatttatgccccatacctcagcttcatgcaatacactcaggtaacaacctgcacataaatcccctgaaattaaaataaaagttgaaattaaaaaacaacaacaacaacaacaacaaaaggtgattggtaaaaattcactgatgcaatgccatttgcaaccttcagtgcaagtctgattttgacagagttcttaccaattattgcagatgtaaagagattacctttttagcttatgccttgatattatgtgttttgctttagatggtttggtggttggttggtttgtgggatagg

SEQ ID NO: 26617 - DNA, 2934 bp, Homo sapiens
cgaatcttcctccgtaataagaagcgacgtgtcccactgtcctggctccgtgggtccagtgagattgggcctgggcgctggagctgctgtggctcccgccgcggcggctgccatggaggccatgccagagcccagaactcacgccgggggaggccgagacagccggcggtactcatagatgaggcagcggcggcggcggcggcggcggcagcccgggctctccatgagcaggcggcggcggcgacgggtgcggcggcaccggcagttttcggtccccagggaggatgaagacactgtttgaagagatcaaagcatcaattaaaaataactataaccaagatcgatcattttgtaggcctgttcttccttgggggggtgtttttactatcaaagctggccgcaaagcagtatcctgtacaccactctatgttgaaataagactgaaaaatacctgcaccatagatggattcttgatgttattatatgtcattcttaatgaaaatgaaaacttccctagggaactctctcttcattttggtagagagtttgtagactgttttctttacttaatggacacctacagttttacaactgtgaagctactttggatttgggacaagatggaaaaacagcaatacaaatctgaagtccataaagcttcattaataattgatttgtttgggaatgagcatgataattttacaaaaaatcttgaaaatctcatgtctaccattcaagagagttactgttccaactggcgatgcccaactcgagtgcaggaggatcagcagcgcacaattaatataaatcctccccaagaaattccacatggaaacttgataagactggctgtgaatgagttattctgttccaagattgaactgtgtgaagagcatgggtgtggtggcttaagagaattttcccaacgaattttctgccatggggcacccccttttgttgtcttaaatatgcaacattggaaatctgaagatctggcgtatgtaccctattacttggatttgtctgatcacaagtatttgttggaaggtgccacattatttaacaaagaggaacatcattattctgcagctttccagattggtggacattggatgcactatgatgggctcagaaatgtgaatttaattttgttaaataaacccccagagtttctcctcttgtcatcattggtttatattcgagcaacagagaaataaatatagattgatgctaaaagttgttttccctcctgcccatgctctcccagatgaagggcttttattttgtgtatacttggtatccaagaaaatagttcaactatactagtttcagaagtgtattttcagtgtttaaccccaggtaaatgttttatatagaggatctgtgcaaaaatgtttgtaatttttttatatttcctgagttatttttatatgagcatattttatgttggaataaaatatatcttgtggcctttgtattttttatttatatgtacctcaaagatttttacaattctgtctttgaattcaagaaatactttgtcatctgaattctaaatttttctttttggatattcgagtaaaacctaggtaaaagtattttaagtttatataatttaacagttcaaaatatatctgactgtatttctttgccctacctcactataatccaaagtgcactatttgatctagtatggatttgaatgtacaatttatcgatggcttagtttattagttcgatttgcctagtatccctgcagcaattttttaaaatgtctgagaaatttttcagagcttaaactatttctttataatggcaaattacttttaactacttcctaaagtattataaacctgccagtggattttaagtgatagctaagcttccaagcttaattcacgttattacaaataaattatataactatcttaaatgtttatcttataattaaatgtaatttgaaatgctctaatgtattttgcagataaaacaactataaacaatattaggcaactggatgtttactagtgtcggactagcaatagaaatgcactttaaatatatatttaaggggaaatgcgtgcctggaaatacttcttttcctagtgaagttttatattgacacagagaaaagaatacttaaaattttgagtgatgtctactggcttccttgtaagtagtgattgatagcatgcggctttgacttgcaatacaaatcattacgattttatagttatcagaacattacgtttctttataaagaccctaaggtcactcttctttttgcaacttaagggaaaaaatattctcaagggaaaatactttttgaaatttatcaccattttagtgtttacatttcaataaatagttcacttcaggtttgggattgagattagttgcaatatatttagaagctcctacatgacagcacagatcactgccatctgctgaactgctaaagtgcttggtgccatgttgagaaaacttacccaagaatggataaatatgggtgaaacattactgagaatgcctcacgttagcaaatactatgaaaattcttgtttatatatcaaactgatttattttacaaaaaaaaaaaattcaccccaagatttatttagtttcccaagtgtatctgattaggatttaatttagagtaaacttttctggggacacctgattgcatgaactgaagtatacaataacacaaatattacagtaaacataaatggtgtcattaacaaaattattcctaatgcagatttattctttcaggaaatgcactttatttggaatactagtttatcatgaaacaatgacttacctacctcacagggttgttgtgaggattaagatgtttgttaaaatcttgactaccttgaacatgctaataaaaaaacatttttctacctcttttatttgcaggcaaggctc

SEQ ID NO: 26618 - DNA, 561 bp, Homo sapiens
tcgacgacggagtctcactctgtcaccaggctggagtgcagtggcacaatctcggctcactgcaacctctgcctcccatgttccagcaattctcctgccccagcatcccgagtagctgggattacaggcgcctaccactacacctggctaatttttgtatttttagtagaggtggggtttcaccatgttggccaggctggtctcaaactcctgacttcaggtgatccacccgcctcagccttctaaagtgctgggattacaggcgtgaccaccgcacctggccttgttttcttctttagctgacagactactgctatagagaaaagatagtttataaaaatagtttgatgaagacacaaagtagagttggggaattaagaacaaagtacaggcaggcacacctgtggtcccagctactttggaagctgaggcaggatgagcacttgagcccagtagttctgggctacagtgcgctatgctgatgggatgtccacactaagagcagcatcaatatgatgacctctcaggagtagggtaccaccaggttgcctaaggaggggt

SEQ ID NO: 26619 - DNA, 827 bp, Homo sapiens
taatgacacttactccaacttggttgcagattagggttttagcagagggaatagagagcaacttaacaacataaagatttgaccaagaagattaaaaactgaaatgttaataatgcctattgataactaccatgctggctcataatcagaactaaatacttggcagttttgcattatcatatcagttggtgccagttcctgtgttagcctttgactcttagcacatatttataacagttgtttaaaagcccactagtaatccaaaggaaggactggtccattcaaaaccacttctttaaagaattccctaacctgataatagaaggataatcattgaagggaactgttgtgggtattgattcaaagaaagctgtacttacaaaatgtccagtgtaattccatgcttatactaaaaaaaaagaccaaaatgactcaatgaataagtacagaagccagacctaagcattttggtttgggttcctgtttctgtgtgctggaagcttccaatgtgcaataatgggctgttcatttggagaatgcaactcatttttccccttgaaataatgtcaaaatagacataggttccaagcaagacctgaagtctgcattggcctgtatttaagtaagcatattcctaaccaccacagtatttcatgagaaatgtgtctgaaggccaccttagcatgataaggacgcatgtcttcctgcctgaccaactccttcagcaccatgatagagagtgcccttgcttggccctctgggccgctgtctaaaggtttctcaattctaaacctcagttggttttcttgactcctgggataaggggt

SEQ ID NO: 26620 - DNA, 425 bp, Homo sapiens
ctcagtttctctgctcatcacacggccttcggcactgtagctttgggtggtgggctgcagattaattttgtaaccaccttaagaaaaatacggaactctaactccttgccactcaagaaatgtcctccctttcagaatatgccttccgcatgtctcgtctcagtgcccggctatttggtgaagtcaccaggcctactaattccaagtctatgaaagtggtgaaactgtttagtgaactgcccttggccaagaagaaggagacttatgattggtatccaaatcaccacacttacgctgaactcatgcagacgctccgatttcttggactctacagagatgagcatcaggatttttgggtgagcaaaaaggcttaaagaaggttcgtgggaaaggggaaaccaaggaaagggggaaggggaaaagag

SEQ ID NO: 26621 - DNA, 333 bp, Homo sapiens
cctctggctctgacagggtggtcataggtttagcagagctcagcccagaagaaataggcaggagccctagccccacaggaagctgggagtgctggcctctatctgcatcctcaccagccctctttctcctgcagctgctcaaggactcagcccctagaccagtgttcccagatgtgtgcgtggccatgtgcaccgcacctgacagacacatagtaggtgctcaatgaatggcagcttctttttttccccatttggagtctagtcaaaacagcagcttctttgagttaccattggatccaattaaagattaaagattcagtcaagtgaaagcct

SEQ ID NO: 26622 - DNA, 2411 bp, Homo sapiens
tgccttataatggtcaaaggtttccagctagcagcagtccaggtgactcaagaaaacggcacaagataaacttctcaaaacgtggtcctccgaatctggccccacaacacatctactgaatgagaattagcgtcttccaagtcttaaagtagtcgtttacggactacagcttgagaagcgcagaattagaactttaagaagttaacgttcttggatcgcagactaaccgagaagagaggattcaaaaatgaagtgattcatccaatcagattttccagtaattcaccaatcacatcgttggactcttcagccaatggttttgttgcgcgggtcttttcaaaatcaacaaggccaattagaatgtttctgagtatatataagggcagtttccactctgccaagtggctgagtttttctttcaggtagtctgagatggcccgcaccaagcagactgcacgcaagtccaccggtggcaaagcgccgcgcaagcagctggccactaaggcggctcggaaaagcgcgccggccaccggcggcgtgaagaaacctcatcgctaccgtcccggcaccgtggctctgcgcgagattcgccgctatcagaagtcgactgagctgctgatccgcaagttgcctttccaacgcctggtgcgagaaatcgctcaggacttcaagacagatctgcgctttcagagttccgcggtgatggccctgcaggaggcctgcgaggcctacttggtggggctctttgaggataccaacctgtgtgccatccatgctaagcgagtgactatcatgcccaaggacattcagctcgctcgccgcattcgtggggagagagcgtagaggtttccgggcagtaattctatccaacttaaaaaggctcttttaagagccgcctactttcacccgaaaatagctgtgattaactaatcaaatctttgaaactaaacattggttttagtacttaagtcctcatttgattggctaaagttaatggtaagcttgctatatttgttcccgtgctttttcccgaaagtgccagattgtcagcgtccttttctaaactggcttttaggggtttggagcttcgatttggtagtggaaggggccacctgggggcgtttatatacattgtctcaagcgttagtcgcgttgtctacttacacccattatagatgggattttttttcgttgtgtatttctggttaatcccttttaaaactttacaggtatgagcattggcagttgagagtaggtagggatatccttggttgctgctttttcgtgtctgaagcagctatttccacaattccccctttttttaaacagttcttggtttttctgtgaaatgatccattttttaattcaatattagaaattggcggcagaaacgaaagccagattggcctctacattactggcagcatgggcattacgtgggaacttgttagaagctcccagggcattacatgggagcttgtttcaatccccatctagggctggagtcaatctgcatatacctcagatgattctcatgaacactgatttaggaagcctaggttgttggttttggtctcatcagtaaaggcatcctgcctgtgaactcttacaaggagtgagcttttgcaaaatgcatgtttatttatgttacagaatgaaatattctatgaaatgttctctaaagcaagtgcacagaacaatcccctaaaatagtttgatttctttacagatcagttttctcaatgtaacattacagtcacatgggaaggctttagaaaaatctttacctggggttcaatgagactaatagcaatctagagtgggcccagggaatggtaattattaaaattcaggtgcttctaacagctggggctgagactccttgctacataaattttaatactcttattagctctggtttgactctaggcttagcagttttctaattgaatcagtttccttgtagtttgccttcagagagaatatactggtctctaaagactttctggcttgcttgactatctttcaacacctggcttttataagaatttcttagggcaacactaatgtaagttttttcttttttgttttgttttgttttttgtttttttgaaccaccgaggtccttttagtgattggaagtatcaggtttttagggatgttacaaggaggaacacataccatcctgggctgcttggcatacaaccaagatatgttttcatatagaacccttcctttacagattagcacaaggccctgtttgggtattcagcagatccttctttatgatctttattaatttagcaacttgtcattttttttcacatattgcttttattttaaaaacttatttgacattccagaatatatgggaaaggagataatagtttaataaaacctatgttcctctc

SEQ ID NO: 26623 - DNA, 450 bp, Homo sapiens
tagatttacctctgagttaaggagtcaacattgtaacctaagatactctgtttacaatgtcctatataaaggaagtgacaaaaaacaatggcacatgcctaccaagaggaaattccatcaaaggataataagacgaagcagttttgaaaaacagctcagcaaatgtgcattggtcttctcctgtggggcaggaatcaaagaatagatattcttcatggaccattggtggacccagccctcagtgaacttggagtctaatggaagagatttaaaaaaatgtgtataagttaaaatcaatgtaaaagtgctgtaaaccaaaaataaaattctaagtccccctaaccatctgaatggacccctcctctcaggcaagatcattcgaaaattaacctgaaaaactagttcaaggccatgattggaagtgggggtcagatgtgtctcattgtaccc

SEQ ID NO: 26624 - DNA, 328 bp, Homo sapiens
ggaacctagattgtcacttcagccaccataaaatgtatctattaatagatactaaaaagttatggctgtttagggttttatgctgctgtcagcttgacctataggcaatggaccaggaaagagatcaggtcaagtgccatcaactgttgctaaaaatggcaacaaagtagagtggaaatcagaaccagatacttgattttcttatgcctcaaaatgttggagcctcgggtaggagtaccacacagtccattactctatgaactttgtgttgtcttaaaaaggacacaatcccaagagtcctgtaagataacttttaatgataagtaaa

SEQ ID NO: 26625 - DNA, 231 bp, Homo sapiens
ggcagtgagagagagagaggaagggagactgggtacgggcgtgtgtgtgtgtgtgtgtgtgtgtgcatgtgcatgagtgtgctgggtatgggtgtgaggggaggggttaagtaccactcagtacagaaatccagaatttcctggagtgtgaaacaggcaaggtgagggatggagagacagagaagtacagcaggacatatgggtgtgtgacttaggtactagtgaatataa

SEQ ID NO: 26626 - DNA, 952 bp, Homo sapiens
tgaattactgttagcttgcattatcatcagtttgttttgttgtgggttgcttggttaaccctacagagtatacttgaagcttatttgcatcaacagtattctggagctgtaatttttcaataactagactctgagacatgtatacattgtggttcaaataggaatcatccatagtccagtgctagaacaaatgtatacataatccactccccacaaattatcactcatttatttttccactggaaaataagactagatggagtcggtaggtgaaacagttttgccgtgcctaagtggaggctgatcaaaactaatttgagatccgctgcctttaatagagctccacctcaggaatcttacctttataatacatcctagataggcaagagggatatgtcctgaaatcttcactaattccaagattgcgtgtcatttcccccaaaaatttgcttaactctattggaaaatccaagagaattgctgcagctgctgaaaacaagagagctgcattaagctgcaaggccgggtagggtaggtagactgactcaccacctatgggacctgcctccacacatcagcttcccaaatacttgcagatttgggtcttaccaaaagacaagtcagtatgagttactcacaatcctaactacaaaggctacatttacaaataccagagtttcgactgtgtttttactctctgctccctgaaaactgtaaccccaggctagctccaaactctgcttatagcccatgctttactacagtggtggtcgcatatgtgaacgtgtgcatgcgtgttcacgtgttcatgacaacagcaatgcagccatgagggtgctgcccccaaaccaagcctgatgaccttgagaacctcaggcttcccagtaggatcctgcaagaaagcatctcttaaaaataaattctacaggatattagtaaatgttagatgaaa

SEQ ID NO: 26627 - DNA, 1231 bp, Homo sapiens
tcccatctctgacccccttccccgcaaaaaaaaagctaggtgtggtgacatgcacctgtggtcccaggtactcaggaggctgaggtgggaggattgcttgagcccgggaagtcaagactgcagtgagctgcgattgcatgactgcactccagcctgggcaaaagagtgagacattgtctcaatctccccacccctgccaagaaaacccaaaaaatattgaggtataattgttatacaatgaagaacacattttgattagtttatacacacactcctgtgtacacttgtacactcacacatcaggaaaccaagcaacccctaggggttgcttggttaaccctacagagtatacttgaagcttatttgcatcaacagtattctggagctgtaatttttcaataactagactctgagacatgtatacattgtggttcaaataggaatcatccatagtccagtgctagaacaaatgtatacataatccactccccacaaattatcactcatttatttttccactggaaaataagactagatggagtcggtaggtgaaacagttttgccgtgcctaagtggaggctgatcaaaactaatttgagatccgctgcctttaatagagctccacctcaggaatcttacctttataatacatcctagataggcaagagggatatgtcctgaaatcttcactaattccaagattgcgtgtcatttcccccaaaaatttgcttaactctattggaaaatccaagagaattgctgcagctgctgaaaacaagagagctgcattaagctgcaaggccgggtagggtaggtagactgactcaccacctatgggacctgcctccacacatcagcttcccaaatacttgcagatttgggtcttaccaaaagacaagtcagtatgagttactcacaatcctaactacaaaggctacatttacaaataccagagtttcgactgtgtttttactctctgctccctgaaaactgtaaccccaggctagctccaaactctgcttatagcccatgctttactacagtggtggtcgcatatgtgaacgtgtgcatgcgtgttcacgtgttcatgacaacagcaatgcagccatgagggtgctgcccccaaaccaagcctgatgaccttgagaacctcaggcttcccagtaggatcctgcaagaaagcatctcttaaaaataaattctacaggatattagtaaatgttagatgaaa

SEQ ID NO: 26628 - DNA, 589 bp, Homo sapiens
aaaaaatgaattcaccaattggccaatctgctgaaagtcaaaatgaaaggctaatatatgagactgatgacagttcatggttcttggtataacttcaacagcgagtgaacatttttttctttgtctatagctttctttcagccatcgatcctcagttgtgtcttagcctcttatcagtccagctcactttgatactaaatttgattgttgtgtatctcagcaagaagcacgtctcacattctctgtattttatgtggtcatgagtgtgttcctgtcttattcttattttatgtggtgcatttttaaataggactgtacagaatacaagcatctatttgtatatgactctcatcttttatggggagaggtcagagtaggtgagcgtgcactttgattctctgctggaatctctttggattctatgtcccctgtcacatggtttattttcatatgcatatttctcatggttctcctgactcttttagcaatgctcattgcaggatattagaaattgtattacttctaatggcagaatgttagaaattgtgttgactcttaaggcaaaataaaatacccggactcaccttta

SEQ ID NO: 26629 - DNA, 412 bp, Homo sapiens
aagtttcaatttctaggcttttctaatccattcctctacccctttctttggattctgcaatacctattctgtcttatgctcatttgaaattcatcttcatttctgtgacttttttcccctaagtatttcttttctgatctcttctagttcatattctaccttttctttttttctcactattttttccttgagttcttatatttgtgctctgtggtgcatccctccctctcttctgtcttcctccccctctctctctttcaagggcgattgcctcattaagttttaaaaaatgacaaaattttgggtcacaggctttcatctactcactaggcaacattctaggggagtattcggtctattaggtaagttttatggctttctttcactttttttatagaataactttttattg

SEQ ID NO: 26630 - DNA, 423 bp, Homo sapiens
attgcaaccgtgtagctgtttggcgtgcactttcctgagctctgtctcctatcatttgatagttagaagcagttgcattttaggtggggcttggcaagcagaaatataagacgcccagttaaatctgaatttcggatgaataatgaacactggttttagtataaggatgtcctaggcaatattggggacatatttacactaaaaaattcttcgttgtttatctgaaattcagatttagccaggcatctgctatggtttgaatgtttgcgtcccctccaaaattcatgttgaaacttaatccccattgtggcgttatcaagaggaggggccttttgggaagtgattgagacaagagggcacagctcttgtgaatggaattacatgcccttataaagaggctttcgagagctgcctggccctttt

SEQ ID NO: 26631 - DNA, 332 bp, Homo sapiens
gctttgacccgccttctgtcaaaaatcttcctgcccctctaccttccctattctttgggagctgcttgtccctagcttttagttacctgatttataggaaagtccagggctgtctgggacttccagctgtttaatctcagaaggtgatgggttggagtgagagttctgaatggcaggaagggtgatggttatatcatgggaacagggaggcagagagggagcacaaagcactttgcaattttcttctctcctagaaggcaggaaccaaatgcctttttggcatcctgagaattccaaggagctcttggcaatggaactggacactcatatag

SEQ ID NO: 26632 - DNA, 613 bp, Homo sapiens
aatatataactagccacagttagattcaatgtgctgatgattatgatgatgaggataaggatgaggatgacagctagcatttattgagtgcttcctatgaaccaggccctgtgctaatatctttatagacattgtgtcaggtaatcttcccaatatgagacaagccctagtgctatagcctttttataggggtagaaactgaagcttagaggttaaaggtgacatgcttagaaggcaacagatgacccaggtgtgtctaaatctaaagcccttcatgcctttgctccccttacccatttatttctctcctgtttccttcattctttgaacaaacatttattggacacttactatatgccaggcccagagctaggcactgtagctgtggtgatgagcactatttgagtcttgctctcattgaggcaaggtcggggtagagatattaaataacccaaatgataaatacataactgctcatcacgatgatattataaagggaaagatcagcatgttttgtgtgtaatggggaaagattgcatttaaactgggtccagggacagctatttggaggaagagatagttgaattaaagcatgagaagaagttacccagga

SEQ ID NO: 26633 - DNA, 496 bp, Homo sapiens
caaacacatatggggaaaaaaaagacacaaataaaaggcatgattagtagacatttcaaactaaaattttagagattaatctaattatatcaataattaatcacaataaatgtaagatgactaatctcatccaatacaaagcagtgggtattcttatactgatattatcatatcttagtatattatagcaccttttattttaaattctctatttttataaggaaatttccttctacttcattagaacttttcagcaactaagctttctctcaacacagaaacacccaaaatcctatttcaaaaatttttcattgtctccaaaggatatataaaaaaccttttagtttaccatggtacccagtaactctagaaaacagatgatatcatcaaaaattcccagaggcaaaatgtggctttaaaaatccacattgatttggggacttttgattgagctaaaggcattttgtttctgatgagtttttaacctgtatttctt

SEQ ID NO: 26634 - DNA, 462 bp, Homo sapiens
acctgggttcagagtcgacctttaccagttaagcgatgtgtgacctctctgagcctccgtttcctcatctgtaaactggggaataatcatagcatactcctggctctcatcccacagagagcccagcgcaggcagctggagtcctggagctcctgctcccctgagggaaggtctggagggatgggcaggtgtctgggttggtagtcctgattctacttcttggggtctgctccaccccagcccagctttagggctccacttcctaggctgaagccccagcccagagagctaacccttcagccttgtccagattcaaaacacccacctcaggacaccggcaccctccacagccccaggccttacctgtgaacacctgcacccaaatcagccacctgcaatgtgctgggttctgggtaagccattattaaactggccgtgatctcacaagtcaagataccatgt

SEQ ID NO: 26635 - DNA, 419 bp, Homo sapiens
agtgaatattttaattcttaacaataaaatatcttctaatgaatcccaaatgaaaaataaaagaattttgctcactggatatacagaactttatatgaaaacatacttggttttctaactaagaaacaaatatttcctactatataaatcttaatcatatatgtaatctgaatatatatgaaaatatatattcattgtatatataaaaatatacattcattatatatatacagattatacatatattttcagagatcctcataataaacatgtcaatgaagttattattgaagtctactcataactgtgacagccaaggctcagactgccccattaattgcttaaaaatgtcacatagctctttttcagatactaatattataatcttattttactgtcagtgcagcccaccccccacc

SEQ ID NO: 26636 - DNA, 337 bp, Homo sapiens
gagacctgtaggaggaacagtgtgtagagtgtggttcaaagagcactgggctgggtggaagagggtgagtttaagtcaggtggccaaacttctgtagcctgaaagcctctctggtctgcgaacttctccgaacctcgtcttctttcttatttcacattttcaagatgaaaatattagaatacattagatcttgttctggtctgaaaaatgcctctatgggtagccaaataactcagttgtcaagaagaaaaacggatatataaattagtctaataagacatgtatttctccaagaattcaagaaatgcaatttgctgccctgctgggctccgccaga

SEQ ID NO: 26637 - DNA, 534 bp, Homo sapiens
gttacttaatgtagtggtaaaactggtggtcaaaggaggcacagttttcatctaattcaacagtttttcatgaagcatgtctcagccgctgagagccacctgaatgtggacctgcccctctgcttcttcaaaataattagcagaaaaggattaataattcatggaagtggtggttttttgccagcatattcctataaaaagggaaatattttcacatactgtaggggctgccaggcagctgaacatgtggcctggcacggaaattggtgataaaactaaaatatcaggaaattgtaccactcataacttttctgccagaagcttcatttacattatttttaactcttgagagaaaaagattttcatatctaatcaaaggagccaagactttttaccatgcattgaacattgaattttaatgtgaaattctaggagaaaaatagatttttcttctcaattaaccaatagtgacattttactttgccaatattaagatgatcttctgttaaaatttagctgaaatctgtttaaccc

SEQ ID NO: 26638 - DNA, 471 bp, Homo sapiens
aaatggtccttggcttcatggagcttatagtctatttgtggaaacagatactaaacagataatctcataaataacataatttcaattgtgttaagttctacaaagaaaagaacagggtgcaatgagggtatacaacctaatactgtggttttccttgaggaaatgatgtttaagccaacatataaaggaggacttagctaggcagagggcttggggaaaggacatagagcagcacattataggcagaggataggactgaagcaagttgaagccgaggtacgaatctggaccttttttatttttatttttgggacagggtcttgttctgtcatccaagctggagcgcttatcaatatgatggctcattgcaccctcaagtgatcactttagcccaggagatcaaggctgaagtgagccatgatgttgccactgtactccagtctgagtgacaaagcaagactctttctttaa

SEQ ID NO: 26639 - DNA, 345 bp, Homo sapiens
gcgatagaatgaacatattaaggctccaggttactgactggaacaactaagggagatggtagcgccatttaaaagatcggaagcactggccaggcatggtggctcacacctataatcccagcactctggcaagccattaagaggatcccaggagtttgagaccagtctgagcaacatatggagacaaaaatttaaaaattagccagggatgttggtgtgtgtctgtgatcgtatatggaggctgaggttggaggatcactttagcccaggagatcaaggctgaagtgagccatgatgttgccactgtactccagtctgagtgacaaagcaagactctttctttaa

SEQ ID NO: 26640 - DNA, 630 bp, Homo sapiens
atgctgaaaccgaccatctctactaaaaatacaaaaattagctgggtgtggcggcacacgcctgtagtcccagctacttgggaggctgaggcgggagaatcacttgaacctgggaggcggaggttgcagtgagccaagattgcaccgctgcactccagcctggcaacagagcaagactccatctcaaaacaaacatacaaacaaaaaaaggtgcctctggtcctgtgttttctttttccttctgaaagttcatagaaacctggcatatagagcttattttgctgttttaactggttggctccacaaatcctgctacctgacatcagtacagcttgaccgcagtgaagtacttgatggcttgttcatgtttagttcacctctttagaaagaaagctttgtggccaggtgcagtggctcacacctgtaatcccaacactttgggcagctgaggtgagcagatcacctgaggtcaggagttcaagaccagcctggccaacatggcaaaaccctgtctcttctaaaaatacaaaaattagccgggtgtggtggcggaggatgcagtgagccaagatcgtgccactgcactccagcctgggcaacagagtgagactctgtctcaaaaaaaaaaaa

SEQ ID NO: 26641 - DNA, 593 bp, Homo sapiens
atcgtggtcctcaggacgtggggtccctagccagtgtggcttccgttgccctgtcagagtcttctcatgttgttttatatgtaatgtccagggtttttggttttactgggtgaaacagggaaaaatatgtctacctcatcttctcagacaggaaaaatatttttatgaggagaccatcttctcctgtctggatgctttcaataattcacgtaatccccgtttctattccaatttttatctcacatacaggtagttttattaaagtatcaaaatgttcttactgtgtgagaaaatgaccctactaaggttgtatcagcaatgaggatttttttcttatggctgtcttgttttagcaacttctgcctcctaggttcaagcgattctactgcctcagccttccaagtagctgggattacaggcacacgctgcagcacctggctaattttttttggattttagtagagataggagtttcaccgtgttgcctaggctggtctcgaactcctgagctcaggcaattcacctgcttcggcctcctaaaggtgtgagccaccgcacctggcctagctgagatttatatacagataattaag

SEQ ID NO: 26642 - DNA, 482 bp, Homo sapiens
tcctgttgcttgatttatttgaacggcagcaatccggaaaagtcgtcagtgcacaatgactcattccctgagggttctgaataagattctaaaatcaccacccatggttttcctgcactttgaagtgacagaacaaatgacagcagagatgggcactgtctcctgagtccagaatggatgacacacacgcgtctcacaacaataacatcctcatctaaaaacagcctgaaaggaggttatttctgggctttgcttgttagtaagcatttgtgcacctgtgggcagagacctaagaccaagatggtttgggttttttttctgtatagtcaatcaacaaacttattgatgccttttccatgccagggcctgttctaaggacatgagattaattcaaccctcagaggaaaaccctcacagagcaaaaattgggataacaaatgagaaaagccataaatgagagacagatgaggaggctaagggag

SEQ ID NO: 26643 - DNA, 263 bp, Homo sapiens
tgtagaaatgggatctcactatgtcactatgttgtctctgctggcctcaaactcctggcctcaagcaatcccccaacctcagcctgttgagtagctaagtctatgggcacacaccaccgcacccagcaaaaaattgaattttagattttgtctataactactttcattgcagtcaacattgtattacgtagttaagaattttttttgaggcagtgatcatttaaaataaaaatgcctaaattccttaaccttgaattcttaat

SEQ ID NO: 26644 - DNA, 685 bp, Homo sapiens
ggtgggatcacctgaggtcagcatggtgaaaccctatctctactaaaaataaaatattagccgggcgtggtggcgcatgcctgtagtcccagctacccgggagactgaggcaggagaatcgcttgaacctgggaggcagaggttgcagtgagcaagctgcactccagcctgtgtgacagagcaagactccgtctcaaaaaaaaaaaaaaaaaaaagaaagaaagaaagaaacaaacaaaaatagttatgtgggttttcgttgacatatttttgggaaaccttgatgtatgtattcagaggacttctaagccataagagacccaagtgccttgaggagccacatacttttccctgcgctgcttatttctgaggtggttaataatatcgactctgggaagattgatttttcaagactccttcccatttcttaatttatttctgcttacttagtttggttttttatttttagcagacattttagcaaagcagaaatatatttttcctgtggattttagacttgcattcttatatttacgaacttacaaaaacttatcccagaattaattttttttttcaaatgcttaggcaaattaagtatgatcaagtcttctttattgtgtgctgtaaaaatggagtggcggcaagaatgtaatacagggcatctgactgctgaggaaaaaaaaaa

SEQ ID NO: 26645 - DNA, 491 bp, Homo sapiens
tctccccacttctagaaagtaagttcatgtggaatttcaacaggaagaaaagactttcaaaaatgtaataccagcattgatttaaaaattcaatggtgggctgggcacgctggctcatgcctgtaatcccagcactttgggaggcctaggcaagtggatcacctgaggtcaggagtttgagaccagcctggccaacatggtgaaaccctgtctctactaaaaatacaaaaaattagccaggcttggtggcgggtgcctgtaatcccagctactcaggaggctgaggcgggagaatcgcttgaacccgggaggcagaggttgcagcgagccaagattgcaccattgctctccagcctgggcaacaagagtgaaactgcgtctcaaaaataataataatattaataataataatgtgtattagcaattgaataaaaatgggttcctctgtgaaaagagttcctgagacttgggagaagagtccaaaagaagaa

SEQ ID NO: 26646 - DNA, 409 bp, Homo sapiens
tgtggagctaaccaaccatggttctgatctcctggatcacaaaatgagtgaccaggccacagtgtctagagcctaggcacaaatctggtatagttgggtttgtgtgtattactccagtcctttagttggtcagctaaaggaggtggctgtgtaatatactgcaaagattgtgggctttagagtcaggaagccctgtgttcaaatcctgactatgccacttactatctttgtgactgtagtgaagttatcaacttctcccccactcaattttctttatctgcgagataggggtaaaaatgcctctcttgcagggaagctggggtaatacctgtaaaacattttgcatagtgaccaaaatttaatactcaaaatatgtcatcctcttcccccccttttttttttaaaccag

SEQ ID NO: 26647 - DNA, 951 bp, Homo sapiens
atggagaatgtcactacaatgaatgagtttcttctacttggcctgactggtgttcaggagctgcagcctttcttctttgggattttcttaatcatttacctgataaacttgattggaaatggatctatattggtgatggttgttttggaaccacaactccactcccctatgtatttttttctgggaaacctttcttgtctggatatttcttattcttcagtgacactgcccaagctgctcgtaaacctcgtgtgcagtcgcagggctatatcttttctaggctgtatcacccagctacacttcttccactttttgggaagcacagaggccattttactggctatcatggcctttgaccgttttgttgccatctgcaatcctcttcgctacactgtcatcatgaacccccaggtgtgtattctgttggcagctgcggcctggctcatcagcttcttttacgctctgatgcattctgtcatgactgcacacctgagtttttgtggctctcagaaactcaatcacttcttctacgatgtcaagccgctcttagaattggcctgtagtgacacattactcaatcaatggcttctttccattgtcacaggcagcatatccatgggagctttctttctgactcttctctcctgcttctatgtaattggcttccttctgtttaagaacaggtcctgcagaatactccacaaggctctgtccacttgtgcctcccattttatggtggtatgtcttttctatggacctgtgggcttcacatatattcgtcctgcttcagccacctccatgattcaggaccggataatggccatcatgtatagcgccgtcacccctgtactgaatccactaatctacacccttaggaacaaagaagtgatgatggctctgaagaaaatctttggtaggaagttgtttaaagactggcagcaacaccactag

SEQ ID NO: 26648 - DNA, 801 bp, Homo sapiens
gcccgtctgtgtctaggtaccaccgtgggtacattgttgggcaggagtgtgtgcaaacacaggtctgtgtgtgcaatctcacatatctgcctgtgagactggattgagacccattcgtttctatgaatgtccgtgtacgtcagcgtgtgtgtccaccttcctgagtgatgtgttcgcttgtagggtgctggctgaatagactctgtccagccctgttctgtagtctcaagctgcctgcgatggcctgaaattccacctttcatcccctatggatgacagagagcttacagatgaccctactgaatgcaagcacctttggtgaggagcatcacagggctccttctggagcatttggtggggacagctgcagagaagaggcctggaactcgggcagcactgcagtgccaggaggcaggcggggaaccgaggcaaaggctgcccatctccccctgccaggcctgtgtgatcattatcaccaacagctggtgggtggccgggccaggatgcagcggggccttctgatgcccaatcagcacggctgccttcctgacccagtcaaggcctctgtctgaaatgagtcgctccaggttctcagcatacacttccatcgcgtctgtcgggtattgttccttaactgtcccatctgtgcagagtccattgccccaactagactgtgagctcctcctctgagccttccaagtcccccctccgccttcgccacctcccgctcgtgcccagcacaagtgagcctggtgtggaaaccactccattgcccggtggaatggattctgtaatcagtgg

SEQ ID NO: 26649 - DNA, 766 bp, Homo sapiens
ccacaaggcagagggagtgaatataagttagtagccaggagccagatctaatatttaaaaggctgctttggagatttcatttccattggcgtgtacaagttcatgattgtttcgaaataaaacttgttaggattttaaacttgactttcattatctctggtatattcttctttaaaacatatttgctcttcccaaatagaaagagtaattcatgactttcctatctacttattttgtctcagatttgattttgatttttctctgtcttcacgaaaccaacgaaataatagggagaataattgaagctttctaatcattagactctaataaagaaactcgatacactgtaaacccaccactacattctaccgtgacgagcagaacaacctgagaagaatacagttttttactctaagcagccttggttttccttgtcacaccactagtaaacaactctgttttaaaaatctgtaattttctttttttttctgtttctttttcttgaacttttattttaagttccggggtacccgtgcaggatgtgtaggtttgttttataggcaaacatgtgccatggtgatttgctgcacatatcaacccttcagctagttattcagcccagcagccattagctattcttcctgatgctctcccttctcctacactgcccccgacagcccccagtgtgcgttgtcacgcccccatgtgtccatgcattctcattgttcagctctcacttgtaagtgagaatatgtgataaaaaaaa

SEQ ID NO: 26650 - DNA, 1919 bp, Homo sapiens
cctgtccttacccacttttccaaacggggaagactcaggtatcaggaattacccattgcacattttgcgggggggggggctaatgtagacatgacaccaagtgcttttcattttaattctctaagcagtagatgagatctttcccttgggagaaatcacagagatggagttttccatttctgcttatacgaaatatgactgaaaatgaacaaagccacctttttaaccaaatacactagaacatatgcactcaagagttagcataattggagttattttcttgatgttgcatgtgccaagaacacttagggttcccctttgggattacctttgaagccatgcaaggcaagaggcctcacaactttatagtcagaccttgtgttttatccaacccctcctcctgcccaccaagatcatcctgagctgcttcacccattttatttagcagacttattttctaatgctctttagctgttaaaaaaaaaaaatcattcctcaaaaaatagatctacccttaaaggacaaagatttaccaacactgaagacccttacaagttgacagtttctaaagagggttctaggaatgttctgtgtaaggtcagcttcactggaataaacatacatcttcccaaggtgactacttcaaaggcaacactacccattcgggtgcagaaattaccgtacttactctgccataaatgtaaaatgtgtataaagttaagctattgcattttttcataacacatttaaatagaaattggcttttaaagtattgtagttaaaaccagatctcaccaagtaatagttgtgcaattgacaaatgtttggtgccatgtaatggagatgtcacactacacagttgtagtttaaatgcagtccaacataaggtgcatgccactgaactgtaaccctagtaatgtgtcttgtacagttgaaaaataatacttcacctttatataggttaagatatgtaccttatctttaccactcagggtggctttaaaagacggacagctttaggtttgttctcactggaactggttacactttctgtgcaaacttaaccaagtgatgatcgtctggaagctgcattccctcatttccactgtttggtgtgaatctagtctccccactttatctaaaaggaggctagcagggccccagcctgagcagagcagctagagagtgcttccagattcctttgccaaaggaggcccattttccagctgtgagtgacatctgtagtcattggcttcattgcctggcactagccctgtctagaagtggagaaagctggatcacagctggaccacaaccagccccaatccaggatttcccataccatgctggctgtgggctctgtgagcctcagccaggtggccaggctatacttgtcacagctggccacaggcctgctgaaggaacatggggtgtagagccagagcctggttctggttctccgcttgaacagctgacctcgtgcaatcacaggaactctgcgtctccatgtttcactcagatagagaaaatgcctcctttgtttacctctttgaagctgaagtaagtgagactggtgcatgtaaattaatggtagtagagcacctcccacatctgattttataacagtttcccatcactccttaaagaaaaaggccaggccgggcgtggtggttcacgcctgtaatctcagcacttcgggaggccgaggcgggtggatcatgaggtcaggagattgagaccattctggctaacacagtgaacaaaaaattagtcgggcatggtggcgggcgcctgtagtcccagctacttgggaggctgaggcaggagaattgcttgaaccttggaggtggaggctgcagtgagccaagattatgccactgcactccagcctgggtgacagagcgagactccgtctcaaa

SEQ ID NO: 26651 - DNA, 1865 bp, Homo sapiens
cctgtccttacccacttttccaaacggggaagactcaggtatcaggaattacccattgcacattttgcgggggggggggctaatgtagacatgacaccaagtgcttttcattttaattctctaagcagtagatgagatctttcccttgggagaaatcacagagatggagttttccatttctgcttatacgaaatatgactgaaaatgaacaaagccacctttttaaccaaatacactagaacatatgcactcaagagttagcataattggagttattttcttgatgttgcatgtgccaagaacacttagggttcccctttgggattacctttgaagccatgcaaggcaagaggcctcacaactttatagtcagaccttgtgttttatccaacccctcctcctgcccaccaagatcatcctgagctgcttcacccattttatttagcagacttattttctaatgctctttagctgttaaaaaaaaaaaatcattcctcaaaaaatagatctacccttaaaggacaaagatttaccaacactgaagacccttacaagttgacagtttctaaagagggttctaggaatgttctgtgtaaggtcagcttcactggaataaacatacatcttcccaaggtgactacttcaaaggcaacactacccattcgggtgcagaaattaccgtacttactctgccataaatgtaaaatgtgtataaagttaagctattgcattttttcataacacatttaaatagaaattggcttttaaagtattgtagttaaaaccagatctcaccaagtaatagttgtgcaattgacaaatgtttggtgccatgtaatggagatgtcacactacacagttgtagtttaaatgcagtccaacataaggtgcatgccactgaactgtaaccctagtaatgtgtcttgtacagttgaaaaataatacttcacctttatataggttaagatatgtaccttatctttaccactcagggtggctttaaaagacggacagctttaggtttgttctcactggaactggttacactttctgtgcaaacttaaccaagtgatgatcgtctggaagctgcattccctcatttccactgtttggtgtgaatctagtctccccactttatctaattcctttgccaaaggaggcccattttccagctgtgagtgacatctgtagtcattggcttcattgcctggcactagccctgtctagaagtggagaaagctggatcacagctggaccacaaccagccccaatccaggatttcccataccatgctggctgtgggctctgtgagcctcagccaggtggccaggctatacttgtcacagctggccacaggcctgctgaaggaacatggggtgtagagccagagcctggttctggttctccgcttgaacagctgacctcgtgcaatcacaggaactctgcgtctccatgtttcactcagatagagaaaatgcctcctttgtttacctctttgaagctgaagtaagtgagactggtgcatgtaaattaatggtagtagagcacctcccacatctgattttataacagtttcccatcactccttaaagaaaaaggccaggccgggcgtggtggttcacgcctgtaatctcagcacttcgggaggccgaggcgggtggatcatgaggtcaggagattgagaccattctggctaacacagtgaacaaaaaattagtcgggcatggtggcgggcgcctgtagtcccagctacttgggaggctgaggcaggagaattgcttgaaccttggaggtggaggctgcagtgagccaagattatgccactgcactccagcctgggtgacagagcgagactccgtctcaaa

SEQ ID NO: 26652 - DNA, 724 bp, Homo sapiens
ggaggtctgccccaccaagggctggttccctgaattctttggaacagctgtagcaaaactggaatgtgctacagctctttggaggctgcagacccactgaaaacgtcactgaagatattgccggggccactgatgactttataacttcaccaaaggaattaacctctagttattagtaaggaggttttgtataccagtgaaactactgacatcacctggtctgaaggaccccatgaagagatgactcaccaaagaatgcagtttccacatcctgatgatttcatccccattacctgacaaaacaatgaccccaatttcccagcccctcaccctccatgaccccctgaaaaacgtcagctagaaacttctcggagagatggatttaagggtctcctcccatccccttgcttggtgccctgtgatcattacactctttctctgctgcaaaccctgctatctctgtacctgtctgtcactgcacagcaggcatatgaatctgttggtcctataacatcgcaacgtaacattcccatgtggagggggattacactccatgttcttatcacagcaaaacatatgtcacacgtagcaatctatgtaagtgtttggaatcatttcagagctacataacaggcaccattgtgaaatgcaggaaactctgaatttccagttttgaaaaaattgtattggagctctgtctctgctacccactaactgtgatttt

SEQ ID NO: 26653 - DNA, 446 bp, Homo sapiens
cttgctcaactctacctaatgacttttgaactgaaacattcgagtttttaaaaattacattgatcatatatttatttcaaaaatttctttctcttttaacaaaaacacattttaatttaattttctgttcttgacacagtttctactcttttcccatttctttaatcaatttaaactcttatatttgcaagtatttttttagaccgctctaccatcttcagttcttggggttcaaaagatcccattagttgcatccactcactgtgcttcaacgtggctcacttctatgtagggcttataatttttttactgtggggtaatttttcaagagggattgtttaccagagaaatcccagtgtcttgggttgtagactggtccctgtggagtcactcctatagaataattttgtatttgcctcagccaagtatttgtgagttttactgat

SEQ ID NO: 26654 - DNA, 508 bp, Homo sapiens
ttaaaactggacacaagaacacaaaacgcttgggctgctgagagattagaccaacaaccctccacggctacaaaccttttccacgttatatggcacgttataagtgggtgttcctagtgatggttctgattttttttttaaaaagtctaaatatgtttaatgttgtctcagaagacaaaatatattttagacagatattcctcagtgatgagtaagcctcagctatctggaaaattcatgcaggcgccagagatcattactgagtaattcaagctaataactgcgtcatgctggttgtaccctgcatgccaatatctgctaaaagcagcaccacgaaagggaaatacgaatctcactaagcactcacccattcttgttaacgacactggaactgatcatccttaataatacacagataaatctatcaggagcatttccttgcttcctgtgaaaggaagtactcattccatgtgtcctgtgaaattcagccagcttcgggaagctggag

SEQ ID NO: 26655 - DNA, 360 bp, Homo sapiens
atgggagggtcacttgagcccaggagttcgagaccagcctgggcaacagagtaagaccctgtctttggaaaaaaaattaatatttggcaggcgtgttgatgcatgcctgtagacccaactactagggtggctgaggtgggattacttcaagcccaggaggttgaggctgcagtaaggaatgatcacaccactgcactctagcctgggtaatagagcaagactctgtctcaaaaaaaaaaaaaaaaaaaactccagtactcctactgtggtcactttctagctgccaacattaacaccagagaggtgcacagctgactctcatgagctgacatgagccggccctggggaggttttggagtc

SEQ ID NO: 26656 - DNA, 473 bp, Homo sapiens
agccatctcactactttgaaaacaacagtaactctcacaacactacctttttccagcaaattttcccatcgagcacccccagatcatgtcagaaagaaatcttaaagctgctaacccacgatcaaggtcatggggtcagatagttattcagtgtggcagagactctttccttgcccatcagaatggagggaaaagaatattacacagaaatcaaagaagagcttggaaggacacgtatttcacaaatgcattgatgagtaagagagaaaacttatccaaggcagtgacaagagactcctgagacaactggcacatcagtgtacagtgagaccatacctttatagtgacagctttgttttggtatttaactggttatcacacgtgatttttaaattaagcctaataaggtaatgctacataatatgcatttgaagtatttatatgtatacgaagctggctaactaatcattgct

SEQ ID NO: 26657 - DNA, 301 bp, Homo sapiens
aatcagtgctctgtaaaactcaccaatcagcgctctgtaaaatgcaccaatcagcgccctctaaaatgcactaaccagcgccctctaaaatgcaccaatcagcaggagtctaaaagtagccaatcgcggggaggattgtaaaaagggcactctgataggacagaaacggaacatgggaggggacaaataagcaaagaaaagctggccaccccagccagcagtggcaacccgcgctacttgctgtggaagctttgttctttcactcttcacaataaatctggatgctgctcactctttcggt

SEQ ID NO: 26658 - DNA, 386 bp, Homo sapiens
gctgtaccctaaagatcttttagatgttaggtttccctggcccctgtgcctgcctgagctcctttgtgacgtgtgtggtattcccttggtgtccaggccatcacacagtgctttttcttgactgtgtttgtattgctctccattgaaaagcttcttggccgggcgcagtgtctcatacctgtaatcccagcactctcagaggttgaggcgggcagatctcttgaggtcaggaattcgagaccagcctggccaacatggtgaaatgccttctctactaaaaatacaaaaattagctggtgtggtggcacgctcttgtaatcctagttactcaggaggctgaggcaggagaatcgcttgaacctgggaggtggaggctgcagtgagcc

SEQ ID NO: 26659 - DNA, 1203 bp, Homo sapiens
gactattagaagtcagattctaatttaagaggatatagggtttattcataaaaagagatataaaagatggagatcagagtgcttgagtagattagggccacctagactagcaagagaaagaaaaaatgataaggtataaagaagaaggcccaggcatgatggcttgcctgtaatcccagcactttcggagactgaggtgggagaattgcttacggctaggagttcaagagcagcctgaataacagcgagacctagtctcacacacacacacacacacacacacacacacacacacacacacacacagatgttaggttgtgaagggaagacaagggttaaagaaagacatacacacagagggcagttcaacaggaaatgcaggctttatgtccagcataacacctacagaggtggggaaccagcctaatgccagtgcccaccaccgcttacaggctggggtacttataggcctaggtgggaggggtctgggcagtatggcttgctgctatgtactgctatgtgttggtaaggtgttcccatgatgaggcagtttggctcttgttcccacagaatgtgatgttccttgcactttttcccagcagaatatgataaaaggcaggctgtttctcacagcccgaacccccgtggaatgattcactttgatcaaggtctgagaaatggtgggagacttacaaaatgatgcagttggaactaacaagagagaaagaactagaagaagaataaggtagttggcagaactcatgaggaggagaccagatcaggagggaccacaaggacaggagaattagcaacgagagactggctggcaccagtcttgggaaaacttcagagtgagctccattcatggtctattaaaaggcctttgttgtcattcagtgatatgtgcctggcccctgagactttaattcaacactagccaaactatctcatttggataacccccttttcaaagttcaaaagactgattagcccccacagaactgaaggtgaggaaatggggttctagaatctggcagggcagtgtgatgtggaagggcacatttacccttccacaggaatgtcacgggttgatatgggcagaacaactgtaaatttcgcaacggggtgtggctattgttattgctgtcaaagtgggaattcatattgtcagctattcactagttgattagactggcggttcat

SEQ ID NO: 26660 - DNA, 611 bp, Homo sapiens
ttatgagcaaagccgtaagtgtggcttccttattttaaagatgcgtaaacagatccagagaagtgatgtgacttacaaagatttctatcaagttggattcttgcctgagaaaatcagtcttcacaaattctggccccctaagggttctaaacagttttatagctctctgaattattagctttaaaatcaattgaaaatgtagtatattattagtggggaaacatttagatgctgtgggcaatgcttgcactacgttttattctttcagaataagagcagcagcactgggcctaacttcaatttattactggtaaatgagttaatgactaagagcagttgttgaggcctttcttcatgcctgggtccacacatcccagcagtgagcacccaccggtcagctccaagctgggaatgcctgcaggttttctgggctttcagcttagggtggccagatttagcaactaaaaatacaagatgcctcattaaatttgaatttcaagtaaataacaaataatgttttgtataaatatgtctggtgcaatatttgcaaccctattttagctttggttttatatgatcagagtttatatttttattttcataatttgatg

SEQ ID NO: 26661 - DNA, 470 bp, Homo sapiens
tacaaaagtgattgcttctgatttatattcaggatgtaaggcacagaagaaaggcaacatactaataagttacacacagaagttattttatacattttattcatagtatttagtaaaatttatacaattcttcaaatttaaaataattaatttctctttgtattacatgtgtgcccaccaactacagtaaactttattatttgaaacaaatacatgggtttattcctgatcttcttcgttaaaatgcaactccgtatgccagtgctgtggcaagactattatacaattccaaatgtcactgagctcttttcaagttaataagccttaaatcaagggaatttggtgcaaataaactattttcagttctcagaaagtttgtgggtaaagtggtaattttttgaacacggaacagttttcaagggtctcactggaaaatatgcttgggttgttaacagaaggacagtaattgc

SEQ ID NO: 26662 - DNA, 355 bp, Homo sapiens
cgttgcactccagcctgggtgacagagtgagatcccgtctcaaaacaaacaaccctcaaaactctccaataggccaggcacgatggctcacgcctgtaatcccagcactttggtaagtcgaggtgggggcggggggatcacctgaggttgggagttcgagaccagcctggctaacattgtgaaacccagtttctactaaaaattaaaaaattagcctggcatggtggcacgcgcctgtaatcccagctactgggaagctgaggcgagagaatcgcttgaacctgggagacggaggttgcagtgagccaagatcgtgccattgcactccagcttgggcaacaagagagaaagtcaa

SEQ ID NO: 26663 - DNA, 163 bp, Homo sapiens
acctctccagtgtgataatcaaaaatgtctcaagacgttgccaaatgtcttctgaggggcaaaatcagccccaattgagaaccactgccatagagtcagaggaagcagatggattggagaaaatgttaaagctaagggactggagtctcgatgaaaaaagaaa

SEQ ID NO: 26664 - DNA, 93 bp, Homo sapiens
atgaacccctctgagaagacttgttctctaagtgttgaaatcctttttcatctccaaagcgttagtgcccacagagaacctttacaagtaaac

SEQ ID NO: 26665 - DNA, 87 bp, Homo sapiens
acttggacctcacttttccagttaagtggcctctgcacgcgaggagagtgagctccaggactctgcctgtctcagtgctgtgaatga

SEQ ID NO: 26666 - DNA, 394 bp, Homo sapiens
tcagtacaaaatgaacacagccggcgctttggggaacgttcatttgcagctttgttatccttagacaggaagccttctcctccacactttgatcgacatttttcagaaggcaatggcatcaacctttaaaaatggatactttcaagggtttaaaggttgagatttttaagacaaacccagaataggcaaaagttacatattggccaaaaatgtgactccagaaaccatgtgttgtagctaactggggccactagcaaatctttcttttgagacttctgtcctgttagcagaatgcactgatcgaactaaaccttgagcatgacacaggatagaactagttattgttaagaaaataatgttcaagggcattggtccattgtacccaggaatagtt

SEQ ID NO: 26667 - DNA, 234 bp, Homo sapiens
ttccttaattctgaattaattggccctaaaagtattttggaagcaatggttaaaactgttcagcatattagctctatattgtgtttatcaaaatcttttatttataattcactgcaaagcaaatcaaaattagttaagtaaaacaagaaatgtggcttctctgtctatgaagttgccatcctattgtttctttgcttctctactaaacttgctttcactttgcaaaaaaaacca

SEQ ID NO: 26668 - DNA, 1838 bp, Homo sapiens
gttcaagtcattctcctgcctcagcctcccaagtagctgggattacaggtgcctgccaccacgcccggctaattttttttttatttttagtagagatgggttttcaccatcttggccaggctggtctcgaactcctgacttcgtgatccacccacttcagccttccaaagtgctgggattacaggtgtgagccaccacgcccggccttcagtaatcttaaaatacagaaaaagcccttttatctggcatgatggggactgcaagtttgccagttaattgagcgattggttaaagaggcaaattataaaaataaaatgttttatggtaagtttcaaacacataaatttatttgccagcctttgagtggggccctgctgattggagagctgagtcacctgttttattttttattttatttgagacagagtctcactctgtcacccaggctggagttgcagtgagctgagatcgtgctgctggattccagcctgggcaacagggtgagattctgtctcaaaaacagaattggtggctgagtgcggtggctcacgcctgtaatccccacactttgggaggctgaggcggtcggatcatctgaggtcaggagttcaagaccagcctggccaatatgatgaaaccctgtctctactaaaaatacaaaaaaattagtcaggcatggtggcacacacctgtaatcccagctactcgcgaggctgaggcaggagaatcacttgaacccaggaagcggaggttgcggtgagcagagattacgccactgctctccagcctgggcaacaagagtgaaactccatctcaaaaaaagcaaaacaaacaaaaaaagaattggccagcctgggaagtccattcctttggagtctgtgttaccattctcaataaacctaatgagggctggcagaggggaactggccagtctctccttgggctttcaccgtacctcatgccatgtcacctgtaacagtgttgtagttacctgcttatgtctttgtccttgagggcaaggcccatatttatttttatttccagtgcttggcatatattaataaagaggtgcttaagatgtttgtacaaatgagttaaggtggagggaggagagttgaggcacaggtcagctggctttggcttctgtcttcttagtaaggtgaacagtgagtcatccacacagattataatggtagcagagctggagtctacagctccttgagtatgaaagtccccttgagtgtgaaagacaaaatgctggtcgggggaagagaaggggaattaaaaggtaagtggaagatggcctaattgccaagtgtacagcttcagctcagcatataattgttatggaccccagttatccactcacctaaccgtcagtgccctgtggctcagagcagcagtgaagctaagtaggaggtgaggtttggaaggtgagtgctgtgcagcagtcttggagatcatagttgacagtgccggctctggggtgggcaggaagaccattgttgggtaagtgaggggaggtgggggtcacagcaaatatgagaaacacagccaggcactgtggttcacacctgtaaccccagcatttaggaaggctgaggtgggaggatcacttgaggccaggaattcaagaccagcctgggcaacatggtgaaaccctgtctctactaaaaatacagaaattagctgggtgtggtggctcacacctgtactcccagctactcggaaggctgaagtgggaggatggcttgagctcaggaggcagaggttgcagtgagctgagagggcgccattgcgctccaggctgggtgacagcgagattgtgccttaaaaaa

SEQ ID NO: 26669 - DNA, 1037 bp, Homo sapiens
cggccgctccaacatcagaatggtaacacagactccaaaggaatggacttcccaggctgtccattcctttggagtctgtgttaccattctcaataaacctaatgagggctggcagaggggaactggccagtctctccttgggctttcaccgtacctcatgccatgtcacctgtaacagtgttgtagttacctgcttatgtctttgtccttgagggcaaggcccatatttatttttatttccagtgcttggcatatattaataaagaggtgcttaagatgtttgtacaaatgagttaaggtggagggaggagagttgaggcacaggtcagctggctttggcttctgtcttcttagtaaggtgaacagtgagtcatccacacagattataatggtagcagagctggagtctacagctccttgagtatgaaagtccccttgagtgtgaaagacaaaatgctggtcgggggaagagaaggggaattaaaaggtaagtggaagatggcctaattgccaagtgtacagcttcagctcagcatataattgttatggaccccagttatccactcacctaaccgtcagtgccctgtggctcagagcagcagtgaagctaagtaggaggtgaggtttggaaggtgagtgctgtgcagcagtcttggagatcatagttgacagtgccggctctggggtgggcaggaagaccattgttgggtaagtgaggggaggtgggggtcacagcaaatatgagaaacacagccaggcactgtggttcacacctgtaaccccagcatttaggaaggctgaggtgggaggatcacttgaggccaggaattcaagaccagcctgggcaacatggtgaaaccctgtctctactaaaaatacagaaattagctgggtgtggtggctcacacctgtactcccagctactcggaaggctgaagtgggaggatggcttgagctcaggaggcagaggttgcagtgagctgagagggcgccattgcgctccaggctgggtgacagcgagattgtgccttaaaaaa

SEQ ID NO: 26670 - DNA, 270 bp, Homo sapiens
gtagaattgaattccaggcagctcccttaaattgggttcaggctccatgaggactgtaggattttctcatagcaaagactgcagtggtggtaatgggagttgctgcaggcttcctgcttaccttttcccggcagagaagtccctcctggtttccagctgatcccatatgggcagatgaggtggcagaggcagggtgttttgttcccttttctatgcagtcagcctgagtttctgtgttttataaagtttctaccacttccttgatgtact

SEQ ID NO: 26671 - DNA, 500 bp, Homo sapiens
aggcctcgccaaggcacccctccttctttctgctatggtagcatcagaggaggccaaggaaggagctgggattatccctgggtggtaatgagccccccttctgcccacggggttagtggagaacatacaagaagcctggacccctaactgtcaatagggaggctcccctccccttcctgctggatggtgtcagaagaggcctactggagagtcaggactttcagcactgcccagtgataacaaggtgatgttcaccacagtgtcaggagagaccacttgggagcccaaactcccacccctgcctagcagtaatgagaagtcctttccttgagtgtcactggaagcagagcagggagcctggacacctgtcagtgatacagtggcacacctcctttaccctgccagaggggtgtcctagaataccagctaaagcagaaggtttacataagatccagtcttataacatattacaaaaatattcaggtttcagttaaaaaaaa

SEQ ID NO: 26672 - DNA, 349 bp, Homo sapiens
taagtcagggaggtctgccaggccttggattattctatttgctcacggggttttagccaaaggtacaagccaaaataagtagaagctaaacatattgaaaaagaagaaacaaatatttttgcagatattgacagcctaggaaatccacacaaatgtactgcaatactattagattgaaaacagggttcagcgagatagatggacataagataaatataaaagactagatgaatttccttttcaccagtagtaacaataattaaactagataattggaaaagggctccattctgaaacagcagcaattattataatatatagaggcctatactgaatagtacatgcacat

SEQ ID NO: 26673 - DNA, 585 bp, Homo sapiens
ggaagccatctcggtctctttctggtcttcagtgcacagtggccaggacagcctcccccacttcaccgaatcacatttcttcagcagtttccaacagtgaaatcatttctaggacaatggctgctaacacgtgtcagctgaagcactgcagatcgagtcatccaactcaagcttcttcctcttattggaagggataaaccaggtggaagggctcaaatgcgctgcttctggaagcatcctgggtccccctctgctctgctacctttggcttgcacctgagcccagggcagggacaggagcagatcaggagaccccgagagagtgtgagccaggagccaagaccctgcggcacttacctggagccaggaggaaagcccagggacccaaacttctgcaggcggcacttacctggagccaggaggaaagcccagggacccaaacttctgcagactgcgcaggacgccactgacctcgggagcccaggaggacgcgcttcccagaagccacagctgctgagatcgacactggcccagagggttaagagcttggaccttggcttcaggggcacctttgcccagagaaagc

SEQ ID NO: 26674 - DNA, 1813 bp, Homo sapiens
agcagaaacgggttttcaccgtgttggccagggtggtctcgatctcctgactcgtgatccgcccgcctcggcctcccaaagtgctgggattacaggtgagagccaccgcacccggcctgttttgacattcttaatgatcttaataatttggcatctgaaagtctgaaacagtgtcagtattgttagtcaaaaagaacaagttcttcaaccacttgcgtagtaccccaaattatattcaagtccctgtgactccaatgcttggagaagtcattgatatgatttgattaatgttataactttgaatttcctaactttctcagcggcatagattctaagccacttccatgtgctttcagatggcatcttaatagattggtgttgaggttattttaatgtccataaacaagaaaggtctgggaacaatctgtatgatttttctttcacattttcttatctttgccactggaggttaactgtcgtccagatatgcatatgaattgtgaaatgcaaagaagcaaacatttgggggtaggggagtaagtgctgtagttcttttgttcacttattttaatactatagaagtgtatttcattttataaaaagcaagaatcataaaaaccctctgtattttgatttatgaagaatatagcttctctctgaagtatctcaagatatatcttggggaccacaatgggatcacagtgtaattgtttgctgttggtgtcatgtttggattttagcatggtttgttatgcatgtcagtggcctctgatttcagaaagagcttggcgagggcagaacacataagggaaggaaacctctgctcaagagagtggcctgggatcacagtgtcgtcattcccaatttccttgaattccttcttggcagaccttactgtaatattacacaaaactgtaatgagtggccctcctttggaggtaacagatgcctttcctaagaactcaaagttctcttttcagcgtgctgtgacttgaatatggaaatcattttaatttcttcttttctcttatggggaaatttccatgcttggtttgtcaagacaagagaattcattccttattattgaaacattaatgaactgaaacacgttgaagcaagtaaaaaatcaaaattaggttggtttatcttaaatagttaaaagccttccttagtacaaaataaattaagcattgtaaaacgaagttaattcaggtaattactcagtacagaaatctaaccgtatatatcattggtattgcaatttaagggtataattaaattctcagaaatctgcaggactcactctaatttgctttctatatttatttacaagacagggaacaaatatgtgtcaatgtgcagcttaacagaggggacttgaatggataaaattatctttaattatctagagctacccagtactgggcttgaatttaatcatagtcaaatgtttcctctggcagcataatattaccatacaccatattaccttataattgccattacagttccttatcaaaaatgttaattctttgcttgagcaaaaatcaataaaaccttatgtttgaccctaaagtatttgatcagggaacagaaggtgtgaattggacagatcccccgaataactttcttcaatcaagttgaaaaaccaaacagctatgtaagtccccaggagagctctttttcccttatcttctcatttgttttgttataaactgtttaaatagttcaaatggttgtgcatgcctaggggatgaaacctatgtaatagaaatgtactgttttatgaataaggagtaaaattgttttaaaa

SEQ ID NO: 26675 - DNA, 851 bp, Homo sapiens
agtcacaagacaggattgaactgttcaatttttcaaaccaagtagtttgtaaatactcagcccaaattccatcaatatattgcttatagcaggtcaggtggaaagggagcaggtggatttttttgccttatctaggggattatttaccctccttgataccctcaaagcaactttaatctgagggtatagtgactgctgcagtctgatccttttatacaaatggaagaaagctcttttgttagattaattcagcgattttgaggatacattttctttttgttaattatcaaactttttaaagctgttctttcccaaaggggaagcatgaaagcttccactaaaaatttaagatgttaattactataatttatgaatatttattataattaatgtaatattagtaattcccaggatatgtgcttattctagaaaacatttacaagggattttgatgaaaaaaaaggaaacaagctgcacacttagaaaaggatctacggtacagtaaaccaaacctgtactgattatgatgttttcaaattaacctcctttttctttttggcctaatcataatagttgtcatttggactgagctattagaatttggaaggctgtgaaggaatggaataatctgaacacagaaccaggattctttctgcccttttaggtttgctccagaattctagggtggtgttttcctgtgtcatggatgtggtgacctaatcatcgcgcatctgaaagtagttttctctttatgtcattctggggcagcagtaacagtcagcagactgagaagtcctcagtcaaaagctggcagaatggaaagggcttggaaatggtggagaacaatgtaa

SEQ ID NO: 26676 - DNA, 382 bp, Homo sapiens
cagccaacattatttgtaggccaggtgtagtggcttatacctttaatcccagcacttcgggaggccaacatgggaggatggcttgaggccaggagttcaagaccagtttgagcaacatagcaagactaaatagccatacttttgtatactattcagcacaaaaatgttaataataagaattaaataatactcattttagcttttgtgttcatttacaatgagcaatatattctttttaaaatttttgatgtgtaataattatacatatttagggatacagactgacattttggctcatgtatacaatgtaatgatcaaatcagggtaattagcatatctcttgcctcaaacacttatttattaattttgggaatattcaaaa

SEQ ID NO: 26677 - DNA, 594 bp, Homo sapiens
tcagtgataagatgagaaaattgaggcttagggaggtataatgtactttttctaaggtcacatggctagtacatggtagaagccaagtatgaattcaggacttttctggcttcaaagatctaggctcttacctgtactggatgtggcttccttgacttctttacaggttggagaattagggctaattggatgttctcactagaaagtgtgtgtgttggggggtgtgtggaggatgttctcactggaaagtgtatgtgtgtgggtgattttccttggagctattaatatttttgctactagttggtaagtttttttgttgttgttaaagctaataatgaagcttataatgtaataatataaatgtttagtaatagctaaactttttgcttgtgtgggtcagttttatataatcttaagttcttataattttttatctggaaaatttcttaagctttgatatttttaagtgcattgtaagaattaaaagtcagaaaaatatttcctggtaggggcctttgctttagaattttagaagccattaaaagagagggaaaagaaagtgatgaaagatagtttaatagctttactagaaat

SEQ ID NO: 26678 - DNA, 285 bp, Homo sapiens
ctggaacattcaggagctgatatgtgtttcaaaggcttgaagttctttctattttatatgtcagaggggaaatctagatttatatcagtgagctagaaaaatttatctacagagaaatgtaaaatgttaaagagatgtaaggaagcgaatcttttgaaaggaagacaaatatttatgtatatatcaggccatttgatttgtgctatttctccctaaagtaggactctgatacaaacaatgtagaaacaaggaggaagggacaaaataaaaaaataatttatttta

SEQ ID NO: 26679 - DNA, 341 bp, Homo sapiens
gagacagtgtctcactgtgtcacccaggctggagtgcaatggcaggatcttggctcactgcgacctgtgtctcccgggctcaggcaattctcctgcctcagacacctgaatagctgggaatacaggcacatgtcaccacacctggctattttttgtatttttagtagagacggtgtttcaccctgttggacaggctggcctcaaactcctggcctcaagtgatctgcccaccttggcctcccaaagtgctgggattacaggtgtgagccacctgaaaaatcattgtaaaaatcaactgtcctacattcttatttggaagtgactcctctaaccaaagacag

SEQ ID NO: 26680 - DNA, 870 bp, Homo sapiens
gccagtgggttaggtaagggcaggttatggcgggttttgatgtgcaatttgacttttatccttaaagcaatggggagttattgagtcttgagcagaggcatgaaatgagcagatttgcattttagaaaaattgtttttttctaaacagaaaaacagataggatgtaggtagctcaaggcaaggacattagatagaaggttgttaaagtagtcaggtgggaagtgacgtatagactaaggaggtaacagtattgacaatagaagatggattaaagaactcttaagttagaacctcaaaagtcagaagaatgtaggattatcagatttctggtatgagggactagagtttggtaactggagttttccactgatgttggtaatactagagtaaatcaagtttgtgaagagagatgaaattttcagtttaatctatgtagagtttaacatacctgtggtacagacaagcaaagatacaattgtgatttaggtcggaattcagcagagaggtctggactaaagaaacagattcaaatgtcataagtgtgtgagcggtgttgaaaccatgggttgggtgaaattaccattgagtacagatggccaggaatatccctaagggacataaacatttaaagaaccaccaaaaatgactgagaagtgctaagagaaaatgcaggagagaatactaacatagaagccaatagaagagagaatttcaagaaaaaagtaagagtttcgagaagcaaaagcaaagactttaaatatacagacaagagagtatccatcgaatttggcagcctccaaaagctgggcagcctccaaagtgtggtggctgaagccagactgaagaaagtcaagaaataaaagtgatgta

SEQ ID NO: 26681 - DNA, 828 bp, Homo sapiens
gagaattagacatttaataaaaatgccaggtgttccttgtcctcattcttccatatttgtcttatatatgtttagcaaaataattgagttaaatatgagcttttatgcttaagcgatggctgtgttttcgctcttaataaaattgcaccataaaatttgatttttagtgccaaaattataaaaaggggttgggcttgtttcctcaacctgaacaacttcttaccttcaagatggatgattcaaagaggaataatagggaatttcttagtatgaagttacttggttgttttcttaggaaaacaaaaggtagaatttaacagcatggggcctgatttaaatagaaaataaatgtacagatataatcaactctgctgtcatggggatttcaagttataaatgcaataagtaacatcccctgacttattctatgtacttttgccctaatctactacctattagtctgaaacttgagtttttaaatttaatctctatgtaaaagaggaataaattgaatgcataattaaaatatatgttgtcaattatcacacctttttgcctagactataagcttcatttttcctgttatatccactaaattaatttatgcttgtttttccattaaaacaagttactttggctgggtgcagtgactcccgcctgtaatcctagcactttgggaggctgaggtgggcagatcatgaggtcaggagttcgagaccagcctgtccaacatggtgaaaacctgtctctactaaaaatacaaaaattagccgggcatgggtggccggcacctgtagtcccagttgcttgggaggctgaggcaggaga

SEQ ID NO: 26682 - DNA, 1636 bp, Homo sapiens
tggcggggcggcaggtcccagagcagcgctcgccacctccccccggcctgggcagcgctcgcccggggagtccagcggtgtcctgtggagctgccgccatggccccgcggcgggcgcgcggctgccggaccctcggtctcccggcgctgctactgctgctgctgctccggccgccggcgacgcggggcatcacgtgccctccccccatgtccgtggaacacgcagacatctgggtcaagagctacagcttgtactccagggagcggtacatttgtaactctggtttcaagcgtaaagccggcacgtccagcctgacggagtgcgtgttgaacaaggccacgaatgtcgcccactggacaacccccagtctcaaatgcattagagaccctgccctggttcaccaaaggccagcgccaccctccacagtaacgacggcaggggtgaccccacagccagagagcctctccccttctggaaaagagcccgcagcttcatctcccagctcaaacaacacagcggccacaacagcagctattgtcccgggctcccagctgatgccttcaaaatcaccttccacaggaaccacagagataagcagtcatgagtcctcccacggcaccccctctcagacaacagccaagaactgggaactcacagcatccgcctcccaccagccgccaggtgtgtatccacagggccacagcgacaccactgtggctatctccacgtccactgtcctgctgtgtgggctgagcgctgtgtctctcctggcatgctacctcaagtcaaggcaaactcccccgctggccagcgttgaaatggaagccatggaggctctgccggtgacttgggggaccagcagcagagatgaagacttggaaaactgctctcaccacctatgaaactcggggaaaccagcccagctaagtccggagtgaaggagcctctctgctttagctaaagacgactgagaagaggtgcaaggaagcgggctccaggagcaagctcaccaggcctctcagaagtcccagcaggatctcacggactgccgggtcggcgcctcctgcgcgagggagcaggttctccgcattcccatgggcaccacctgcctgcctgtcgtgccttggacccagggcccagcttcccaggagagaccaaaggcttctgagcaggatttttatttcattacagtgtgagctgcctggaatacatgtggtaatgaaataaaaaccctgccccgaatcttccgtccctcatcctaactttcagttcacagagaaaagtgacatacccaaagctctctgtcaattacaaggcttctcctggcgtgggagacgtctacagggaagacaccagcgtttgggcttctaaccaccctgtctccagctgctctgcacacatggacagggacctgggaaaggtgggagagatgctgagcccagcgaatcctctccattgaaggattcaggaagaagaaaactcaactcagtgccattttacgaatatatgcgtttatatttatacttccttgtctattatatctatacattatatattatttgtattttgacattgtaccttgtataaacaaaataaaacatctattttcaatatttttaaaatgcattaagagaat

SEQ ID NO: 26683 - DNA, 202 bp, Homo sapiens
agggaaaggaaaaaaaaatccttcgcccaaaaaatttccctttcccaaaaaggtcgcacattttacgaatatatgcgtttatatttatacttccttgtctattatatctatacattatatattatttgtattttgacattgtaccttgtataaacaaaataaaacatctattttcaatatttttaaaatgcattaagagaat

SEQ ID NO: 26684 - DNA, 2026 bp, Homo sapiens
aagctgcagcaggaattcggcgaagtggcggagctggggccccagcgggcgccgggggccgcgggagccagcaggtggcgggggctgcgctccgcccgggccagagcgcaccaggcaggtgcccgcgcctccgcaccgcggcgacacctccgcgggcactcacccaggccggccgctcacaaccgagcgcagggccgcggagggagaccaggaaagccgaaggcggagcagctggaggcgaccagcgccgggcgaggtcaagtggatccgagccgcagagagggctggagagagtctgctctccgatgactttgcccactctcttcgcagtggggacaccggaccgagtgcacactggaggtcccagagcacgacgagcgcggaggaccgggaggctcccgggcttgcgtggatgcaagagacaggctggctgtcctggcgggaaggagcagaatatctgaaagcttcaaccatgaggtccagacacacgaggcctgcgtgagactcaggacaatggaaaactgcccccagtgccaccaccatcggacaagcaggcagcaagcaggcaggtagagaaggacagaagatcagtgtggagcagaacatggagaaaaagcctctgacactccagcaccagatagcaccagaggcctcaaagccagtggggctctgcaggcatcacgtgccctccccccatgtccgtggaacacgcagacatctgggtcaagagctacagcttgtactccagggagcggtacatttgtaactctggtttcaagcgtaaagccggcacgtccagcctgacggagtgcgtgttgaacaaggccacgaatgtcgcccactggacaacccccagtctcaaatgcattaagcccgcagcttcatctcccagctcaaacaacacagcggccacaacagcagctattgtcccgggctcccagctgatgccttcaaaatcaccttccacaggaaccacagagataagcagtcatgagtcctcccacggcaccccctctcagacaacagccaagaactgggaactcacagcatccgcctcccaccagccgccaggtgtgtatccacagggccacagcgacaccactgtggctatctccacgtccactgtcctgctgtgtgggctgagcgctgtgtctctcctggcatgctacctcaagtcaaggcaaactcccccgctggccagcgttgaaatggaagccatggaggctctgccggtgacttgggggaccagcagcagagatgaagacttggaaaactgctctcaccacctatgaaactcggggaaaccagcccagctaagtccggagtgaaggagcctctctgctttagctaaagacgactgagaagaggtgcaaggaagcgggctccaggagcaagctcaccaggcctctcagaagtcccagcaggatctcacggactgccgggtcggcgcctcctgcgcgagggagcaggttctccgcattcccatgggcaccacctgcctgcctgtcgtgccttggacccagggcccagcttcccaggagagaccaaaggcttctgagcaggatttttatttcattacagtgtgagctgcctggaatacatgtggtaatgaaataaaaaccctgccccgaatcttccgtccctcatcctaactttcagttcacagagaaaagtgacatacccaaagctctctgtcaattacaaggcttctcctggcgtgggagacgtctacagggaagacaccagcgtttgggcttctaaccaccctgtctccagctgctctgcacacatggacagggacctgggaaaggtgggagagatgctgagcccagcgaatcctctccattgaaggattcaggaagaagaaaactcaactcagtgccattttacgaatatatgcgtttatatttatacttccttgtctattatatctatacattatatattatttgtattttgacattgtaccttgtataaacaaaataaaacatctattttcaatatttttaaaatgcattaagagaat

SEQ ID NO: 26685 - DNA, 1982 bp, Homo sapiens
aagctgcagcaggaattcggcgaagtggcggagctggggccccagcgggcgccgggggccgcgggagccagcaggtggcgggggctgcgctccgcccgggccagagcgcaccaggcaggtgcccgcgcctccgcaccgcggcgacacctccgcgggcactcacccaggccggccgctcacaaccgagcgcagggccgcggagggagaccaggaaagccgaaggcggagcagctggaggcgaccagcgccgggcgaggtcaagtggatccgagccgcagagagggctggagagagtctgctctccgatgactttgcccactctcttcgcagtggggacaccggaccgagtgcacactggaggtcccagagcacgacgagcgcggaggaccgggaggctcccgggcttgcgtgggcatcacgtgccctccccccatgtccgtggaacacgcagacatctgggtcaagagctacagcttgtactccagggagcggtacatttgtaactctggtttcaagcgtaaagccggcacgtccagcctgacggagtgcgtgttgaacaaggccacgaatgtcgcccactggacaacccccagtctcaaatgcattagagaccctgccctggttcaccaaaggccagcgccaccctccacagtaacgacggcaggggtgaccccacagccagagagcctctccccttctggaaaagagcccgcagcttcatctcccagctcaaacaacacagcggccacaacagcagctattgtcccgggctcccagctgatgccttcaaaatcaccttccacaggaaccacagagataagcagtcatgagtcctcccacggcaccccctctcagacaacagccaagaactgggaactcacagcatccgcctcccaccagccgccaggtgtgtatccacagggccacagcgacaccactgtggctatctccacgtccactgtcctgctgtgtgggctgagcgctgtgtctctcctggcatgctacctcaagtcaagggcctctgtctgctcctgccatccccgcagtgctggacatacatgctcagtgggaagcgtctgttgatttgagggcaaccccctcctcttttcaaaacctatgaaccacctgctttgcaggcaaactcccccgctggccagcgttgaaatggaagccatggaggctctgccggtgacttgggggaccagcagcagagatgaagacttggaaaactgctctcaccacctatgaaactcggggaaaccagcccagctaagtccggagtgaaggagcctctctgctttagctaaagacgactgagaagaggtgcaaggaagcgggctccaggagcaagctcaccaggcctctcagaagtcccagcaggatctcacggactgccgggtcggcgcctcctgcgcgagggagcaggttctccgcattcccatgggcaccacctgcctgcctgtcgtgccttggacccagggcccagcttcccaggagagaccaaaggcttctgagcaggatttttatttcattacagtgtgagctgcctggaatacatgtggtaatgaaataaaaaccctgccccgaatcttccgtccctcatcctaactttcagttcacagagaaaagtgacatacccaaagctctctgtcaattacaaggcttctcctggcgtgggagacgtctacagggaagacaccagcgtttgggcttctaaccaccctgtctccagctgctctgcacacatggacagggacctgggaaaggtgggagagatgctgagcccagcgaatcctctccattgaaggattcaggaagaagaaaactcaactcagtgccattttacgaatatatgcgtttatatttatacttccttgtctattatatctatacattatatattatttgtattttgacattgtaccttgtataaacaaaataaaacatctattttcaatatttttaaaatgcattaagagaat

SEQ ID NO: 26686 - DNA, 1829 bp, Homo sapiens
aagctgcagcaggaattcggcgaagtggcggagctggggccccagcgggcgccgggggccgcgggagccagcaggtggcgggggctgcgctccgcccgggccagagcgcaccaggcaggtgcccgcgcctccgcaccgcggcgacacctccgcgggcactcacccaggccggccgctcacaaccgagcgcagggccgcggagggagaccaggaaagccgaaggcggagcagctggaggcgaccagcgccgggcgaggtcaagtggatccgagccgcagagagggctggagagagtctgctctccgatgactttgcccactctcttcgcagtggggacaccggaccgagtgcacactggaggtcccagagcacgacgagcgcggaggaccgggaggctcccgggcttgcgtgggcatcacgtgccctccccccatgtccgtggaacacgcagacatctgggtcaagagctacagcttgtactccagggagcggtacatttgtaactctggtttcaagcgtaaagccggcacgtccagcctgacggagtgcgtgttgaacaaggccacgaatgtcgcccactggacaacccccagtctcaaatgcattagagaccctgccctggttcaccaaaggccagcgccaccctccacagtaacgacggcaggggtgaccccacagccagagagcctctccccttctggaaaagagcccgcagcttcatctcccagctcaaacaacacagcggccacaacagcagctattgtcccgggctcccagctgatgccttcaaaatcaccttccacaggaaccacagagataagcagtcatgagtcctcccacggcaccccctctcagacaacagccaagaactgggaactcacagcatccgcctcccaccagccgccagtggctatctccacgtccactgtcctgctgtgtgggctgagcgctgtgtctctcctggcatgctacctcaagtcaaggcaaactcccccgctggccagcgttgaaatggaagccatggaggctctgccggtgacttgggggaccagcagcagagatgaagacttggaaaactgctctcaccacctatgaaactcggggaaaccagcccagctaagtccggagtgaaggagcctctctgctttagctaaagacgactgagaagaggtgcaaggaagcgggctccaggagcaagctcaccaggcctctcagaagtcccagcaggatctcacggactgccgggtcggcgcctcctgcgcgagggagcaggttctccgcattcccatgggcaccacctgcctgcctgtcgtgccttggacccagggcccagcttcccaggagagaccaaaggcttctgagcaggatttttatttcattacagtgtgagctgcctggaatacatgtggtaatgaaataaaaaccctgccccgaatcttccgtccctcatcctaactttcagttcacagagaaaagtgacatacccaaagctctctgtcaattacaaggcttctcctggcgtgggagacgtctacagggaagacaccagcgtttgggcttctaaccaccctgtctccagctgctctgcacacatggacagggacctgggaaaggtgggagagatgctgagcccagcgaatcctctccattgaaggattcaggaagaagaaaactcaactcagtgccattttacgaatatatgcgtttatatttatacttccttgtctattatatctatacattatatattatttgtattttgacattgtaccttgtataaacaaaataaaacatctattttcaatatttttaaaatgcattaagagaat

SEQ ID NO: 26687 - DNA, 1862 bp, Homo sapiens
aagctgcagcaggaattcggcgaagtggcggagctggggccccagcgggcgccgggggccgcgggagccagcaggtggcgggggctgcgctccgcccgggccagagcgcaccaggcaggtgcccgcgcctccgcaccgcggcgacacctccgcgggcactcacccaggccggccgctcacaaccgagcgcagggccgcggagggagaccaggaaagccgaaggcggagcagctggaggcgaccagcgccgggcgaggtcaagtggatccgagccgcagagagggctggagagagtctgctctccgatgactttgcccactctcttcgcagtggggacaccggaccgagtgcacactggaggtcccagagcacgacgagcgcggaggaccgggaggctcccgggcttgcgtgggcatcacgtgccctccccccatgtccgtggaacacgcagacatctgggtcaagagctacagcttgtactccagggagcggtacatttgtaactctggtttcaagcgtaaagccggcacgtccagcctgacggagtgcgtgttgaacaaggccacgaatgtcgcccactggacaacccccagtctcaaatgcattagagaccctgccctggttcaccaaaggccagcgccaccctccacagtaacgacggcaggggtgaccccacagccagagagcctctccccttctggaaaagagcccgcagcttcatctcccagctcaaacaacacagcggccacaacagcagctattgtcccgggctcccagctgatgccttcaaaatcaccttccacaggaaccacagagataagcagtcatgagtcctcccacggcaccccctctcagacaacagccaagaactgggaactcacagcatccgcctcccaccagccgccaggtgtgtatccacagggccacagcgacaccactgtggctatctccacgtccactgtcctgctgtgtgggctgagcgctgtgtctctcctggcatgctacctcaagtcaaggcaaactcccccgctggccagcgttgaaatggaagccatggaggctctgccggtgacttgggggaccagcagcagagatgaagacttggaaaactgctctcaccacctatgaaactcggggaaaccagcccagctaagtccggagtgaaggagcctctctgctttagctaaagacgactgagaagaggtgcaaggaagcgggctccaggagcaagctcaccaggcctctcagaagtcccagcaggatctcacggactgccgggtcggcgcctcctgcgcgagggagcaggttctccgcattcccatgggcaccacctgcctgcctgtcgtgccttggacccagggcccagcttcccaggagagaccaaaggcttctgagcaggatttttatttcattacagtgtgagctgcctggaatacatgtggtaatgaaataaaaaccctgccccgaatcttccgtccctcatcctaactttcagttcacagagaaaagtgacatacccaaagctctctgtcaattacaaggcttctcctggcgtgggagacgtctacagggaagacaccagcgtttgggcttctaaccaccctgtctccagctgctctgcacacatggacagggacctgggaaaggtgggagagatgctgagcccagcgaatcctctccattgaaggattcaggaagaagaaaactcaactcagtgccattttacgaatatatgcgtttatatttatacttccttgtctattatatctatacattatatattatttgtattttgacattgtaccttgtataaacaaaataaaacatctattttcaatatttttaaaatgcattaagagaat

SEQ ID NO: 26688 - DNA, 1252 bp, Homo sapiens
cgggagcgggctatgtagcaggcgtcgccagtgtcttctcggaagtcggagtcagtaatctcacgaggccagagatgacctctccccttcgggaaaagcccgcagcttcatctcccagctcaaacaacacagcggccacaacagcagctattgtcccgggctcccagctgatgccttcaaaatcaccttccacaggaaccacagagataagcagtcatgagtcctcccacggcaccccctctcagacaacagccaagaactgggaactcacagcatccgcctcccaccagccgccaggtgtgtatccacagggccacagcgacaccactgtggctatctccacgtccactgtcctgctgtgtgggctgagcgctgtgtctctcctggcatgctacctcaagtcaaggcaaactcccccgctggccagcgttgaaatggaagccatggaggctctgccggtgacttgggggaccagcagcagagatgaagacttggaaaactgctctcaccacctatgaaactcggggaaaccagcccagctaagtccggagtgaaggagcctctctgctttagctaaagacgactgagaagaggtgcaaggaagcgggctccaggagcaagctcaccaggcctctcagaagtcccagcaggatctcacggactgccgggtcggcgcctcctgcgcgagggagcaggttctccgcattcccatgggcaccacctgcctgcctgtcgtgccttggacccagggcccagcttcccaggagagaccaaaggcttctgagcaggatttttatttcattacagtgtgagctgcctggaatacatgtggtaatgaaataaaaaccctgccccgaatcttccgtccctcatcctaactttcagttcacagagaaaagtgacatacccaaagctctctgtcaattacaaggcttctcctggcgtgggagacgtctacagggaagacaccagcgtttgggcttctaaccaccctgtctccagctgctctgcacacatggacagggacctgggaaaggtgggagagatgctgagcccagcgaatcctctccattgaaggattcaggaagaagaaaactcaactcagtgccattttacgaatatatgcgtttatatttatacttccttgtctattatatctatacattatatattatttgtattttgacattgtaccttgtataaacaaaataaaacatctattttcaatatttttaaaatgcattaagagaat

SEQ ID NO: 26689 - DNA, 1664 bp, Homo sapiens
aagctgcagcaggaattcggcgaagtggcggagctggggccccagcgggcgccgggggccgcgggagccagcaggtggcgggggctgcgctccgcccgggccagagcgcaccaggcaggtgcccgcgcctccgcaccgcggcgacacctccgcgggcactcacccaggccggccgctcacaaccgagcgcagggccgcggagggagaccaggaaagccgaaggcggagcagctggaggcgaccagcgccgggcgaggtcaagtggatccgagccgcagagagggctggagagagtctgctctccgatgactttgcccactctcttcgcagtggggacaccggaccgagtgcacactggaggtcccagagcacgacgagcgcggaggaccgggaggctcccgggcttgcgtgggcatcacgtgccctccccccatgtccgtggaacacgcagacatctgggtcaagagctacagcttgtactccagggagcggtacatttgtaactctggtttcaagcgtaaagccggcacgtccagcctgacggagtgcgtgttgaacaaggccacgaatgtcgcccactggacaacccccagtctcaaatgcattagaaccacagagataagcagtcatgagtcctcccacggcaccccctctcagacaacagccaagaactgggaactcacagcatccgcctcccaccagccgccaggtgtgtatccacagggccacagcgacaccactgtggctatctccacgtccactgtcctgctgtgtgggctgagcgctgtgtctctcctggcatgctacctcaagtcaaggcaaactcccccgctggccagcgttgaaatggaagccatggaggctctgccggtgacttgggggaccagcagcagagatgaagacttggaaaactgctctcaccacctatgaaactcggggaaaccagcccagctaagtccggagtgaaggagcctctctgctttagctaaagacgactgagaagaggtgcaaggaagcgggctccaggagcaagctcaccaggcctctcagaagtcccagcaggatctcacggactgccgggtcggcgcctcctgcgcgagggagcaggttctccgcattcccatgggcaccacctgcctgcctgtcgtgccttggacccagggcccagcttcccaggagagaccaaaggcttctgagcaggatttttatttcattacagtgtgagctgcctggaatacatgtggtaatgaaataaaaaccctgccccgaatcttccgtccctcatcctaactttcagttcacagagaaaagtgacatacccaaagctctctgtcaattacaaggcttctcctggcgtgggagacgtctacagggaagacaccagcgtttgggcttctaaccaccctgtctccagctgctctgcacacatggacagggacctgggaaaggtgggagagatgctgagcccagcgaatcctctccattgaaggattcaggaagaagaaaactcaactcagtgccattttacgaatatatgcgtttatatttatacttccttgtctattatatctatacattatatattatttgtattttgacattgtaccttgtataaacaaaataaaacatctattttcaatatttttaaaatgcattaagagaat

SEQ ID NO: 26690 - DNA, 714 bp, Homo sapiens
cttagtagagacgggctttcgccatgttgaccaggctagtctcgaactcctgacctcagacgatccacctgcctcggtttcccaaagtgctgggattacatgtgtgagccactgcgcctggccaattaatttccttttaaatagcaacttgtggctagtggctgccaaatcagacagtgcaaatatacagtaaaggtggagtagtatcaaaatcagaatcaatgagtttgaccagataaattttcatgttcctgaaatgttgatctatctccagatagatgtttaggccatataatgagtttgtttatatttttttgtttgttttgtaactgattcctttaattattctagtaaaaagtctagaaaagtacagcttcaaagctgcaatagcacttaaggagcatcagtcaagtcctctcacctcagttcatcttctgatctctcaggcttttaaaactcagatgtttgttttcaccttgtcatgtttcattgcatctttgatcacttctgcagcagttctccagagaaaagattataggtagtaactcataatatccctttagtatcaagaactggtatttactatatactcattggctaacatgtttcattatctggagctttgggactcattgcctccagggtaactacctcagaggcgacatgctaatccttatgtgagtttcccttccttctctccagggtgacaccata

SEQ ID NO: 26691 - DNA, 381 bp, Homo sapiens
aattctagttggggatcccccagggtgtcccctaccaaaaagttggggtttttatgtttttttttttgtttttaaactcctgaccttcaaataataaaaatcaattcctttgataatttattttgggtgcagttgggtgttatactttcctgttgtacatccccagaagtgtgtaagctctgaaacagtggaaggcctgataaattctatttcatttctgatgaccaccatatgtacaagttaaaagattgaagtttcttttccaggattaataccagggagcaatttagccactaaagcaaatagaactaaaagggaagctttcttaggcccctattttgttaatttcctcaagatacttggaaaataatatttaaaaaa

SEQ ID NO: 26692 - DNA, 380 bp, Homo sapiens
tgaactaccaaaagttttgctgtagatcaggggttggtaaactacagcccacctgcttttgtagtctgtgaggagggaatggtgttcccatttttaaatggttgggttttttttttctttaaggtagaatatgtcagccgggcgcggtggctcacgcctgtaatcccagcactttgggaggccaaggcgggcagatcacgaggtcaggagatcgagaccatcctggctaccacggtgaaaccccgtctctactaaaaatacaaaaaattagccgggcgtggtggcgggcgcctgtagtcccagctactcgggaagctgaggcaggagaatggcgtgaacccgggagacagagcttgcagcgagctgagatcatgccactg

SEQ ID NO: 26693 - DNA, 454 bp, Homo sapiens
ccactacaccaagttgcctaccctgtttcatctgaaaagtatgtgatttaagagataaacaatttcacagcattgtgcagagagggtcagaaattctctcaagtgcccctggggtatcttctagagagagggggatttttagaatgctattaaaacgtccaaagggcaaatgcagaaatccctttgtagtcttcagacaccaacaaagctggtccctataccctctgtcctcttgtccttccttctgtggcagacaccaacaggtgaagggagctggcctggctgagctgcatcaagacctttccccactagtgcgttcaaggccagcacaagagagcacttcacctgtgcttcactaggcagtgtggttgcacagctcctcctctcaacacagggtgctccctcaagggccctccacattagaagggtgtcaggttcagacacctcctcagca

SEQ ID NO: 26694 - DNA, 688 bp, Homo sapiens
ggggaaggagagagtggaaactagaaaggcatatataagaataggaatcttgtggaatgagggagttgaaaggacaggaattattaatagaggaaagttttggaggagcagtgaagaaaaagggatctagtgcacatggttgcttcttttcttgagcccaaagaggtaaggataatttttacctgggaaaggaagtatgggaaatttatgtcctatacatttgctgtggagaaataaacagtcatttgccaagaatgatagatacaggatagtagccttaagagaatcatcatgaggaacttggggagtaaagctgataaggaatactttgaaaaaaaaaaaaaaaaaaaggctcctgagctactttgaggaagatcttgaattcatagtggtactggtccacaattttgatttttctctatcaaaacttagaagctgtggttcaggaatgttgaagatgagtgcttaggatcattcaggattgggtatgattaacaggatgaatatgatcaaaaaataatggggatggggtaaaggaattcttcaagacacaagctcaggcttcgtcttttccttgaaatggcccccattggtcttttctcttttaattttgtacttttctctgctattgctgccttatgtttagtccattagaatttacgcacacacacatacacacacaccctta

SEQ ID NO: 26695 - DNA, 507 bp, Homo sapiens
ttccaatctatgctttattgttaaaaaaaaattccaacacttaggaacaacgcaaacacccacctagatacagtgtctaagggaaacttggtaacgtcgtttaaaatagaatagtctgaaccagtagttcttaaattatgcttatggagcacactatgtttttttatgccagatttaggtattctgttattaaaatcaaataatagtagtgggtttttttttagcattttaaaacaaaaaaagtcagttaattaagatttcttaatcttaactctgttgcaataatttttttaaattttgctttaacactcttattgaaataaataagtagcaaatacagtggaagactggaagatatcctattacccttaatttagcatactgtgtttacccgttttggggaaaagagttagagattatgctatgtgtttgaagcatataatattgtcatttgctggaaaaaaattttagattgaacaatcgaattaaatatatcatgtcatggta

SEQ ID NO: 26696 - DNA, 351 bp, Homo sapiens
gtgcagacaaagccctgacgaatagaggcctgcgcagagtgcccggggtgcagggcagcagggcagccagtgaaccactgagctcgcactgtagccagtcctgtgtgcccctgctggattctgcttctatgagggaggcagcaaggagttgggacttcacaggtgaaaggacttgccagaggcagagtctcgttctatcacccaggctggagtgcagcggggcgatctctgttcattacaacctccgcctcccgggttcaagcgattctcctgtctcagcctcctgagtagctgggattatagagggtcttactttgtcgcccaggctggagtacagtggcatgatcgtag

SEQ ID NO: 26697 - DNA, 541 bp, Homo sapiens
ttcttttttgccttctctgcctctctcactcttaccctctttaacaactcctgagatgcactcaaagaaatagggagtttaatccattttgactcaggtgcttgaactcacttagaaggccttagagatgagacatctcaggaagtaattaaggttaattggagttacaggggtgggccctgatctgatagaattattgttgtcatgagaagaaagctggctcttaaccaccctccctccccctcccaccaaaatgtaccaaaaaagaggttgtgtaaggacacagtgagatggtggccacctacaagccacgaaaagagacctcagaatggcctgtgttgctggcaccttaatcttggatttcccaaaacaaagttggctgggtatggtgacacacccctgtagtcccagctactcgggagactgaagcaggaggatcactggagcatcgctggagcccaggaatttgaggctgcagtgagctatgactgtaccactgcaactccagcccgggtgacagggcaagactctgtctccggaa

SEQ ID NO: 26698 - DNA, 374 bp, Homo sapiens
ggtgttgttttaaagttgaagtgttgtatgttttagcagttttcccatgtactacctttaagaatttatgtaaacaaatacattcccattactgtctaatatatgctatgttacttttttcacagtatgtttttgaggaatatgattcgtaatacataaggaatttgtgctgtaacatagatcgtgatgttggtgttatgttgaatttatttttcatgctcttgatagacttttaaaaatcagtggtgccggctgggcatggtggctcacgcctgtaatcacagcactttgggaggccgaggtaggaggatcacctgaggtcaagggagtttgagaccagcctggccagcgtagtaaaaccctgtctcttctaa

SEQ ID NO: 26699 - DNA, 383 bp, Homo sapiens
ccaagccccaggtctgccaatcaatttattgtacctctaacatcatctaacctccacctctgtgactggttcacaggtgggcatatcaatcacagtggtccaatgagccttgagccagaacttctgctgggattactggaaaaaaagctcatttattgccagagttcctgcaagcttggagctgctagaggccatctttgcaacctcgtggggagatctttcgggaaaatgaaaccatcacaaaggcaagcagagtctagagactgaaacagatttctgtcaacatcctatgggcccttgctcccagccatgcctgaagttggctgtacctccgggacctagacattttagttactcaaaataataaattctcttgtgtccga

SEQ ID NO: 26700 - DNA, 464 bp, Homo sapiens
gaaattaaatagatcaaagaatgagccaggccggatactcattatatctatgggtaacaagaagtattagcaattgcacagatttctccctattcatttagtcggtagcaattctatcatatagcattccaggaatgggttaaattaaaacagacagtactaactctataaaagagatcactagtacaatttgaacaaacagttgcattagggatattagggatgttgctgaagttacccactaggtggactaaaggatctcaggttttttaaagattcagatttgacataacagattcaacatgctgtcagattactcacaaaaactaaggattgtgaaactttaaccatagccttattctgccaagcgaaagaagtaggcataagcaaggaaaaattaagaggggtaagaatatcataagaagtcttcgtctgatggccttgggaaaagctgtccacggcat

SEQ ID NO: 26701 - DNA, 369 bp, Homo sapiens
ctcgccattttacagatggggaagccgaggcacagacaggttaggggacgttctccggctcacacagctcctggcttgtcagacccaacatcagatgactcgggcgggcccagaaccctcacttggaaaccccacttccaggtcctgtccccacctcacagcggacatcacagcggtgacagcaccgtcattacagggcacgctggaaaatcagattcctgactcggagagcaggacggacattaaagctctgaggaagacaccagcagatgaggaaaggcggtaaagctgaatccacagaaggattttacttcgtccaaagaaatctactggtggggatgctggcaggcctcggatttctccatcaaa

SEQ ID NO: 26702 - DNA, 655 bp, Homo sapiens
tattcaccgtctatgcggtcccaagttttcccaaagcgaggcagtgccccaaaggtctgtgctgaggagaatgctgctctgccttagcggtgtcccccgggtctgtgctgagcagaacgcagctccgcccttgcggtgcccccggcccgcctgggtctgtgctgaggagaacactgctccgccttcgctgtatctctgaagtctgtgcagaggagaactcagctccgccctggcgatgctctccttgtctgtgctgggaagaacacagctccgccctcgcaaaggcgcacagcgccggcgcaggagcagagaggcccacagcgctggcgaaaggcgcagagaggcccacagcgccggcgcaggcgcagagaggcccacagcgctggcgcaggcgcagagaggcagaaggcccatgaggggaaggtgagacacctggggcaaagaagaaaaaaaaatgcgccgcgaagcggtgtctgggtcatccagggacgaaagttttttcccatcagcccttgcgctgggccccagggacccgggcatccctggttcacgcccagggtgtgcctcaggcgactaggggtaccccaacttggacagaaggcccgtgagtggaagttgaagtttgtgggaggagagatgaggcaccaggggcaga

SEQ ID NO: 26703 - DNA, 291 bp, Homo sapiens
ccagctgacagccaccacctgccagacataaaagatggaaattcatttctgctaaagagaaagaaaaaattggaagacagggtgaaggtgaacaggcccattataagaaagaaacaaaaatctatattctgtctacaaggaaacgagagagagaaagagagagaagaaagaagttccaggattctaatgtaccaaagggatctcctttttcttgttttgttctgaaaatttcaccaaaagagcacaggagaacatcttggctaattcattggcgatgatgtaagaaaactg

SEQ ID NO: 26704 - DNA, 496 bp, Homo sapiens
caacagagcgagactccatctcacaaaaaaaaaaaaagaaagaaagaaaatggtgcagtttggactaacagatacagcgacatcaaaatgtttcctgggtctgttaagtcctgggtttgtttagtgaacgttattaatctgttcctgtaaccctaaacatcttgtgactactaagaatgcagccaacaggtctctgcctgattttacctactgcctcttcaagatggaattgctctggttccaatgcctctgacaaactggctgcttgatctctaggttgtgaccatgtcagggatagaggcagcttaggtagaggtagactttcttgtactcaacattgaattgtggcttagttaaaatcagaactttcattcttggaataatacagtattgtaagggtaagccaaatgattaacacatttacttaattacacattgtagcattgaaataactgatgcctttctaatgcaaataaaaaagatttatgtatatgat

SEQ ID NO: 26705 - DNA, 360 bp, Homo sapiens
tgagacagagcatcttgctctgtcgcccaggctgaagtgcagtggtccaaccttggctcactgcagcctctgcctcccgggttctagtgattcccctgcctcagcctcctgagtagctgggattacaagcacacgccaccacgcctggctaatttttgtatttttagtagagacaaggtttcaccatgttggtcaggctggtctcaaactcatgacctcaggtgatccaccacctcagcctcccaaagtgctgggattgcaggcgtgggccaccgcgcccagccttgtcataatttttaatgactgaatgatatttgatcatgtggatgtactatttttaacaatcttttatggctagat

SEQ ID NO: 26706 - DNA, 699 bp, Homo sapiens
ataatgcctgttctccaggcatccaaagagtcaaagagccaagagacagtaagtttaatacttgtatttgctccagctactagagcacacagagagtagctcttcagttaggagagagaagtcagggaaggcctccacagagggttattttagctgagctttatagaaaaacatggggaaaggacttgaaaaagtatgtaggtgacttttagtatcagctccaacatgtaaagagcttggaagtcatcacatccctcctcacagcaaaaacaaacaaaaaactgtacagattggaatatcaatggcttttcttagatccatggaagaattaaagtcataggacaaaccaccactcaaaaccctggagagacaggcaaatacagagaatcacaattgggatcagcttactgggagaagaggctgctggtcagtgactgctaggaacactaaaatgaactccaggtttgccagccttcggactccggaacttacaccagtggccccctggatcctgaggcttttggcctcagatggatagttgcaccatcagctttcctggttctgaggcctttggagttggactgaaccatgctaccggtatcccaaggtctccagctttcggatggcctcaccgtgggtcttttcagccaccataattgcatgagccaagttccctaataaatttcctctcatatccta

SEQ ID NO: 26707 - DNA, 546 bp, Homo sapiens
ataatgcctgttctccaggcatccaaagagtcaaagagccaagagacagtaagtttaatacttgtatttgctccagctactagagcacacagagagtagctcttcagttaggagagagaagtcagggaaggcctccacagagggttattttagctgagctttatagaaaaacatggggaaaggacttgaaaaagtatgtaggtgacttttagtatcagctccaacatgtaaagagcttggaagtcatcacatccctcctcacagcaaaaacaaacaaaaaactgtacagattggaatatcaatggcttttcttagatccatggaagaattaaagtcataggacaaaccaccactcaaaaccctggagagacaggcaaatacagagaatcacaattgggatcagcttactgggagaagaggctgctggtcagtgactgctaggaacactaaaatggtaattatttagatattttcttaaatggtaaaaataaatatatataaaaaagtaaaatggtaacgttaccattcggatgttgggagcggccg

SEQ ID NO: 26708 - DNA, 1225 bp, Homo sapiens
aatcaaacttgggtttgtctaactccagagtccttcctagtaattaacctccggtgctctgaactgccatgcaaaagaatgtgaacttcattctgaagggaatgggaaggtcgtggaaaatttttaagcatgaaagtgacaggctcaaaacagcaacaccaaccaaccaaccaaccaacaaaaaaccctcagtttttaaaagatagctcttggccgggcgcggtggctcacgcctgtaatcccaacgctttgggaggccgaggcgggcggattcacaaaatacaaaaaatacaaaactacaaaaaattaggccggacgtggttggtggggcgcctatagtcccagctattccggaggctgaggcaggagaatcgcatggacccggtaggccaaggttgcagtgagccgagctcgtgccactgcactccagcctgggcgacagagcgagactccgtctcataaaaaaaaaaaaaaaaaaaaagatagctgtcatacggagtggaagctcaatggcagggcagaaagaccagcctgactatgtaatctactagaccagagctggcgaggacttcagttaaggcatggtcatgggtggacggagaaaaggtgatacaattgaaagtcagaagacagatttagtaatatttggaactcatgagatttggacagaggacaagaggaagggacacccaaccagaacagatggggctaatgaaggtgtcttccaggaagatggggaatgtggaaagaaacaaatgggcttggaaagcaagatgaggcatgtggttttggaaataagctgggtttgaagtgcctagtatccatccagaaggacctgtctaccaggcagttagaaacattggtgtagccaggcacagtggctcacgtctataatcccagcactttgggaggccaaggtgggaggagggcttgagcccaggacttcaagaccagcctgggcgatgaagtgagaccctgactctacaaaaaataaaaaaaattagctgggcctggtggtgtgtgcccgtagtcccagctactcagatggctgaggtgggaggacccctgaacccaggagtccaaggttgcagtgagctttgattgtgctactgcactccagcctggacgagtgagaccctgtttctctttctctctctatctccctctctctctctctctctctctcacacacacacacacacacacacacacacacacacaaaat

SEQ ID NO: 26709 - DNA, 403 bp, Homo sapiens
tatttgactttaacacccctggtgaaaggtttcatcttctacttctacttaagacttttcattttctctttgttctggcacctagaaacttccctaatgtgttttgcactggactatgtattaaaacagttttctttttaaattttgattttttagttgtacttcagagcacattttaatgttttgaccagagaagtatattgtttctagtaatgaaacactgcaagtaattaaaatgtttaacaatagttaactgctgaaataaattataacgtagttgtagggtgaaataatatgtaattattataaaaatgtagttgaaatataataaagtagatagtatatgcttgtgacatattaggttagaaagcatgatacaaaattatagaatgttaattatgta

SEQ ID NO: 26710 - DNA, 490 bp, Homo sapiens
ccacagtttcctgcggctgtctgcacacccagaccagagcagttcctgcctttgcgctttgcaccattttccttggtgaacttctattcatccttcaaagcccagcagtaatcatcctttagaaagtcttctttcagagggaaccaaaaaggtaatcgctggagacagacagatgctgcctgaatgcctgttgtgttgtgtggttgtgggaatgttacttcacctctccgtgcctcagtttcctcagctgtaatggggatggtaacagtgtctaggggtactgcttggaatgcacatagggagatgagtgaaggcccagcactagaagagtgcaggcactagcagagtgcaggcgcaattgctgctgggaccagcaggtaactcgcatccaagttacagtgcccagccccagcagcagcctcagcaccaggcagagtgtgctcagcactgtggggggccaagaggacttgagggccgctggtctgtgatt

SEQ ID NO: 26711 - DNA, 437 bp, Homo sapiens
ccacagtttcctgcggctgtctgcacacccagaccagagcagttcctgcctttgcgctttgcaccattttccttggtgaacttctattcatccttcaaagcccagcagtaatcatcctttagaaagtcttctttcagagggaaccaaaaagaatggggagaattgtgcctgcccagcctcctccttggggactccaggggcccaaagaaccaagagctgcaaatgtcctggtggccttggaagtttatggatggtacagatctggggtggagggcatggccaggacagggagggctgtcagagagagggtctgtgggtttgtggagtgtggggatcagtcgctgactcattagatgaaccaggagcctgcatgctacagcccacctgccaaatcttgcccccacctgctttttaaaataaagttttattggaacatg

SEQ ID NO: 26712 - DNA, 500 bp, Homo sapiens
cgagacaccgtatctgagggcttgggtggaactgaggagagggcggctgggaaggccatccgggaggaaagggcagacggctacggcagcgtcaggtggtacagtttgccccggaagtgaggtaaagaagagagcgggaggagagagggccacatgcctctcagccatggccctgaatgctggcttggctgagcctcatctttgctgtttgcagaatggggagaattgtgcctgcccagcctcctccttggggactccaggggcccaaagaaccaagagctgcaaatgtcctggtggccttggaagtttatggatggtacagatctggggtggagggcatggccaggacagggagggctgtcagagagagggtctgtgggtttgtggagtgtggggatcagtcgctgactcattagatgaaccaggagcctgcatgctacagcccacctgccaaatcttgcccccacctgctttttaaaataaagttttattggaacatg

SEQ ID NO: 26713 - DNA, 399 bp, Homo sapiens
caggcactgaagtcagaactgcatgagtttaaaacagccagctctattgttttccagccatatgaccttggccatgtcccttaatctctgtgggcctcagttgctacacctgtgaagtagaagcaatgatcatgccatcttagtggattcctatgaaaattaaatgagatactccatataacgcatttagaatagtgtcatgatatggtatatgaaggctctcaacaaatgttagttaccatttttcaaagtagagatacaatgttaaattaaacaacatggggccaggtgcaatggttcacacttgtaatcccagcactttgggaggcccaggtgggaggatcacttgagcaacggagttcgagaccagcctgggaaacacagcaattccctgtctcc

SEQ ID NO: 26714 - DNA, 3067 bp, Homo sapiens
agagaaaagaggagaggagaggaggaacagaaaagaaaagaaaagaaaaagtgggaaacaaataatctaagaatgaggagaaagcaagaagagtgacccccttgtgggcactccattggttttatggcgcctctactttctggagtttgtgtaaaacaaaaatattatggtctttgtgcacatttacatcaagctcagcctgggcggcacagccagatgcgagatgcgtctctgctgatctgagtctgcctgcagcatggacctgggtcttccctgaagcatctccagggctggagggacgactgccatgcaccgagggctcatccatccacagagcagggcagtgggaggagacgccatgacccccatcctcacggtcctgatctgtctcgggctgagtctgggccccaggacccacgtgcaggcagggcacctccccaagcccaccctctgggctgaaccaggctctgtgatcacccaggggagtcctgtgaccctcaggtgtcaggggggccaggagacccaggagtaccgtctatatagagaaaagaaaacagcactctggattacacggatcccacaggagcttgtgaagaagggccagttccccatcccatccatcacctgggaacatgcagggcggtatcgctgttactatggtagcgacactgcaggccgctcagagagcagtgaccccctggagctggtggtgacaggagcctacatcaaacccaccctctcagcccagcccagccccgtggtgaactcaggagggaatgtaaccctccagtgtgactcacaggtggcatttgatggcttcagtctgtgtaaggaaggagaagatgaacacccacaatgcctgaactcccagccccatgcccgtgggtcgtcccgcgccatcttctccgtgggccccgtgagcccgagtcgcaggtggtggtacaggtgctatgcttatgactcgaactctccctatgagtggtctctacccagtgatctcctggagctcctggtcctaggtgtttctaagaagccatcactctcagtgcagccaggtcctatcgtggcccctgaggagaccctgactctgcagtgtggctctgatgctggctacaacagatttgttctgtataaggacggggaacgtgacttccttcagctcgctggcgcacagccccaggctgggctctcccaggccaacttcaccctgggccctgtgagccgctcctacgggggccagtacagatgctacggtgcacacaacctctcctccgagtggtcggcccccagcgaccccctggacatcctgatcgcaggacagttctatgacagagtctccctctcggtgcagccgggccccacggtggcctcaggagagaacgtgaccctgctgtgtcagtcacagggatggatgcaaactttccttctgaccaaggagggggcagctgatgacccatggcgtctaagatcaacgtaccaatctcaaaaataccaggctgaattccccatgggtcctgtgacctcagcccatgcggggacctacaggtgctacggctcacagagctccaaaccctacctgctgactcaccccagtgaccccctggagctcgtggtctcaggaccgtctgggggccccagctccccgacaacaggccccacctccacatctggccctgaggaccagcccctcacccccaccgggtcggatccccagagtggtctgggaaggcacctgggggttgtgatcggcatcttggtggccgtcatcctactgctcctcctcctcctcctcctcttcctcatcctccgacatcgacgtcagggcaaacactggacatcgacccagagaaaggctgatttccaacatcctgcaggggctgtggggccagagcccacagacagaggcctgcagtggaggtccagcccagctgccgatgcccaggaagaaaacctctatgctgccgtgaagcacacacagcctgaggatggggtggagatggacactcggagcccacacgatgaagacccccaggcagtgacgtatgccgaggtgaaacactccagacctaggagagaaatggcctctcctccttccccactgtctggggaattcctggacacaaaggacagacaggcggaagaggacaggcagatggacactgaggctgctgcatctgaagccccccaggatgtgacctacgcccagctgcacagcttgacccttagacggaaggcaactgagcctcctccatcccaggaagggccctctccagctgtgcccagcatctacgccactctggccatccactagcccagggggggacgcagaccccacactccatggagtctggaatgcatgggagctgcccccccagtggacaccattggaccccacccagcctggatctaccccaggagactctgggaacttttaggggtcactcaattctgcagtataaataactaatgtctctacaattttgaaataaagcaacagacttctcaataatcaatgaagtagctgagaaaactaagtcagaaagtgcattaaactgaatcacaatgtaaatattacacatcaagcgatgaaactggaaaactacaagccactgcgcccggccacattcagttcttatcaaagaaataacccagacttaatcttgaatgatacgattatgcccaatattaagtaaaaaatataagaaaaggttatcttaaatagatcttaggcaaaataccagctgatgaaggcatctgatgccttcatctgttcagtcatctccaaaaacagtaaaaataaccactttttgttgggcaatatgaaatttttaaaggagtagaataccaaatgatagaaacagactgcctgaattgagaattttgattttttaaagtgtgtttctttctaaattgctgttccttaatttgattaatttaattcatgtattatgattaaatctgaggcagatgagcttacaagtattgaaataattactaattaatcacaaatgtgaagttatgcatgatgtaaaaaatacaaacattctaattaaaggctttgcaacac

SEQ ID NO: 26715 - DNA, 2886 bp, Homo sapiens
agagaaaagaggagaggagaggaggaacagaaaagaaaagaaaagaaaaagtgggaaacaaataatctaagaatgaggagaaagcaagaagagtgacccccttgtgggcactccattggttttatggcgcctctactttctggagtttgtgtaaaacaaaaatattatggtctttgtgcacatttacatcaagctcagcctgggcggcacagccagatgcgagatgcgtctctgctgatctgagtctgcctgcagcatggacctgggtcttccctgaagcatctccagggctggagggacgactgccatgcaccgagggctcatccatccacagagcagggcagtgggaggagacgccatgacccccatcctcacggtcctgatctgtctcgggctgagtctgggccccaggacccacgtgcaggcagggcacctccccaagcccaccctctgggctgaaccaggctctgtgatcacccaggggagtcctgtgaccctcaggtgtcaggggggccaggagacccaggagtaccgtctatatagagaaaagaaaacagcactctggattacacggatcccacaggagcttgtgaagaagggccagttccccatcccatccatcacctgggaacatgcagggcggtatcgctgttactatggtagcgacactgcaggccgctcagagagcagtgaccccctggagctggtggtgacaggagcctacatcaaacccaccctctcagcccagcccagccccgtggtgaactcaggagggaatgtaaccctccagtgtgactcacaggtggcatttgatggcttcagtctgtgtaaggaaggagaagatgaacacccacaatgcctgaactcccagccccatgcccgtgggtcgtcccgcgccatcttctccgtgggccccgtgagcccgagtcgcaggtggtggtacaggtgctatgcttatgactcgaactctccctatgagtggtctctacccagtgatctcctggagctcctggtcctaggtgtttctaagaagccatcactctcagtgcagccaggtcctatcgtggcccctgaggagaccctgactctgcagtgtggctctgatgctggctacaacagatttgttctgtataaggacggggaacgtgacttccttcagctcgctggcgcacagccccaggctgggctctcccaggccaacttcaccctgggccctgtgagccgctcctacgggggccagtacagatgctacggtgcacacaacctctcctccgagtggtcggcccccagcgaccccctggacatcctgatcgcaggacagttctatgacagagtctccctctcggtgcagccgggccccacggtggcctcaggagagaacgtgaccctgctgtgtcagtcacagggatggatgcaaactttccttctgaccaaggagggggcagctgatgacccatggcgtctaagatcaacgtaccaatctcaaaaataccaggctgaattccccatgggtcctgtgacctcagcccatgcggggacctacaggtgctacggctcacagagctccaaaccctacctgctgactcaccccagtgaccccctggagctcgtggtctcaggaccgtctgggggccccagctccccgacaacaggccccacctccacatctggccctgaggaccagcccctcacccccaccgggtcggatccccagagtggtctgggaaggcacctgggggttgtgatcggcatcttggtggccgtcatcctactgctcctcctcctcctcctcctcttcctcatcctccgacatcgacgtcagggcaaacactggacatcgagtccagcccagctgccgatgcccaggaagaaaacctctatgctgccgtgaagcacacacagcctgaggatggggtggagatggacactcggagcccacacgatgaagacccccaggcagtgacgtatgccgaggtgaaacactccagacctaggagagaaatggcctctcctccttccccactgtctggggaattcctggacacaaaggacagacaggcggaagaggacaggcagatggacactgaggctgctgcatctgaagccccccaggatgtgacctacgcccagctgcacagcttgacccttagacggaaggcaactgagcctcctccatcccaggaagggccctctccagctgtgcccagcatctacgccactctggccatccactagcccagggggggacgcagaccccacactccatggagtctggaatgcatgggagctgcccccccagtggacaccattggaccccacccagcctggatctaccccaggagactctgggaacttttaggggtcactcaattctgcagtataaataactaatgtctctacaattttgaaataaagcaacagacttctcaataatcaatgaagtagctgagaaaactaagtcagaaagtgcattaaactgaatcacaatgtaaatattacacatcaagcgatgaaactggaaaactacaagccacgaatgaatgaattaggaaagaaaaaaagtaggaaatgaatgatcttggctttcctataagaaatttagggcagggcacggtggctcacgcctgtaattccagcactttgggaggccgaggcgggcagatcacgagttcaggagatcgagaccatcttggccaacatggtgaaaccctgtctctcctaaaaatacaaaaattagctggatgtggtggcagtgcctgtaatcccagctatttgggaggctgaggcaggagaatcgcttgaaccagggagtcagaggtttcagtgagccaagatcgcaccactgctctccagcctggcgacagagggagactccatctcaaatta

SEQ ID NO: 26716 - DNA, 2111 bp, Homo sapiens
agagaaaagaggagaggagaggaggaacagaaaagaaaagaaaagaaaaagtgggaaacaaataatctaagaatgaggagaaagcaagaagagtgacccccttgtgggcactccattggttttatggcgcctctactttctggagtttgtgtaaaacaaaaatattatggtctttgtgcacatttacatcaagctcagcctgggcggcacagccagatgcgagatgcgtctctgctgatctgagtctgcctgcagcatggacctgggtcttccctgaagcatctccagggctggagggacgactgccatgcaccgagggctcatccatccacagagcagggcagtgggaggagacgccatgacccccatcctcacggtcctgatctgtctcgggctgagtctgggccccaggacccacgtgcaggcagggcacctccccaagcccaccctctgggctgaaccaggctctgtgatcacccaggggagtcctgtgaccctcaggtgtcaggggggccaggagacccaggagtaccgtctatatagagaaaagaaaacagcactctggattacacggatcccacaggagcttgtgaagaagggccagttccccatcccatccatcacctgggaacatgcagggcggtatcgctgttactatggtagcgacactgcaggccgctcagagagcagtgaccccctggagctggtggtgacaggagcctacatcaaacccaccctctcagcccagcccagccccgtggtgaactcaggagggaatgtaaccctccagtgtgactcacaggtggcatttgatggcttcagtctgtgtaaggaaggagaagatgaacacccacaatgcctgaactcccagccccatgcccgtgggtcgtcccgcgccatcttctccgtgggccccgtgagcccgagtcgcaggtggtggtacaggtgctatgcttatgactcgaactctccctatgagtggtctctacccagtgatctcctggagctcctggtcctaggtgtttctaagaagccatcactctcagtgcagccaggtcctatcgtggcccctgaggagaccctgactctgcagtgtggctctgatgctggctacaacagatttgttctgtataaggacggggaacgtgacttccttcagctcgctggcgcacagccccaggctgggctctcccaggccaacttcaccctgggccctgtgagccgctcctacgggggccagtacagatgctacggtgcacacaacctctcctccgagtggtcggcccccagcgaccccctggacatcctgatcgcaggacagttctatgacagagtctccctctcggtgcagccgggccccacggtggcctcaggagagaacgtgaccctgctgtgtcagtcacagggaagggccctctccagctgtgcccagcatctacgccactctggccatccactagcccagggggggacgcagaccccacactccatggagtctggaatgcatgggagctgcccccccagtggacaccattggaccccacccagcctggatctaccccaggagactctgggaacttttaggggtcactcaattctgcagtataaataactaatgtctctacaattttgaaataaagcaacagacttctcaataatcaatgaagtagctgagaaaactaagtcagaaagtgcattaaactgaatcacaatgtaaatattacacatcaagcgatgaaactggaaaactacaagccacgaatgaatgaattaggaaagaaaaaaagtaggaaatgaatgatcttggctttcctataagaaatttagggcagggcacggtggctcacgcctgtaattccagcactttgggaggccgaggcgggcagatcacgagttcaggagatcgagaccatcttggccaacatggtgaaaccctgtctctcctaaaaatacaaaaattagctggatgtggtggcagtgcctgtaatcccagctatttgggaggctgaggcaggagaatcgcttgaaccagggagtcagaggtttcagtgagccaagatcgcaccactgctctccagcctggcgacagagggagactccatctcaaatta

SEQ ID NO: 26717 - DNA, 1880 bp, Homo sapiens
agagaaaagaggagaggagaggaggaacagaaaagaaaagaaaagaaaaagtgggaaacaaataatctaagaatgaggagaaagcaagaagagtgacccccttgtgggcactccattggttttatggcgcctctactttctggagtttgtgtaaaacaaaaatattatggtctttgtgcacatttacatcaagctcagcctgggcggcacagccagatgcgagatgcgtctctgctgatctgagtctgcctgcagcatggacctgggtcttccctgaagcatctccagggctggagggacgactgccatgcaccgagggctcatccatccacagagcagggcagtgggaggagacgccatgacccccatcctcacggtcctgatctgtctcgggctgagtctgggccccaggacccacgtgcaggcagggcacctccccaagcccaccctctgggctgaaccaggctctgtgatcacccaggggagtcctgtgaccctcaggtgtcaggggggccaggagacccaggagtaccgtctatatagagaaaagaaaacagcactctggattacacggatcccacaggagcttgtgaagaagggccagttccccatcccatccatcacctgggaacatgcagggcggtatcgctgttactatggtagcgacactgcaggccgctcagagagcagtgaccccctggagctggtggtgacaggagcctacatcaaacccaccctctcagcccagcccagccccgtggtgaactcaggagggaatgtaaccctccagtgtgactcacaggtggcatttgatggcttcagtctgtgtaaggaaggagaagatgaacacccacaatgcctgaactcccagccccatgcccgtgggtcgtcccgcgccatcttctccgtgggccccgtgagcccgagtcgcaggtggtggtacaggtgctatgcttatgactcgaactctccctatgagtggtctctacccagtgatctcctggagctcctggtcctaggtgtttctaagaagccatcactctcagtgcagccaggtcctatcgtggcccctgaggagaccctgactctgcagtgtggctctgatgctggctacaacagatttgttctgtataaggacggggaacgtgacttccttcagctcgctggcgcacagccccaggctgggctctcccaggccaacttcaccctgggccctgtgagccgctcctacgggggccagtacagatgctacggtgcacacaacctctcctccgagtggtcggcccccagcgaccccctggacatcctgatcgcaggacagttctatgacagagtctccctctcggtgcagccgggccccacggtggcctcaggagagaacgtgaccctgctgtgtcagtcacagggatggatgcaaactttccttctgaccaaggagggggcagctgatgacccatggcgtctaagatcaacgtaccaatctcaaaaataccaggctgaattccccatgggtcctgtgacctcagcccatgcggggacctacaggtgctacggctcacagagctccaaaccctacctgctgactcaccccagtgaccccctggagctcgtggtctcaggaccgtctgggggccccagctccccgacaacaggccccacctccacatctggccctgaggaccagcccctcacccccaccgggtcggatccccagagtggtgagtgacgggctctgagtgggaggtgggcagggtccaggggaggcaggggtgggttctgtcctaggttcagtctcctctggaggtggtgatatagacaggctcctcccctgcttgggcctcagtttctccaaatgtaaaggtgagaggcctgcgggtggg

SEQ ID NO: 26718 - DNA, 257 bp, Homo sapiens
aaagggatgtaatcggatcacccggggaacagtgaggaaaattgactccagggggtcaggaggattcaaggacaccccccaccactgtctctctccagcagagcccacacgatgaagacccccaggcagtgacgtatgccgaggtgaaacactccagacctaggagagaaatggcctctcctccttccccactgtctggggaattcctggacacaaaggacagacaggcggaagaggacaggcagatggacactgag

SEQ ID NO: 26719 - DNA, 2962 bp, Homo sapiens
agagaaaagaggagaggagaggaggaacagaaaagaaaagaaaagaaaaagtgggaaacaaataatctaagaatgaggagaaagcaagaagagtgacccccttgtgggcactccattggttttatggcgcctctactttctggagtttgtgtaaaacaaaaatattatggtctttgtgcacatttacatcaagctcagcctgggcggcacagccagatgcgagatgcgtctctgctgatctgagtctgcctgcagcatggacctgggtcttccctgaagcatctccagggctggagggacgactgccatgcaccgagggctcatccatccacagagcagggcagtgggaggagacgccatgacccccatcctcacggtcctgatctgtctcgggctgagtctgggccccaggacccacgtgcaggcagggcacctccccaagcccaccctctgggctgaaccaggctctgtgatcacccaggggagtcctgtgaccctcaggtgtcaggggggccaggagacccaggagtaccgtctatatagagaaaagaaaacagcactctggattacacggatcccacaggagcttgtgaagaagggccagttccccatcccatccatcacctgggaacatgcagggcggtatcgctgttactatggtagcgacactgcaggccgctcagagagcagtgaccccctggagctggtggtgacaggagcctacatcaaacccaccctctcagcccagcccagccccgtggtgaactcaggagggaatgtaaccctccagtgtgactcacaggtggcatttgatggcttcagtctgtgtaaggaaggagaagatgaacacccacaatgcctgaactcccagccccatgcccgtgggtcgtcccgcgccatcttctccgtgggccccgtgagcccgagtcgcaggtggtggtacaggtgctatgcttatgactcgaactctccctatgagtggtctctacccagtgatctcctggagctcctggtcctaggtgtttctaagaagccatcactctcagtgcagccaggtcctatcgtggcccctgaggagaccctgactctgcagtgtggctctgatgctggctacaacagatttgttctgtataaggacggggaacgtgacttccttcagctcgctggcgcacagccccaggctgggctctcccaggccaacttcaccctgggccctgtgagccgctcctacgggggccagtacagatgctacggtgcacacaacctctcctccgagtggtcggcccccagcgaccccctggacatcctgatcgcaggacagttctatgacagagtctccctctcggtgcagccgggccccacggtggcctcaggagagaacgtgaccctgctgtgtcagtcacagggatggatgcaaactttccttctgaccaaggagggggcagctgatgacccatggcgtctaagatcaacgtaccaatctcaaaaataccaggctgaattccccatgggtcctgtgacctcagcccatgcggggacctacaggtgctacggctcacagagctccaaaccctacctgctgactcaccccagtgaccccctggagctcgtggtctcaggaccgtctgggggccccagctccccgacaacaggccccacctccacatctggccctgaggaccagcccctcacccccaccgggtcggatccccagagtggtctgggaaggcacctgggggttgtgatcggcatcttggtggccgtcatcctactgctcctcctcctcctcctcctcttcctcatcctccgacatcgacgtcagggcaaacactggacatcgacccagagaaaggctgatttccaacatcctgcaggggctgtggggccagagcccacagacagaggcctgcagtggaggtccagcccagctgccgatgcccaggaagaaaacctctatgctgccgtgaagcacacacagcctgaggatggggtggagatggacactcggagcccacacgatgaagacccccaggcagtgacgtatgccgaggtgaaacactccagacctaggagagaaatggcctctcctccttccccactgtctggggaattcctggacacaaaggacagacaggcggaagaggacaggcagatggacactgaggctgctgcatctgaagccccccaggatgtgacctacgcccagctgcacagcttgacccttagacggaaggcaactgagcctcctccatcccaggaagggccctctccagctgtgcccagcatctacgccactctggccatccactagcccagggggggacgcagaccccacactccatggagtctggaatgcatgggagctgcccccccagtggacaccattggaccccacccagcctggatctaccccaggagactctgggaacttttaggggtcactcaattctgcagtataaataactaatgtctctacaattttgaaataaagcaacagacttctcaataatcaatgaagtagctgagaaaactaagtcagaaagtgcattaaactgaatcacaatgtaaatattacacatcaagcgatgaaactggaaaactacaagccacgaatgaatgaattaggaaagaaaaaaagtaggaaatgaatgatcttggctttcctataagaaatttagggcagggcacggtggctcacgcctgtaattccagcactttgggaggccgaggcgggcagatcacgagttcaggagatcgagaccatcttggccaacatggtgaaaccctgtctctcctaaaaatacaaaaattagctggatgtggtggcagtgcctgtaatcccagctatttgggaggctgaggcaggagaatcgcttgaaccagggagtcagaggtttcagtgagccaagatcgcaccactgctctccagcctggcgacagagggagactccatctcaaatta

SEQ ID NO: 26720 - DNA, 2911 bp, Homo sapiens
agagaaaagaggagaggagaggaggaacagaaaagaaaagaaaagaaaaagtgggaaacaaataatctaagaatgaggagaaagcaagaagagtgacccccttgtgggcactccattggttttatggcgcctctactttctggagtttgtgtaaaacaaaaatattatggtctttgtgcacatttacatcaagctcagcctgggcggcacagccagatgcgagatgcgtctctgctgatctgagtctgcctgcagcatggacctgggtcttccctgaagcatctccagggctggagggacgactgccatgcaccgagggctcatccatccacagagcagggcagtgggaggagacgccatgacccccatcctcacggtcctgatctgtctcgggctgagtctgggccccaggacccacgtgcaggcagggcacctccccaagcccaccctctgggctgaaccaggctctgtgatcacccaggggagtcctgtgaccctcaggtgtcaggggggccaggagacccaggagtaccgtctatatagagaaaagaaaacagcactctggattacacggatcccacaggagcttgtgaagaagggccagttccccatcccatccatcacctgggaacatgcagggcggtatcgctgttactatggtagcgacactgcaggccgctcagagagcagtgaccccctggagctggtggtgacaggagcctacatcaaacccaccctctcagcccagcccagccccgtggtgaactcaggagggaatgtaaccctccagtgtgactcacaggtggcatttgatggcttcagtctgtgtaaggaaggagaagatgaacacccacaatgcctgaactcccagccccatgcccgtgggtcgtcccgcgccatcttctccgtgggccccgtgagcccgagtcgcaggtggtggtacaggtgctatgcttatgactcgaactctccctatgagtggtctctacccagtgatctcctggagctcctggtcctaggtgtttctaagaagccatcactctcagtgcagccaggtcctatcgtggcccctgaggagaccctgactctgcagtgtggctctgatgctggctacaacagatttgttctgtataaggacggggaacgtgacttccttcagctcgctggcgcacagccccaggctgggctctcccaggccaacttcaccctgggccctgtgagccgctcctacgggggccagtacagatgctacggtgcacacaacctctcctccgagtggtcggcccccagcgaccccctggacatcctgatcgcaggacagttctatgacagagtctccctctcggtgcagccgggccccacggtggcctcaggagagaacgtgaccctgctgtgtcagtcacagggatggatgcaaactttccttctgaccaaggagggggcagctgatgacccatggcgtctaagatcaacgtaccaatctcaaaaataccaggctgaattccccatgggtcctgtgacctcagcccatgcggggacctacaggtgctacggctcacagagctccaaaccctacctgctgactcaccccagtgaccccctggagctcgtggtctcaggccctgaggaccagcccctcacccccaccgggtcggatccccagagtggtctgggaaggcacctgggggttgtgatcggcatcttggtggccgtcatcctactgctcctcctcctcctcctcctcttcctcatcctccgacatcgacgtcagggcaaacactggacatcgacccagagaaaggctgatttccaacatcctgcaggggctgtggggccagagcccacagacagaggcctgcagtggaggtccagcccagctgccgatgcccaggaagaaaacctctatgctgccgtgaagcacacacagcctgaggatggggtggagatggacactcggagcccacacgatgaagacccccaggcagtgacgtatgccgaggtgaaacactccagacctaggagagaaatggcctctcctccttccccactgtctggggaattcctggacacaaaggacagacaggcggaagaggacaggcagatggacactgaggctgctgcatctgaagccccccaggatgtgacctacgcccagctgcacagcttgacccttagacggaaggcaactgagcctcctccatcccaggaagggccctctccagctgtgcccagcatctacgccactctggccatccactagcccagggggggacgcagaccccacactccatggagtctggaatgcatgggagctgcccccccagtggacaccattggaccccacccagcctggatctaccccaggagactctgggaacttttaggggtcactcaattctgcagtataaataactaatgtctctacaattttgaaataaagcaacagacttctcaataatcaatgaagtagctgagaaaactaagtcagaaagtgcattaaactgaatcacaatgtaaatattacacatcaagcgatgaaactggaaaactacaagccacgaatgaatgaattaggaaagaaaaaaagtaggaaatgaatgatcttggctttcctataagaaatttagggcagggcacggtggctcacgcctgtaattccagcactttgggaggccgaggcgggcagatcacgagttcaggagatcgagaccatcttggccaacatggtgaaaccctgtctctcctaaaaatacaaaaattagctggatgtggtggcagtgcctgtaatcccagctatttgggaggctgaggcaggagaatcgcttgaaccagggagtcagaggtttcagtgagccaagatcgcaccactgctctccagcctggcgacagagggagactccatctcaaatta

SEQ ID NO: 26721 - DNA, 411 bp, Homo sapiens
ggagacccaggagtaccgtctatatagagaaaagaaaacagcactctggattacacggatcccacaggagcttgtgaagaagggccagttccccatcccatccatcacctgggaacatgcagggcggtatcgctgttactatggtagcgacactgcaggccgctcagagagcagtgaccccctggagctggtggtgacaggtgagctgacactcaggggtcccagccccagactctgccctcaggaagggggacggctctcaggggcttctccctctcacagcccagccctggggatgacgcgggtggtctgagccacatttaacacggtgcctccttctctcctaggagcctacatcaaacccaccctctcagcccagcccagccccgtggtgaactcaggagggaatgt

SEQ ID NO: 26722 - DNA, 435 bp, Homo sapiens
ctaaagtttatgtgtctagtccttctaaaattctgtttcctgtggatctacgatagggacagctgttctctgcctgggactgtcttttccccataaccctctacttctactcagttttgaagacctagccccaagaaacctcccctggagacctctcctggttctccccagcagagccagcccctctctccccgcccctgtgctcccagagaccccacctagggcatttagcttgttctagaattattcatttgcatgcctttctctagactggactggacatcttgctcatcttcgtgcctctggtccagcccagagcttgacctgtagtgtgtagtgggcccgtgttgattaaatggactaagacaccgaccccctaaaaaggctggggtgctaaggagctgggcatggagcaggaaatgagctgtccctgaa

SEQ ID NO: 26723 - DNA, 382 bp, Homo sapiens
tgtcatgtgtttagggagcagccaaggtgaagttttcaaccaggccgaccaacttcagagtccactggcttcaaaacagtgctttacatcctccttccaacattattcacaagccgatcaagactgagagagtcacaagtgtgtgaaacctgtattctttctgacttcattttccctggtaagatggttacttgcccaccaatctggcttatgctacagtgaaacacaacttctttatggttaacgtttttgtctgtgctcattctttagctgtaatcaagagggtggcacatcttccaataggatatttatcctgtgtattttccaaaaactggccatgcagtcactaaacatggatcagagagaggttcatggaaattat

SEQ ID NO: 26724 - DNA, 620 bp, Homo sapiens
cttagtgcaagtaagagacgacctcaaaaaaaaaaaaagttggacaaatgaagagtgtattttctcatcactggtatttttctagaagaaattacagcagagattagaaatctaatacaaaatgtcgtaatcatcttatgttctcttctttgaggtagactaaaagagcatcattatatttgaagaaaccaagattgaatgttcattggcttggcagtttttaacacagtgcagtttggaacatgtcccagttcttgtggatcacatttatggaaactcttaaaggactttaatgcccctccctaatcctttttctactgtaaaacctcattaatatatcctcaatgtataatttattagtaataaggatttgggtcattcgagatttaaaactttgagataagttggatattcggaataatgtaatgatttgtaatataggtcttaaacatttaaatagcttaactcattgtttaagactagtcatcagctatatttgagtacatattccccacagtaaaactattttcaataatattactatgcatctttgtaagtgccttataatttgggcttttaaaaattgcctgcgctttcttcccttaatttagcccatttac

SEQ ID NO: 26725 - DNA, 475 bp, Homo sapiens
aaaatgtgttttaggattattgaaacaactttaaatacctggccatttttttttttataatttctcagccactattacttattttccaatgccctattattgttctactctttattgatataaataaaaacagattatctgttaaagttgtcatttaaaatataagtagctttaaaaatgttttaattcctgttaacatcttttcttgcaacaaatgtttactaagtaatgactatatgccaattattgttctaagtactggggatatagtggtgaacaacacaggcaaaactccctgcccttctagagctttaattctttttttttttttttaagaatgaatcatccattttattttattttgtcatgtgctcaacagcatctctctctctctcccctctccctggcaggtcacagagataaattaaaaataaaatctacaaggaaaataatttatgaaagcactcccaggttc

SEQ ID NO: 26726 - DNA, 519 bp, Homo sapiens
taaagatgacaaaattttggttaggaaacgctgaacaaggatttgagttttaataatcctatgccaatgcaaattccattacactacagtgtcaatgattaaggctcaccttacatcttacatccacacagaagccatttccaactaccatgaactgcagagatgacttactttcccaagcatcctttcgcttttgactaaattactttcttaagacatcttccttactagactgagagccccttggatgtagcgggtataacttcttatccatgtttatgtattcccaatgcctagcattgtgaccacacattgtatgtgctcaaaaactgcttgctgaattgaaatgaactgagcctttagttatggagccatgaaataatttcctaacctcttaggtggtagaagcatttcttccatagaatctctgacacagttatccagattcaactagcatatttctaaaataggacacttactacttcacaaaacagcctattctacttatttaacagttat

SEQ ID NO: 26727 - DNA, 326 bp, Homo sapiens
acctcaacctttgtgatgatatgcaatattgcaacactggcgtaccttccttaccttttaggttaacacaaatccagttctagccagacttctgaacagtaacaactctggaaaaggtgcatttagagtttagagctgggaaagattgctggcaacagttccaattccctgccaagttctgtgcttgaggctgaaaagcaaggtgctattttatttattagacttcacagaaagacactggagatctcaagagaccaacagtccagtctgtaaagttgttatatccacaatcagatcagctaggtccataacggggacacatatgg

SEQ ID NO: 26728 - DNA, 754 bp, Homo sapiens
cttgtcatttctttgtggtgacaacattcaaaatcatctcttccagctattttgaatttgtgcattattttgataaatttgatagaatagaaattaatttaaaagggtacaattttaaaactgcaatgtgatgggatcaaatttaataatttggaaaattcgcttatgtagaagagtcatgcctctctaagaatgctcaatgaactggcataggtgggcacaagcaccatcagcatggaagggttcctcctgatgtcactggccactaaggcagttggtggggtgagggtggggatgagagccaggcatggcagcccttaggtggtcaccatttccctctcctggcagcctgtatttgcttgggagacctatctcttgggtatagatcctattgggctgctaaagaagagaggtgctaatccttttaggatgacttctgggaattcaccaggatgccctgcctctcctactctggacatggaaaaaaatgctgggtttaccaaaggtggatgagtcaggcccaggactagagccacggggcctctccctggacgtgccatagtcaggctgtctcggcagctaaaagaggctacacacatttattgtcatcagaagctgggacagatgagccttgggttacaagatctcctacctggagctctcccgggaggtgccaatcataggggatgggaggacaaacacatgcttggtggggctccagcgttaccgccgaggtgcatctccttggccacta

SEQ ID NO: 26729 - DNA, 549 bp, Homo sapiens
gtcattttattttttcattttatttttagcaagcacagaacaggtgggaaacacagcttagttggaatggaacaaaggcagatttgatacttttttaggagcttttacaatataatctattctttaatggatagcgttatgagagaaaataagattataatggaataaaaagtggtctaatgttcattattcaatttagtggatatgttacaagattatttctaaaatcttttgtagattaaactagatgcctttcttgattctgtgactggtattactctatcatgatttctgagacctttactaagaatgtttttctgaacatactaaagcatattatgtaaaagatagtgagctgtggtgcaagatcctatgcagcatggcccctggtattatgactacctctccaccgatttatacatagaatttacgtggtatacacaggttggcaaatactgtaattattataaaatgatttttcaaaatctgtatttgtatctaacaaaatactaaaaaagaactgtgtcaaaataaaatgttagaatttca

SEQ ID NO: 26730 - DNA, 343 bp, Homo sapiens
aaacctcaacaagcatagcatgatgtatcactggatttcttaaaccatttttgattgtcgtttgacataatactatttattaatctttagaaagtgttcaatgtggtttgaagtaatgtcttggcaacaagtggagagagattatcccagagagaagcattgtggagaaggtaaatacccaggtcctgagaatcaggctgctctccaccgtttccctattgatcatcacctgttctctttggcagtttgcctttggatcattttacagctcttttactttttttctccctgttcagattccttgttagctagcaacactaggctgagttttgaaatgagataa

SEQ ID NO: 26731 - DNA, 193 bp, Homo sapiens
ttttttgtagagttggcatctctttatgttgcccaggctggtctagaactcctggcctcaagtgatccttccacctcagcctcccaaagcactaggattaccagcatgagccactgtgcccagcttattcacaagtactgacgaagcacctgctgttccccagggctctccaaagcctggaggacacagcatg

SEQ ID NO: 26732 - DNA, 2728 bp, Homo sapiens
ggggacactggatcacctagtgtttcacaagcaggtaccttctgctgtaggagagagagaactaaagttctgaaagacctgttgcttttcaccaggaagttttactgggcatctcctgagcctaggcaatagctgtagggtgacttctggagccatccccgtttccccgccccccaaaagaagcggagatttaacggggacgtgcggccagagctggggaaatgggcccgcgagccaggccggcgcttctcctcctgatgcttttgcagaccgcggtcctgcaggggcgcttgctgcgttcacactctctgcactacctcttcatgggtgcctcagagcaggaccttggtctttccttgtttgaagctttgggctacgtggatgaccagctgttcgtgttctatgatcatgagagtcgccgtgtggagccccgaactccatgggtttccagtagaatttcaagccagatgtggctgcagctgagtcagagtctgaaagggtgggatcacatgttcactgttgacttctggactattatggaaaatcacaaccacagcaaggagtcccacaccctgcaggtcatcctgggctgtgaaatgcaagaagacaacagtaccgagggctactggaagtacgggtatgatgggcaggaccaccttgaattctgccctgacacactggattggagagcagcagaacccagggcctggcccaccaagctggagtgggaaaggcacaagattcgggccaggcagaacagggcctacctggagagggactgccctgcacagctgcagcagttgctggagctggggagaggtgttttggaccaacaagtgcctcctttggtgaaggtgacacatcatgtgacctcttcagtgaccactctacggtgtcgggccttgaactactacccccagaacatcaccatgaagtggctgaaggataagcagccaatggatgccaaggagttcgaacctaaagacgtattgcccaatggggatgggacctaccagggctggataaccttggctgtaccccctggggaagagcagagatatacgtgccaggtggagcacccaggcctggatcagcccctcattgtgatctgggagccctcaccgtctggcaccctagtcattggagtcatcagtggaattgctgtttttgtcgtcatcttgttcattggaattttgttcataatattaaggaagaggcagggttcaagaggagccatggggcactacgtcttagctgaacgtgagtgacacgcagcctgcagactcactgtgggaaggagacaaaactagagactcaaagagggagtgcatttatgagctcttcatgtttcaggagagagttgaacctaaacatagaaattgcctgacgaactccttgattttagccttctctgttcatttcctcaaaaagatttccccatttaggtttctgagttcctgcatgccggtgatccctagctgtgacctctcccctggaactgtctctcatgaacctcaagctgcatctagaggcttccttcatttcctccgtcacctcagagacatacacctatgtcatttcatttcctatttttggaagaggactccttaaatttgggggacttacatgattcattttaacatctgagaaaagctttgaaccctgggacgtggctagtcataaccttaccagatttttacacatgtatctatgcattttctggacccgttcaacttttcctttgaatcctctctctgtgttacccagtaactcatctgtcaccaagccttggggattcttccatctgattgtgatgtgagttgcacagctatgaaggctgtacactgcacgaatggaagaggcacctgtcccagaaaaagcatcatggctatctgtgggtagtatgatgggtgtttttagcaggtaggaggcaaatatcttgaaaggggttgtgaagaggtgttttttctaattggcatgaaggtgtcatacagatttgcaaagtttaatggtgccttcatttgggatgctactctagtattccagacctgaagaatcacaataattttctacctggtctctccttgttctgataatgaaaattatgataaggatgataaaagcacttacttcgtgtccgactcttctgagcacctacttacatgcattactgcatgcacttcttacaataattctatgagataggtactattatccccatttcttttttaaatgaagaaagtgaagtaggccgggcacggtggctcacgcctgtaatcccagcgtgctgagattgcaggtgtgagccaccctgcccagccgtcaaaagagtcttaatatatatatccagatggcatgtgtttactttatgttactacatgcacttggctgcataaatgtggtacaagcattctgtcttgaagggcaggtgcttcaggataccatatacagctcagaagtttcttctttaggcattaaattttagcaaagatatctcatctcttcttttaaaccattttctttttttgtggttagaaaagttatgtagaaaaaagtaaatgtgatttacgctcattgtagaaaagctataaaatgaatacaattaaagctgttatttaattagccagtgaaaaactattaacaacttgtctattacctgttagtattattgttgcattaaaaatgcatatactttaataaatgtacattgtattgtaaaaaaaaaaat

SEQ ID NO: 26733 - DNA, 859 bp, Homo sapiens
ggggacactggatcacctagtgtttcacaagcaggtaccttctgctgtaggagagagagaactaaagttctgaaagacctgttgcttttcaccaggaagttttactgggcatctcctgagcctaggcaatagctgtagggtgacttctggagccatccccgtttccccgccccccaaaagaagcggagatttaacggggacgtgcggccagagctggggaaatgggcccgcgagccaggccggcgcttctcctcctgatgcttttgcagaccgcggtcctgcaggggcgcttgctgcgttcacactctctgcactacctcttcatgggtgcctcagagcaggaccttggtctttccttgtttgaagctttgggctacgtggatgaccagctctcgtgatccgcctgcctcggcctctgctgagattgcaggtgtgagccaccctgcccagccgtcaaaagagtcttaatatatatatccagatggcatgtgtttactttatgttactacatgcacttggctgcataaatgtggtacaagcattctgtcttgaagggcaggtgcttcaggataccatatacagctcagaagtttcttctttaggcattaaattttagcaaagatatctcatctcttcttttaaaccattttctttttttgtggttagaaaagttatgtagaaaaaagtaaatgtgatttacgctcattgtagaaaagctataaaatgaatacaattaaagctgttatttaattagccagtgaaaaactattaacaacttgtctattacctgttagtattattgttgcattaaaaatgcatatactttaataaatgtacattgtattgtaaaaaaaaaaat

SEQ ID NO: 26734 - DNA, 909 bp, Homo sapiens
ggggacactggatcacctagtgtttcacaagcaggtaccttctgctgtaggagagagagaactaaagttctgaaagacctgttgcttttcaccaggaagttttactgggcatctcctgagcctaggcaatagctgtagggtgacttctggagccatccccgtttccccgccccccaaaagaagcggagatttaacggggacgtgcggccagagctggggaaatgggcccgcgagccaggccggcgcttctcctcctgatgcttttgcagaccgcggtcctgcaggggcgcttgctgcgttcacactctctgcactacctcttcatgggtgcctcagagcaggaccttggtctttccttgtttgaagctttgggctacgtggatgaccagctgttcgtgttctatgatcatgagagtcgccgtgtggagccccgaactccatgggtttccagtagaatttcaagccagatgtggctgcagctgagtcagagtcctgcccagccgtcaaaagagtcttaatatatatatccagatggcatgtgtttactttatgttactacatgcacttggctgcataaatgtggtacaagcattctgtcttgaagggcaggtgcttcaggataccatatacagctcagaagtttcttctttaggcattaaattttagcaaagatatctcatctcttcttttaaaccattttctttttttgtggttagaaaagttatgtagaaaaaagtaaatgtgatttacgctcattgtagaaaagctataaaatgaatacaattaaagctgttatttaattagccagtgaaaaactattaacaacttgtctattacctgttagtattattgttgcattaaaaatgcatatactttaataaatgtacattgtattgtaaaaaaaaaaat

SEQ ID NO: 26735 - DNA, 3035 bp, Homo sapiens
ggggacactggatcacctagtgtttcacaagcaggtaccttctgctgtaggagagagagaactaaagttctgaaagacctgttgcttttcaccaggaagttttactgggcatctcctgagcctaggcaatagctgtagggtgacttctggagccatccccgtttccccgccccccaaaagaagcggagatttaacggggacgtgcggccagagctggggaaatgggcccgcgagccaggccggcgcttctcctcctgatgcttttgcagaccgcggtcctgcaggggcgcttgctgcgttcacactctctgcactacctcttcatgggtgcctcagagcaggaccttggtctttccttgtttgaagctttgggctacgtggatgaccagctgttcgtgttctatgatcatgagagtcgccgtgtggagccccgaactccatgggtttccagtagaatttcaagccagatgtggctgcagctgagtcagagtctgaaagggtgggatcacatgttcactgttgacttctggactattatggaaaatcacaaccacagcaaggtgcctcctttggtgaaggtgacacatcatgtgacctcttcagtgaccactctacggtgtcgggccttgaactactacccccagaacatcaccatgaagtggctgaaggataagcagccaatggatgccaaggagttcgaacctaaagacgtattgcccaatggggatgggacctaccagggctggataaccttggctgtaccccctggggaagagcagagatatacgtgccaggtggagcacccaggcctggatcagcccctcattgtgatctgggagccctcaccgtctggcaccctagtcattggagtcatcagtggaattgctgtttttgtcgtcatcttgttcattggaattttgttcataatattaaggaagaggcagggttcaagaggagccatggggcactacgtcttagctgaacgtgagtgacacgcagcctgcagactcactgtgggaaggagacaaaactagagactcaaagagggagtgcatttatgagctcttcatgtttcaggagagagttgaacctaaacatagaaattgcctgacgaactccttgattttagccttctctgttcatttcctcaaaaagatttccccatttaggtttctgagttcctgcatgccggtgatccctagctgtgacctctcccctggaactgtctctcatgaacctcaagctgcatctagaggcttccttcatttcctccgtcacctcagagacatacacctatgtcatttcatttcctatttttggaagaggactccttaaatttgggggacttacatgattcattttaacatctgagaaaagctttgaaccctgggacgtggctagtcataaccttaccagatttttacacatgtatctatgcattttctggacccgttcaacttttcctttgaatcctctctctgtgttacccagtaactcatctgtcaccaagccttggggattcttccatctgattgtgatgtgagttgcacagctatgaaggctgtacactgcacgaatggaagaggcacctgtcccagaaaaagcatcatggctatctgtgggtagtatgatgggtgtttttagcaggtaggaggcaaatatcttgaaaggggttgtgaagaggtgttttttctaattggcatgaaggtgtcatacagatttgcaaagtttaatggtgccttcatttgggatgctactctagtattccagacctgaagaatcacaataattttctacctggtctctccttgttctgataatgaaaattatgataaggatgataaaagcacttacttcgtgtccgactcttctgagcacctacttacatgcattactgcatgcacttcttacaataattctatgagataggtactattatccccatttcttttttaaatgaagaaagtgaagtaggccgggcacggtggctcacgcctgtaatcccagcgctttgggaggccaaagcgggtggatcacgaggtcaggagatcgagaccatcctggctaacatggtgaaaccccatctctaataaaaatacaaaaaattagctgggcgtggtggcagacgcctgtagtcccagctactcggaaggctgaggcaggagaatggcatgaacccaggaggcagagcttgcagtgagccgagtttgcgccactgcactccagcctaggtgacagagtgagactccatctcaaaaaaataaaaataaaaataaaaaaatgaaaaaaaaaagaaagtgaagtatagagtatctcatagtttgtcagtgatagaaacaggtttcaaactcagtcaatctgaccgtttgatacatctcagacaccactacattcagtagtttagatgcctagaataaatagagaaggaaggagatggctcttctcttgtctcattgtgtttcttctgagtgagcttgaatcacatgaaggggaacagcagaaaacaaccaactgatcctcagctgtcatgtttcctttaaaagtccctgaaggaaggtcctggaatgtgactcccttgctcctctgttgctctctttggcattcatttctttggaccctacgcaaggactgtaattggtggggacagctagtggccctgctgggcttcacacacggtgtcctccctaggccagtgcctctggagtcagaactctggtggtatttccctcaatgaagtggagtaagctctctcattttgagatggtataatggaagccaccaagtggcttagaggatgcccaggtccttccatggagccactggggttccggtgcacattaaaaaaaaaatctaaccaggacattcaggaattgctagattctgggaaatcagttcaccatgttcaaaagagtctttttttttttttttgagactctattgcccaggcagagcttgcagtgagccgagtttgcgccactgcactccagcctaggtgacggagtgagactccatctcaaaaaaatttattaaaaata

SEQ ID NO: 26736 - DNA, 3047 bp, Homo sapiens
ggggacactggatcacctagtgtttcacaagcaggtaccttctgctgtaggagagagagaactaaagttctgaaagacctgttgcttttcaccaggaagttttactgggcatctcctgagcctaggcaatagctgtagggtgacttctggagccatccccgtttccccgccccccaaaagaagcggagatttaacggggacgtgcggccagagctggggaaatgggcccgcgagccaggccggcgcttctcctcctgatgcttttgcagaccgcggtcctgcaggggcgcttgctgcagtcccacaccctgcaggtcatcctgggctgtgaaatgcaagaagacaacagtaccgagggctactggaagtacgggtatgatgggcaggaccaccttgaattctgccctgacacactggattggagagcagcagaacccagggcctggcccaccaagctggagtgggaaaggcacaagattcgggccaggcagaacagggcctacctggagagggactgccctgcacagctgcagcagttgctggagctggggagaggtgttttggaccaacaagtgcctcctttggtgaaggtgacacatcatgtgacctcttcagtgaccactctacggtgtcgggccttgaactactacccccagaacatcaccatgaagtggctgaaggataagcagccaatggatgccaaggagttcgaacctaaagacgtattgcccaatggggatgggacctaccagggctggataaccttggctgtaccccctggggaagagcagagatatacgtgccaggtggagcacccaggcctggatcagcccctcattgtgatctgggagccctcaccgtctggcaccctagtcattggagtcatcagtggaattgctgtttttgtcgtcatcttgttcattggaattttgttcataatattaaggaagaggcagggttcaagaggagccatggggcactacgtcttagctgaacgtgagtgacacgcagcctgcagactcactgtgggaaggagacaaaactagagactcaaagagggagtgcatttatgagctcttcatgtttcaggagagagttgaacctaaacatagaaattgcctgacgaactccttgattttagccttctctgttcatttcctcaaaaagatttccccatttaggtttctgagttcctgcatgccggtgatccctagctgtgacctctcccctggaactgtctctcatgaacctcaagctgcatctagaggcttccttcatttcctccgtcacctcagagacatacacctatgtcatttcatttcctatttttggaagaggactccttaaatttgggggacttacatgattcattttaacatctgagaaaagctttgaaccctgggacgtggctagtcataaccttaccagatttttacacatgtatctatgcattttctggacccgttcaacttttcctttgaatcctctctctgtgttacccagtaactcatctgtcaccaagccttggggattcttccatctgattgtgatgtgagttgcacagctatgaaggctgtacactgcacgaatggaagaggcacctgtcccagaaaaagcatcatggctatctgtgggtagtatgatgggtgtttttagcaggtaggaggcaaatatcttgaaaggggttgtgaagaggtgttttttctaattggcatgaaggtgtcatacagatttgcaaagtttaatggtgccttcatttgggatgctactctagtattccagacctgaagaatcacaataattttctacctggtctctccttgttctgataatgaaaattatgataaggatgataaaagcacttacttcgtgtccgactcttctgagcacctacttacatgcattactgcatgcacttcttacaataattctatgagataggtactattatccccatttcttttttaaatgaagaaagtgaagtaggccgggcacggtggctcacgcctgtaatcccagcgctttgggaggccaaagcgggtggatcacgaggtcaggagatcgagaccatcctggctaacatggtgaaaccccatctctaataaaaatacaaaaaattagctgggcgtggtggcagacgcctgtagtcccagctactcggaaggctgaggcaggagaatggcatgaacccaggaggcagagcttgcagtgagccgagtttgcgccactgcactccagcctaggtgacagagtgagactccatctcaaaaaaataaaaataaaaataaaaaaatgaaaaaaaaaagaaagtgaagtatagagtatctcatagtttgtcagtgatagaaacaggtttcaaactcagtcaatctgaccgtttgatacatctcagacaccactacattcagtagtttagatgcctagaataaatagagaaggaaggagatggctcttctcttgtctcattgtgtttcttctgagtgagcttgaatcacatgaaggggaacagcagaaaacaaccaactgatcctcagctgtcatgtttcctttaaaagtccctgaaggaaggtcctggaatgtgactcccttgctcctctgttgctctctttggcattcatttctttggaccctacgcaaggactgtaattggtggggacagctagtggccctgctgggcttcacacacggtgtcctccctaggccagtgcctctggagtcagaactctggtggtatttccctcaatgaagtggagtaagctctctcattttgagatggtataatggaagccaccaagtggcttagaggatgcccaggtccttccatggagccactggggttccggtgcacattaaaaaaaaaatctaaccaggacattcaggaattgctagattctgggaaatcagttcaccatgttcaaaagagtctttttttttttttttgagactctattgcccaggcagagcttgcagtgagccgagtttgcgccactgcactccagcctaggtgacggagtgagactccatctcaaaaaaatttattaaaaata

SEQ ID NO: 26737 - DNA, 3242 bp, Homo sapiens
ggggacactggatcacctagtgtttcacaagcaggtaccttctgctgtaggagagagagaactaaagttctgaaagacctgttgcttttcaccaggaagttttactgggcatctcctgagcctaggcaatagctgtagggtgacttctggagccatccccgtttccccgccccccaaaagaagcggagatttaacggggacgtgcggccagagctggggaaatgggcccgcgagccaggccggcgcttctcctcctgatgcttttgcagaccgcggtcctgcaggggcgcttgctgcctttgggctacgtggatgaccagctgttcgtgttctatgatcatgagagtcgccgtgtggagccccgaactccatgggtttccagtagaatttcaagccagatgtggctgcagctgagtcagagtctgaaagggtgggatcacatgttcactgttgacttctggactattatggaaaatcacaaccacagcaaggagtcccacaccctgcaggtcatcctgggctgtgaaatgcaagaagacaacagtaccgagggctactggaagtacgggtatgatgggcaggaccaccttgaattctgccctgacacactggattggagagcagcagaacccagggcctggcccaccaagctggagtgggaaaggcacaagattcgggccaggcagaacagggcctacctggagagggactgccctgcacagctgcagcagttgctggagctggggagaggtgttttggaccaacaagtgcctcctttggtgaaggtgacacatcatgtgacctcttcagtgaccactctacggtgtcgggccttgaactactacccccagaacatcaccatgaagtggctgaaggataagcagccaatggatgccaaggagttcgaacctaaagacgtattgcccaatggggatgggacctaccagggctggataaccttggctgtaccccctggggaagagcagagatatacgtgccaggtggagcacccaggcctggatcagcccctcattgtgatctgggagccctcaccgtctggcaccctagtcattggagtcatcagtggaattgctgtttttgtcgtcatcttgttcattggaattttgttcataatattaaggaagaggcagggttcaagaggagccatggggcactacgtcttagctgaacgtgagtgacacgcagcctgcagactcactgtgggaaggagacaaaactagagactcaaagagggagtgcatttatgagctcttcatgtttcaggagagagttgaacctaaacatagaaattgcctgacgaactccttgattttagccttctctgttcatttcctcaaaaagatttccccatttaggtttctgagttcctgcatgccggtgatccctagctgtgacctctcccctggaactgtctctcatgaacctcaagctgcatctagaggcttccttcatttcctccgtcacctcagagacatacacctatgtcatttcatttcctatttttggaagaggactccttaaatttgggggacttacatgattcattttaacatctgagaaaagctttgaaccctgggacgtggctagtcataaccttaccagatttttacacatgtatctatgcattttctggacccgttcaacttttcctttgaatcctctctctgtgttacccagtaactcatctgtcaccaagccttggggattcttccatctgattgtgatgtgagttgcacagctatgaaggctgtacactgcacgaatggaagaggcacctgtcccagaaaaagcatcatggctatctgtgggtagtatgatgggtgtttttagcaggtaggaggcaaatatcttgaaaggggttgtgaagaggtgttttttctaattggcatgaaggtgtcatacagatttgcaaagtttaatggtgccttcatttgggatgctactctagtattccagacctgaagaatcacaataattttctacctggtctctccttgttctgataatgaaaattatgataaggatgataaaagcacttacttcgtgtccgactcttctgagcacctacttacatgcattactgcatgcacttcttacaataattctatgagataggtactattatccccatttcttttttaaatgaagaaagtgaagtaggccgggcacggtggctcacgcctgtaatcccagcgctttgggaggccaaagcgggtggatcacgaggtcaggagatcgagaccatcctggctaacatggtgaaaccccatctctaataaaaatacaaaaaattagctgggcgtggtggcagacgcctgtagtcccagctactcggaaggctgaggcaggagaatggcatgaacccaggaggcagagcttgcagtgagccgagtttgcgccactgcactccagcctaggtgacagagtgagactccatctcaaaaaaataaaaataaaaataaaaaaatgaaaaaaaaaagaaagtgaagtatagagtatctcatagtttgtcagtgatagaaacaggtttcaaactcagtcaatctgaccgtttgatacatctcagacaccactacattcagtagtttagatgcctagaataaatagagaaggaaggagatggctcttctcttgtctcattgtgtttcttctgagtgagcttgaatcacatgaaggggaacagcagaaaacaaccaactgatcctcagctgtcatgtttcctttaaaagtccctgaaggaaggtcctggaatgtgactcccttgctcctctgttgctctctttggcattcatttctttggaccctacgcaaggactgtaattggtggggacagctagtggccctgctgggcttcacacacggtgtcctccctaggccagtgcctctggagtcagaactctggtggtatttccctcaatgaagtggagtaagctctctcattttgagatggtataatggaagccaccaagtggcttagaggatgcccaggtccttccatggagccactggggttccggtgcacattaaaaaaaaaatctaaccaggacattcaggaattgctagattctgggaaatcagttcaccatgttcaaaagagtctttttttttttttttgagactctattgcccaggcagagcttgcagtgagccgagtttgcgccactgcactccagcctaggtgacggagtgagactccatctcaaaaaaatttattaaaaata

SEQ ID NO: 26738 - DNA, 3177 bp, Homo sapiens
ggggacactggatcacctagtgtttcacaagcaggtaccttctgctgtaggagagagagaactaaagttctgaaagacctgttgcttttcaccaggaagttttactgggcatctcctgagcctaggcaatagctgtagggtgacttctggagccatccccgtttccccgccccccaaaagaagcggagatttaacggggacgtgcggccagagctggggaaatgggcccgcgagccaggccggcgcttctcctcctgatgcttttgcagaccgcggtcctgcaggggcgcttgctgcgttcacactctctgcactacctcttcatgggtgcctcagagcaggaccttggtctttccttgtttgaagctttgggctacgtggatgaccagctgttcgtgttctatgatcatgagagtcgccgtgtggagccccgaactccatgggtttccagtagaatttcaagccagatgtggctgcagctgagtcagagtctgaaagggtgggatcacatgttcactgttgacttctggactattatggaaaatcacaaccacagcaaggaaggaagtgaaagttccagtcttcctggcaagggtaaacagatcccctctcctcatccttcctctttcctgtcaagtgcctcctttggtgaaggtgacacatcatgtgacctcttcagtgaccactctacggtgtcgggccttgaactactacccccagaacatcaccatgaagtggctgaaggataagcagccaatggatgccaaggagttcgaacctaaagacgtattgcccaatggggatgggacctaccagggctggataaccttggctgtaccccctggggaagagcagagatatacgtgccaggtggagcacccaggcctggatcagcccctcattgtgatctggggtatgtgactgatgagagccaggagctgagaaaatctattgggggttgagaggagtgcctgaggagagccctcaccgtctggcaccctagtcattggagtcatcagtggaattgctgtttttgtcgtcatcttgttcattggaattttgttcataatattaaggaagaggcagggttcaagaggagccatggggcactacgtcttagctgaacgtgagtgacacgcagcctgcagactcactgtgggaaggagacaaaactagagactcaaagagggagtgcatttatgagctcttcatgtttcaggagagagttgaacctaaacatagaaattgcctgacgaactccttgattttagccttctctgttcatttcctcaaaaagatttccccatttaggtttctgagttcctgcatgccggtgatccctagctgtgacctctcccctggaactgtctctcatgaacctcaagctgcatctagaggcttccttcatttcctccgtcacctcagagacatacacctatgtcatttcatttcctatttttggaagaggactccttaaatttgggggacttacatgattcattttaacatctgagaaaagctttgaaccctgggacgtggctagtcataaccttaccagatttttacacatgtatctatgcattttctggacccgttcaacttttcctttgaatcctctctctgtgttacccagtaactcatctgtcaccaagccttggggattcttccatctgattgtgatgtgagttgcacagctatgaaggctgtacactgcacgaatggaagaggcacctgtcccagaaaaagcatcatggctatctgtgggtagtatgatgggtgtttttagcaggtaggaggcaaatatcttgaaaggggttgtgaagaggtgttttttctaattggcatgaaggtgtcatacagatttgcaaagtttaatggtgccttcatttgggatgctactctagtattccagacctgaagaatcacaataattttctacctggtctctccttgttctgataatgaaaattatgataaggatgataaaagcacttacttcgtgtccgactcttctgagcacctacttacatgcattactgcatgcacttcttacaataattctatgagataggtactattatccccatttcttttttaaatgaagaaagtgaagtaggccgggcacggtggctcacgcctgtaatcccagcgctttgggaggccaaagcgggtggatcacgaggtcaggagatcgagaccatcctggctaacatggtgaaaccccatctctaataaaaatacaaaaaattagctgggcgtggtggcagacgcctgtagtcccagctactcggaaggctgaggcaggagaatggcatgaacccaggaggcagagcttgcagtgagccgagtttgcgccactgcactccagcctaggtgacagagtgagactccatctcaaaaaaataaaaataaaaataaaaaaatgaaaaaaaaaagaaagtgaagtatagagtatctcatagtttgtcagtgatagaaacaggtttcaaactcagtcaatctgaccgtttgatacatctcagacaccactacattcagtagtttagatgcctagaataaatagagaaggaaggagatggctcttctcttgtctcattgtgtttcttctgagtgagcttgaatcacatgaaggggaacagcagaaaacaaccaactgatcctcagctgtcatgtttcctttaaaagtccctgaaggaaggtcctggaatgtgactcccttgctcctctgttgctctctttggcattcatttctttggaccctacgcaaggactgtaattggtggggacagctagtggccctgctgggcttcacacacggtgtcctccctaggccagtgcctctggagtcagaactctggtggtatttccctcaatgaagtggagtaagctctctcattttgagatggtataatggaagccaccaagtggcttagaggatgcccaggtccttccatggagccactggggttccggtgcacattaaaaaaaaaatctaaccaggacattcaggaattgctagattctgggaaatcagttcaccatgttcaaaagagtctttttttttttttttgagactctattgcccaggcagagcttgcagtgagccgagtttgcgccactgcactccagcctaggtgacggagtgagactccatctcaaaaaaatttattaaaaata

SEQ ID NO: 26739 - DNA, 3005 bp, Homo sapiens
ggggacactggatcacctagtgtttcacaagcaggtaccttctgctgtaggagagagagaactaaagttctgaaagacctgttgcttttcaccaggaagttttactgggcatctcctgagcctaggcaatagctgtagggtgacttctggagccatccccgtttccccgccccccaaaagaagcggagatttaacggggacgtgcggccagagctggggaaatgggcccgcgagccaggccggcgcttctcctcctgatgcttttgcagaccgcggtcctgcaggggcgcttgctgcagtcccacaccctgcaggtcatcctgggctgtgaaatgcaagaagacaacagtaccgagggctactggaagtacgggtatgatgggcaggaccaccttgaattctgccctgacacactggattggagagcagcagaacccagggcctggcccaccaagctggagtgggaaaggcacaagattcgggccaggcagaacagggcctacctggagagggactgccctgcacagctgcagcagttgctggagctggggagaggtgttttggaccaacaagtgaccactctacggtgtcgggccttgaactactacccccagaacatcaccatgaagtggctgaaggataagcagccaatggatgccaaggagttcgaacctaaagacgtattgcccaatggggatgggacctaccagggctggataaccttggctgtaccccctggggaagagcagagatatacgtgccaggtggagcacccaggcctggatcagcccctcattgtgatctgggagccctcaccgtctggcaccctagtcattggagtcatcagtggaattgctgtttttgtcgtcatcttgttcattggaattttgttcataatattaaggaagaggcagggttcaagaggagccatggggcactacgtcttagctgaacgtgagtgacacgcagcctgcagactcactgtgggaaggagacaaaactagagactcaaagagggagtgcatttatgagctcttcatgtttcaggagagagttgaacctaaacatagaaattgcctgacgaactccttgattttagccttctctgttcatttcctcaaaaagatttccccatttaggtttctgagttcctgcatgccggtgatccctagctgtgacctctcccctggaactgtctctcatgaacctcaagctgcatctagaggcttccttcatttcctccgtcacctcagagacatacacctatgtcatttcatttcctatttttggaagaggactccttaaatttgggggacttacatgattcattttaacatctgagaaaagctttgaaccctgggacgtggctagtcataaccttaccagatttttacacatgtatctatgcattttctggacccgttcaacttttcctttgaatcctctctctgtgttacccagtaactcatctgtcaccaagccttggggattcttccatctgattgtgatgtgagttgcacagctatgaaggctgtacactgcacgaatggaagaggcacctgtcccagaaaaagcatcatggctatctgtgggtagtatgatgggtgtttttagcaggtaggaggcaaatatcttgaaaggggttgtgaagaggtgttttttctaattggcatgaaggtgtcatacagatttgcaaagtttaatggtgccttcatttgggatgctactctagtattccagacctgaagaatcacaataattttctacctggtctctccttgttctgataatgaaaattatgataaggatgataaaagcacttacttcgtgtccgactcttctgagcacctacttacatgcattactgcatgcacttcttacaataattctatgagataggtactattatccccatttcttttttaaatgaagaaagtgaagtaggccgggcacggtggctcacgcctgtaatcccagcgctttgggaggccaaagcgggtggatcacgaggtcaggagatcgagaccatcctggctaacatggtgaaaccccatctctaataaaaatacaaaaaattagctgggcgtggtggcagacgcctgtagtcccagctactcggaaggctgaggcaggagaatggcatgaacccaggaggcagagcttgcagtgagccgagtttgcgccactgcactccagcctaggtgacagagtgagactccatctcaaaaaaataaaaataaaaataaaaaaatgaaaaaaaaaagaaagtgaagtatagagtatctcatagtttgtcagtgatagaaacaggtttcaaactcagtcaatctgaccgtttgatacatctcagacaccactacattcagtagtttagatgcctagaataaatagagaaggaaggagatggctcttctcttgtctcattgtgtttcttctgagtgagcttgaatcacatgaaggggaacagcagaaaacaaccaactgatcctcagctgtcatgtttcctttaaaagtccctgaaggaaggtcctggaatgtgactcccttgctcctctgttgctctctttggcattcatttctttggaccctacgcaaggactgtaattggtggggacagctagtggccctgctgggcttcacacacggtgtcctccctaggccagtgcctctggagtcagaactctggtggtatttccctcaatgaagtggagtaagctctctcattttgagatggtataatggaagccaccaagtggcttagaggatgcccaggtccttccatggagccactggggttccggtgcacattaaaaaaaaaatctaaccaggacattcaggaattgctagattctgggaaatcagttcaccatgttcaaaagagtctttttttttttttttgagactctattgcccaggcagagcttgcagtgagccgagtttgcgccactgcactccagcctaggtgacggagtgagactccatctcaaaaaaatttattaaaaata

SEQ ID NO: 26740 - DNA, 3205 bp, Homo sapiens
ggggacactggatcacctagtgtttcacaagcaggtaccttctgctgtaggagagagagaactaaagttctgaaagacctgttgcttttcaccaggaagttttactgggcatctcctgagcctaggcaatagctgtagggtgacttctggagccatccccgtttccccgccccccaaaagaagcggagatttaacggggacgtgcggccagagctggggaaatgggcccgcgagccaggccggcgcttctcctcctgatgcttttgcagaccgcggtcctgcaggggcgcttgctgcagtcccacaccctgcaggtcatcctgggctgtgaaatgcaagaagacaacagtaccgagggctactggaagtacgggtatgatgggcaggaccaccttgaattctgccctgacacactggattggagagcagcagaacccagggcctggcccaccaagctggagtgggaaaggcacaagattcgggccaggcagaacagggcctacctggagagggactgccctgcacagctgcagcagttgctggagctggggagaggtgttttggaccaacaagtgcctcctttggtgaaggtgacacatcatgtgacctcttcagtgaccactctacggtgtcgggccttgaactactacccccagaacatcaccatgaagtggctgaaggataagcagccaatggatgccaaggagttcgaacctaaagacgtattgcccaatggggatgggacctaccagggctggataaccttggctgtaccccctggggaagagcagagatatacgtgccaggtggagcacccaggcctggatcagcccctcattgtgatctggggtatgtgactgatgagagccaggagctgagaaaatctattgggggttgagaggagtgcctgaggaggtaattatggcagtgagatgaggatctgctctttgttagggggtgggctgagggtggcaatcaaaggctttaacttgctttttctgttttagagccctcaccgtctggcaccctagtcattggagtcatcagtggaattgctgtttttgtcgtcatcttgttcattggaattttgttcataatattaaggaagaggcagggttcaagaggagccatggggcactacgtcttagctgaacgtgagtgacacgcagcctgcagactcactgtgggaaggagacaaaactagagactcaaagagggagtgcatttatgagctcttcatgtttcaggagagagttgaacctaaacatagaaattgcctgacgaactccttgattttagccttctctgttcatttcctcaaaaagatttccccatttaggtttctgagttcctgcatgccggtgatccctagctgtgacctctcccctggaactgtctctcatgaacctcaagctgcatctagaggcttccttcatttcctccgtcacctcagagacatacacctatgtcatttcatttcctatttttggaagaggactccttaaatttgggggacttacatgattcattttaacatctgagaaaagctttgaaccctgggacgtggctagtcataaccttaccagatttttacacatgtatctatgcattttctggacccgttcaacttttcctttgaatcctctctctgtgttacccagtaactcatctgtcaccaagccttggggattcttccatctgattgtgatgtgagttgcacagctatgaaggctgtacactgcacgaatggaagaggcacctgtcccagaaaaagcatcatggctatctgtgggtagtatgatgggtgtttttagcaggtaggaggcaaatatcttgaaaggggttgtgaagaggtgttttttctaattggcatgaaggtgtcatacagatttgcaaagtttaatggtgccttcatttgggatgctactctagtattccagacctgaagaatcacaataattttctacctggtctctccttgttctgataatgaaaattatgataaggatgataaaagcacttacttcgtgtccgactcttctgagcacctacttacatgcattactgcatgcacttcttacaataattctatgagataggtactattatccccatttcttttttaaatgaagaaagtgaagtaggccgggcacggtggctcacgcctgtaatcccagcgctttgggaggccaaagcgggtggatcacgaggtcaggagatcgagaccatcctggctaacatggtgaaaccccatctctaataaaaatacaaaaaattagctgggcgtggtggcagacgcctgtagtcccagctactcggaaggctgaggcaggagaatggcatgaacccaggaggcagagcttgcagtgagccgagtttgcgccactgcactccagcctaggtgacagagtgagactccatctcaaaaaaataaaaataaaaataaaaaaatgaaaaaaaaaagaaagtgaagtatagagtatctcatagtttgtcagtgatagaaacaggtttcaaactcagtcaatctgaccgtttgatacatctcagacaccactacattcagtagtttagatgcctagaataaatagagaaggaaggagatggctcttctcttgtctcattgtgtttcttctgagtgagcttgaatcacatgaaggggaacagcagaaaacaaccaactgatcctcagctgtcatgtttcctttaaaagtccctgaaggaaggtcctggaatgtgactcccttgctcctctgttgctctctttggcattcatttctttggaccctacgcaaggactgtaattggtggggacagctagtggccctgctgggcttcacacacggtgtcctccctaggccagtgcctctggagtcagaactctggtggtatttccctcaatgaagtggagtaagctctctcattttgagatggtataatggaagccaccaagtggcttagaggatgcccaggtccttccatggagccactggggttccggtgcacattaaaaaaaaaatctaaccaggacattcaggaattgctagattctgggaaatcagttcaccatgttcaaaagagtctttttttttttttttgagactctattgcccaggcagagcttgcagtgagccgagtttgcgccactgcactccagcctaggtgacggagtgagactccatctcaaaaaaatttattaaaaata

SEQ ID NO: 26741 - DNA, 1280 bp, Homo sapiens
ggggacactggatcacctagtgtttcacaagcaggtaccttctgctgtaggagagagagaactaaagttctgaaagacctgttgcttttcaccaggaagttttactgggcatctcctgagcctaggcaatagctgtagggtgacttctggagccatccccgtttccccgccccccaaaagaagcggagatttaacggggacgtgcggccagagctggggaaatgggcccgcgagccaggccggcgcttctcctcctgatgcttttgcagaccgcggtcctgcaggggcgcttgctgcgttcacactctctgcactacctcttcatgggtgcctcagagcaggaccttggtctttccttgtttgaagctttgggctacgtggatgaccagctgttcgtgttctatgatcatgagagtcgccgtgtggagccccgaactccatgggtttccagtagaatttcaagccagatgtggctgcagctgagtcagagtctgaaagggtgggatcacatgttcactgttgacttctggactattatggaaaatcacaaccacagcaaggagtcccacaccctgcaggtcatcctgggctgtgaaatgcaagaagacaacagtaccgagggctactggaagtacgggtatgatgggcaggaccaccttgaattctgccctgacacactggattggagagcagcagaacccagggcctggcccaccaagctggagtgggaaaggcacaagattcgggccaggcagaacagggcctacctggagagggactgccctgcacagctgcagcagttgctggagctggggagaggtgttttggaccaacaagtgctgagattgcaggtgtgagccaccctgcccagccgtcaaaagagtcttaatatatatatccagatggcatgtgtttactttatgttactacatgcacttggctgcataaatgtggtacaagcattctgtcttgaagggcaggtgcttcaggataccatatacagctcagaagtttcttctttaggcattaaattttagcaaagatatctcatctcttcttttaaaccattttctttttttgtggttagaaaagttatgtagaaaaaagtaaatgtgatttacgctcattgtagaaaagctataaaatgaatacaattaaagctgttatttaattagccagtgaaaaactattaacaacttgtctattacctgttagtattattgttgcattaaaaatgcatatactttaataaatgtacattgtattgtaaaaaaaaaaat

SEQ ID NO: 26742 - DNA, 427 bp, Homo sapiens
gcggagatttaacggggacgtgcggccagagctggggaaatgggcccgcgagccaggccggcgcttctcctcctgatgcttttgcagaccgcggtcctgcaggggcgcttgctgcgtgagtccgagggctgcgggcgaactaggggcgcggcgggggtggaaaaatcgaaactagctttttctttgcgcttgggagtttgctaactttggaggacctgctcaaccctatccgcaagcccctctccctactttctgcgtccagaccccgtgagggagtgcctaccactgaactgcagataggggtccctcgccccaggacctgccccctcccccggctgtcccggctctgcggagtgacttttggaaccgcccactcccttcccccaactagaatgcttttaaataaatctcgtagttcctcacttga

SEQ ID NO: 26743 - DNA, 951 bp, Homo sapiens
ggggacactggatcacctagtgtttcacaagcaggtaccttctgctgtaggagagagagaactaaagttctgaaagacctgttgcttttcaccaggaagttttactgggcatctcctgagcctaggcaatagctgtagggtgacttctggagccatccccgtttccccgccccccaaaagaagcggagatttaacggggacgtgcggccagagctggggaaatgggcccgcgagccaggccggcgcttctcctcctgatgcttttgcagaccgcggtcctgcaggggcgcttgctgcgttcacactctctgcactacctcttcatgggtgcctcagagcaggaccttggtctttccttgtttgaagctttgggctacgtggatgaccagctgttcgtgttctatgatcatgagagtcgccgtgtggagccccgaactccatgggtttccagtagaatttcaagccagatgtggctgcagctgagtcagagtctgaaagggtgggatcacatgttcactgttgacttctggactattatggaaaatcacaaccacagcaaggagtcccacaccctgcaggtcatcctgggctgtgaaatgcaagaagacaacagtaccgagggctactggaagtacgggtatgatggggcaggtgcttcaggataccatatacagctcagaagtttcttctttaggcattaaattttagcaaagatatctcatctcttcttttaaaccattttctttttttgtggttagaaaagttatgtagaaaaaagtaaatgtgatttacgctcattgtagaaaagctataaaatgaatacaattaaagctgttatttaattagccagtgaaaaactattaacaacttgtctattacctgttagtattattgttgcattaaaaatgcatatactttaataaatgtacattgtattgtaaaaaaaaaaat

SEQ ID NO: 26744 - DNA, 2969 bp, Homo sapiens
ggggacactggatcacctagtgtttcacaagcaggtaccttctgctgtaggagagagagaactaaagttctgaaagacctgttgcttttcaccaggaagttttactgggcatctcctgagcctaggcaatagctgtagggtgacttctggagccatccccgtttccccgccccccaaaagaagcggagatttaacggggacgtgcggccagagctggggaaatgggcccgcgagccaggccggcgcttctcctcctgatgcttttgcagaccgcggtcctgcaggggcgcttgctgcgttcacactctctgcactacctcttcatgggtgcctcagagcaggaccttggtctttccttgtttgaagctttgggctacgtggatgaccagctgttcgtgttctatgatcatgagagtcgccgtgtggagccccgaactccatgggtttccagtagaatttcaagccagatgtggctgcagctgagtcagagtctgaaagggtgggatcacatgttcactgttgacttctggactattatggaaaatcacaaccacagcaaggtgcctcctttggtgaaggtgacacatcatgtgacctcttcagtgaccactctacggtgtcgggccttgaactactacccccagaacatcaccatgaagtggctgaaggataagcagccaatggatgccaaggagttcgaacctaaagacgtattgcccaatggggatgggacctaccagggctggataaccttggctgtaccccctggggaagagcagagatatacgtgccaggtggagcacccaggcctggatcagcccctcattgtgatctgggagccctcaccgtctggcaccctagtcattggagtcatcagtggaattgctgtttttgtcgtcatcttgttcattggaattttgttcataatattaaggaagaggcagggttcaagaggagccatggggcactacgtcttagctgaacgtgagtgacacgcagcctgcagactcactgtgggaaggagacaaaactagagactcaaagagggagtgcatttatgagctcttcatgtttcaggagagagttgaacctaaacatagaaattgcctgacgaactccttgattttagccttctctgttcatttcctcaaaaagatttccccatttaggtttctgagttcctgcatgccggtgatccctagctgtgacctctcccctggaactgtctctcatgaacctcaagctgcatctagaggcttccttcatttcctccgtcacctcagagacatacacctatgtcatttcatttcctatttttggaagaggactccttaaatttgggggacttacatgattcattttaacatctgagaaaagctttgaaccctgggacgtggctagtcataaccttaccagatttttacacatgtatctatgcattttctggacccgttcaacttttcctttgaatcctctctctgtgttacccagtaactcatctgtcaccaagccttggggattcttccatctgattgtgatgtgagttgcacagctatgaaggctgtacactgcacgaatggaagaggcacctgtcccagaaaaagcatcatggctatctgtgggtagtatgatgggtgtttttagcaggtaggaggcaaatatcttgaaaggggttgtgaagaggtgttttttctaattggcatgaaggtgtcatacagatttgcaaagtttaatggtgccttcatttgggatgctactctagtattccagacctgaagaatcacaataattttctacctggtctctccttgttctgataatgaaaattatgataaggatgataaaagcacttacttcgtgtccgactcttctgagcacctacttacatgcattactgcatgcacttcttacaataattctatgagataggtactattatccccatttcttttttaaatgaagaaagtgaagtaggccgggcacggtggctcacgcctgtaatcccagcgctttgggaggccaaagcgggtggatcacgaggtcaggagatcgagaccatcctggctaacatggtgaaaccccatctctaataaaaatacaaaaaattagctgggcgtggtggcagacgcctgtagtcccagctactcggaaggctgaggcaggagaatggcatgaacccaggaggcagagcttgcagtgagccgagtttgcgccactgcactccagcctaggtgacagagtgagactccatctcaaaaaaataaaaataaaaataaaaaaatgaaaaaaaaaagaaagtgaagtatagagtatctcatagtttgtcagtgatagaaacaggtttcaaactcagtcaatctgaccgtttgatacatctcagacaccactacattcagtagtttagatgcctagaataaatagagaaggaaggagatggctcttctcttgtctcattgtgtttcttctgagtgagcttgaatcacatgaaggggaacagcagaaaacaaccaactgatcctcagctgtcatgtttcctttaaaagtccctgaaggaaggtcctggaatgtgactcccttgctcctctgttgctctctttggcattcatttctttggaccctacgcaaggactgtaattggtggggacagctagtggccctgctgggcttcacacacggtgtcctccctaggccagtgcctctggagtcagaactctggtggtatttccctcaatgaagtggagtaagctctctcattttgagatggtataatggaagccaccaagtggcttagaggatgcccaggtccttccatggagccactggggttccggtgcacattaaaaaaaaaatctaaccaggacattcaggaattgctagattctgggaaatcagttcaccatgttcaaaagagtctttttttttttttttgagactctattgcccaggcagcagagtgagactccatcttc

SEQ ID NO: 26745 - DNA, 3084 bp, Homo sapiens
ggggacactggatcacctagtgtttcacaagcaggtaccttctgctgtaggagagagagaactaaagttctgaaagacctgttgcttttcaccaggaagttttactgggcatctcctgagcctaggcaatagctgtagggtgacttctggagccatccccgtttccccgccccccaaaagaagcggagatttaacggggacgtgcggccagagctggggaaatgggcccgcgagccaggccggcgcttctcctcctgatgcttttgcagaccgcggtcctgcaggggcgcttgctgcgttcacactctctgcactacctcttcatgggtgcctcagagcaggaccttggtctttccttgtttgaagctttgggctacgtggatgaccagctgttcgtgttctatgatcatgagagtcgccgtgtggagccccgaactccatgggtttccagtagaatttcaagccagatgtggctgcagctgagtcagagtctgaaagggtgggatcacatgttcactgttgacttctggactattatggaaaatcacaaccacagcaaggagtcccacaccctgcaggtcatcctgggctgtgaaatgcaagaagacaacagtaccgagggctactggaagtacgggtatgatgggcaggaccaccttgaattctgccctgacacactggattggagagcagcagaacccagggcctggcccaccaagctggagtgggaaaggcacaagattcgggccaggcagaacagggcctacctggagagggactgccctgcacagctgcagcagttgctggagctggggagaggtgttttggaccaacaagtgaccactctacggtgtcgggccttgaactactacccccagaacatcaccatgaagtggctgaaggataagcagccaatggatgccaaggagttcgaacctaaagacgtattgcccaatggggatgggacctaccagggctggataaccttggctgtaccccctggggaagagcagagatatacgtgccaggtggagcacccaggcctggatcagcccctcattgtgatctgggagccctcaccgtctggcaccctagtcattggagtcatcagtggaattgctgtttttgtcgtcatcttgttcattggaattttgttcataatattaaggaagaggcagggttcaagaggagccatggggcactacgtcttagctgaacgtttctgagttcctgcatgccggtgatccctagctgtgacctctcccctggaactgtctctcatgaacctcaagctgcatctagaggcttccttcatttcctccgtcacctcagagacatacacctatgtcatttcatttcctatttttggaagaggactccttaaatttgggggacttacatgattcattttaacatctgagaaaagctttgaaccctgggacgtggctagtcataaccttaccagatttttacacatgtatctatgcattttctggacccgttcaacttttcctttgaatcctctctctgtgttacccagtaactcatctgtcaccaagccttggggattcttccatctgattgtgatgtgagttgcacagctatgaaggctgtacactgcacgaatggaagaggcacctgtcccagaaaaagcatcatggctatctgtgggtagtatgatgggtgtttttagcaggtaggaggcaaatatcttgaaaggggttgtgaagaggtgttttttctaattggcatgaaggtgtcatacagatttgcaaagtttaatggtgccttcatttgggatgctactctagtattccagacctgaagaatcacaataattttctacctggtctctccttgttctgataatgaaaattatgataaggatgataaaagcacttacttcgtgtccgactcttctgagcacctacttacatgcattactgcatgcacttcttacaataattctatgagataggtactattatccccatttcttttttaaatgaagaaagtgaagtaggccgggcacggtggctcacgcctgtaatcccagcgctttgggaggccaaagcgggtggatcacgaggtcaggagatcgagaccatcctggctaacatggtgaaaccccatctctaataaaaatacaaaaaattagctgggcgtggtggcagacgcctgtagtcccagctactcggaaggctgaggcaggagaatggcatgaacccaggaggcagagcttgcagtgagccgagtttgcgccactgcactccagcctaggtgacagagtgagactccatctcaaaaaaataaaaataaaaataaaaaaatgaaaaaaaaaagaaagtgaagtatagagtatctcatagtttgtcagtgatagaaacaggtttcaaactcagtcaatctgaccgtttgatacatctcagacaccactacattcagtagtttagatgcctagaataaatagagaaggaaggagatggctcttctcttgtctcattgtgtttcttctgagtgagcttgaatcacatgaaggggaacagcagaaaacaaccaactgatcctcagctgtcatgtttcctttaaaagtccctgaaggaaggtcctggaatgtgactcccttgctcctctgttgctctctttggcattcatttctttggaccctacgcaaggactgtaattggtggggacagctagtggccctgctgggcttcacacacggtgtcctccctaggccagtgcctctggagtcagaactctggtggtatttccctcaatgaagtggagtaagctctctcattttgagatggtataatggaagccaccaagtggcttagaggatgcccaggtccttccatggagccactggggttccggtgcacattaaaaaaaaaatctaaccaggacattcaggaattgctagattctgggaaatcagttcaccatgttcaaaagagtctttttttttttttttgagactctattgcccaggcagagcttgcagtgagccgagtttgcgccactgcactccagcctaggtgacggagtgagactccatctcaaaaaaatttattaaaaata

SEQ ID NO: 26746 - DNA, 2993 bp, Homo sapiens
ggggacactggatcacctagtgtttcacaagcaggtaccttctgctgtaggagagagagaactaaagttctgaaagacctgttgcttttcaccaggaagttttactgggcatctcctgagcctaggcaatagctgtagggtgacttctggagccatccccgtttccccgccccccaaaagaagcggagatttaacggggacgtgcggccagagctggggaaatgggcccgcgagccaggccggcgcttctcctcctgatgcttttgcagaccgcggtcctgcaggggcgcttgctgcgttcacactctctgcactacctcttcatgggtgcctcagagcaggaccttggtctttccttgtttgaagctttgggctacgtggatgaccagctgttcgtgttctatgatcatgagagtcgccgtgtggagccccgaactccatgggtttccagtagaatttcaagccagatgtggctgcagctgagtcagagtctgaaagggtgggatcacatgttcactgttgacttctggactattatggaaaatcacaaccacagcaaggtgaccactctacggtgtcgggccttgaactactacccccagaacatcaccatgaagtggctgaaggataagcagccaatggatgccaaggagttcgaacctaaagacgtattgcccaatggggatgggacctaccagggctggataaccttggctgtaccccctggggaagagcagagatatacgtgccaggtggagcacccaggcctggatcagcccctcattgtgatctgggagccctcaccgtctggcaccctagtcattggagtcatcagtggaattgctgtttttgtcgtcatcttgttcattggaattttgttcataatattaaggaagaggcagggttcaagaggagccatggggcactacgtcttagctgaacgtgagtgacacgcagcctgcagactcactgtgggaaggagacaaaactagagactcaaagagggagtgcatttatgagctcttcatgtttcaggagagagttgaacctaaacatagaaattgcctgacgaactccttgattttagccttctctgttcatttcctcaaaaagatttccccatttaggtttctgagttcctgcatgccggtgatccctagctgtgacctctcccctggaactgtctctcatgaacctcaagctgcatctagaggcttccttcatttcctccgtcacctcagagacatacacctatgtcatttcatttcctatttttggaagaggactccttaaatttgggggacttacatgattcattttaacatctgagaaaagctttgaaccctgggacgtggctagtcataaccttaccagatttttacacatgtatctatgcattttctggacccgttcaacttttcctttgaatcctctctctgtgttacccagtaactcatctgtcaccaagccttggggattcttccatctgattgtgatgtgagttgcacagctatgaaggctgtacactgcacgaatggaagaggcacctgtcccagaaaaagcatcatggctatctgtgggtagtatgatgggtgtttttagcaggtaggaggcaaatatcttgaaaggggttgtgaagaggtgttttttctaattggcatgaaggtgtcatacagatttgcaaagtttaatggtgccttcatttgggatgctactctagtattccagacctgaagaatcacaataattttctacctggtctctccttgttctgataatgaaaattatgataaggatgataaaagcacttacttcgtgtccgactcttctgagcacctacttacatgcattactgcatgcacttcttacaataattctatgagataggtactattatccccatttcttttttaaatgaagaaagtgaagtaggccgggcacggtggctcacgcctgtaatcccagcgctttgggaggccaaagcgggtggatcacgaggtcaggagatcgagaccatcctggctaacatggtgaaaccccatctctaataaaaatacaaaaaattagctgggcgtggtggcagacgcctgtagtcccagctactcggaaggctgaggcaggagaatggcatgaacccaggaggcagagcttgcagtgagccgagtttgcgccactgcactccagcctaggtgacagagtgagactccatctcaaaaaaataaaaataaaaataaaaaaatgaaaaaaaaaagaaagtgaagtatagagtatctcatagtttgtcagtgatagaaacaggtttcaaactcagtcaatctgaccgtttgatacatctcagacaccactacattcagtagtttagatgcctagaataaatagagaaggaaggagatggctcttctcttgtctcattgtgtttcttctgagtgagcttgaatcacatgaaggggaacagcagaaaacaaccaactgatcctcagctgtcatgtttcctttaaaagtccctgaaggaaggtcctggaatgtgactcccttgctcctctgttgctctctttggcattcatttctttggaccctacgcaaggactgtaattggtggggacagctagtggccctgctgggcttcacacacggtgtcctccctaggccagtgcctctggagtcagaactctggtggtatttccctcaatgaagtggagtaagctctctcattttgagatggtataatggaagccaccaagtggcttagaggatgcccaggtccttccatggagccactggggttccggtgcacattaaaaaaaaaatctaaccaggacattcaggaattgctagattctgggaaatcagttcaccatgttcaaaagagtctttttttttttttttgagactctattgcccaggcagagcttgcagtgagccgagtttgcgccactgcactccagcctaggtgacggagtgagactccatctcaaaaaaatttattaaaaata

SEQ ID NO: 26747 - DNA, 2401 bp, Homo sapiens
ggggacactggatcacctagtgtttcacaagcaggtaccttctgctgtaggagagagagaactaaagttctgaaagacctgttgcttttcaccaggaagttttactgggcatctcctgagcctaggcaatagctgtagggtgacttctggagccatccccgtttccccgccccccaaaagaagcggagatttaacggggacgtgcggccagagctggggaaatgggcccgcgagccaggccggcgcttctcctcctgatgcttttgcagaccgcggtcctgcaggggcgcttgctgcgttcacactctctgcactacctcttcatgggtgcctcagagcaggaccttggtctttccttgtttgaagctttgggctacgtggatgaccagctgttcgtgttctatgatcatgagagtcgccgtgtggagccccgaactccatgggtttccagtagaatttcaagccagatgtggctgcagctgagtcagagtctgaaagggtgggatcacatgttcactgttgacttctggactattatggaaaatcacaaccacagcaaggagtcccacaccctgcaggtcatcctgggctgtgaaatgcaagaagacaacagtaccgaaggcttccttcatttcctccgtcacctcagagacatacacctatgtcatttcatttcctatttttggaagaggactccttaaatttgggggacttacatgattcattttaacatctgagaaaagctttgaaccctgggacgtggctagtcataaccttaccagatttttacacatgtatctatgcattttctggacccgttcaacttttcctttgaatcctctctctgtgttacccagtaactcatctgtcaccaagccttggggattcttccatctgattgtgatgtgagttgcacagctatgaaggctgtacactgcacgaatggaagaggcacctgtcccagaaaaagcatcatggctatctgtgggtagtatgatgggtgtttttagcaggtaggaggcaaatatcttgaaaggggttgtgaagaggtgttttttctaattggcatgaaggtgtcatacagatttgcaaagtttaatggtgccttcatttgggatgctactctagtattccagacctgaagaatcacaataattttctacctggtctctccttgttctgataatgaaaattatgataaggatgataaaagcacttacttcgtgtccgactcttctgagcacctacttacatgcattactgcatgcacttcttacaataattctatgagataggtactattatccccatttcttttttaaatgaagaaagtgaagtaggccgggcacggtggctcacgcctgtaatcccagcgctttgggaggccaaagcgggtggatcacgaggtcaggagatcgagaccatcctggctaacatggtgaaaccccatctctaataaaaatacaaaaaattagctgggcgtggtggcagacgcctgtagtcccagctactcggaaggctgaggcaggagaatggcatgaacccaggaggcagagcttgcagtgagccgagtttgcgccactgcactccagcctaggtgacagagtgagactccatctcaaaaaaataaaaataaaaataaaaaaatgaaaaaaaaaagaaagtgaagtatagagtatctcatagtttgtcagtgatagaaacaggtttcaaactcagtcaatctgaccgtttgatacatctcagacaccactacattcagtagtttagatgcctagaataaatagagaaggaaggagatggctcttctcttgtctcattgtgtttcttctgagtgagcttgaatcacatgaaggggaacagcagaaaacaaccaactgatcctcagctgtcatgtttcctttaaaagtccctgaaggaaggtcctggaatgtgactcccttgctcctctgttgctctctttggcattcatttctttggaccctacgcaaggactgtaattggtggggacagctagtggccctgctgggcttcacacacggtgtcctccctaggccagtgcctctggagtcagaactctggtggtatttccctcaatgaagtggagtaagctctctcattttgagatggtataatggaagccaccaagtggcttagaggatgcccaggtccttccatggagccactggggttccggtgcacattaaaaaaaaaatctaaccaggacattcaggaattgctagattctgggaaatcagttcaccatgttcaaaagagtctttttttttttttttgagactctattgcccaggcagagcttgcagtgagccgagtttgcgccactgcactccagcctaggtgacggagtgagactccatctcaaaaaaatttattaaaaata

SEQ ID NO: 26748 - DNA, 1484 bp, Homo sapiens
ggggacactggatcacctagtgtttcacaagcaggtaccttctgctgtaggagagagagaactaaagttctgaaagacctgttgcttttcaccaggaagttttactgggcatctcctgagcctaggcaatagctgtagggtgacttctggagccatccccgtttccccgccccccaaaagaagcggagatttaacggggacgtgcggccagagctggggaaatgggcccgcgagccaggccggcgcttctcctcctgatgcttttgcagaccgcggtcctgcaggggcgcttgctgcgttcacactctctgcactacctcttcatgggtgcctcagagcaggaccttggtctttccttgtttgaagctttgggctacgtggatgaccagctgttcgtgttctatgatcatgagagtcgccgtgtggagccccgaactccatgggtttccagtagaatttcaagccagatgtggctgcagctgagtcagagtctgaaagggtgggatcacatgttcactgttgacttctggactattatggaaaatcacaaccacagcaaggagtcccacaccctgcaggtcatcctgggctgtgaaatgcaagaagacaacagtaccgagggctactggaagtacgggtatgatgggcaggaccaccttgaattctgccctgacacactggattggagagcagcagaacccagggcctggcccaccaagctggagtgggaaaggcacaagattcgggccaggcagaacagggcctacctggagagggactgccctgcacagctgcagcagttgctggagctggggagaggtgttttggaccaacaagtgcctcctttggtgaaggtgacacatcatgtgacctcttcagtgaccactctacggtgtcgggccttgaactactacccccagaacatcaccatgaagtggctgaaggataagcagccaatggatgccaaggagttcgaacctaaagacgtattgcccaatggggatgggacctaccagggctggataaccttggctgtacccctgctgagattgcaggtgtgagccaccctgcccagccgtcaaaagagtcttaatatatatatccagatggcatgtgtttactttatgttactacatgcacttggctgcataaatgtggtacaagcattctgtcttgaagggcaggtgcttcaggataccatatacagctcagaagtttcttctttaggcattaaattttagcaaagatatctcatctcttcttttaaaccattttctttttttgtggttagaaaagttatgtagaaaaaagtaaatgtgatttacgctcattgtagaaaagctataaaatgaatacaattaaagctgttatttaattagccagtgaaaaactattaacaacttgtctattacctgttagtattattgttgcattaaaaatgcatatactttaataaatgtacattgtattgtaaaaaaaaaaat

SEQ ID NO: 26749 - DNA, 2495 bp, Homo sapiens
ggggacactggatcacctagtgtttcacaagcaggtaccttctgctgtaggagagagagaactaaagttctgaaagacctgttgcttttcaccaggaagttttactgggcatctcctgagcctaggcaatagctgtagggtgacttctggagccatccccgtttccccgccccccaaaagaagcggagatttaacggggacgtgcggccagagctggggaaatgggcccgcgagccaggccggcgcttctcctcctgatgcttttgcagaccgcggtcctgcaggggcgcttgctgcagccctcaccgtctggcaccctagtcattggagtcatcagtggaattgctgtttttgtcgtcatcttgttcattggaattttgttcataatattaaggaagaggcagggttcaagaggagccatggggcactacgtcttagctgaacgtgagtgacacgcagcctgcagactcactgtgggaaggagacaaaactagagactcaaagagggagtgcatttatgagctcttcatgtttcaggagagagttgaacctaaacatagaaattgcctgacgaactccttgattttagccttctctgttcatttcctcaaaaagatttccccatttaggtttctgagttcctgcatgccggtgatccctagctgtgacctctcccctggaactgtctctcatgaacctcaagctgcatctagaggcttccttcatttcctccgtcacctcagagacatacacctatgtcatttcatttcctatttttggaagaggactccttaaatttgggggacttacatgattcattttaacatctgagaaaagctttgaaccctgggacgtggctagtcataaccttaccagatttttacacatgtatctatgcattttctggacccgttcaacttttcctttgaatcctctctctgtgttacccagtaactcatctgtcaccaagccttggggattcttccatctgattgtgatgtgagttgcacagctatgaaggctgtacactgcacgaatggaagaggcacctgtcccagaaaaagcatcatggctatctgtgggtagtatgatgggtgtttttagcaggtaggaggcaaatatcttgaaaggggttgtgaagaggtgttttttctaattggcatgaaggtgtcatacagatttgcaaagtttaatggtgccttcatttgggatgctactctagtattccagacctgaagaatcacaataattttctacctggtctctccttgttctgataatgaaaattatgataaggatgataaaagcacttacttcgtgtccgactcttctgagcacctacttacatgcattactgcatgcacttcttacaataattctatgagataggtactattatccccatttcttttttaaatgaagaaagtgaagtaggccgggcacggtggctcacgcctgtaatcccagcgctttgggaggccaaagcgggtggatcacgaggtcaggagatcgagaccatcctggctaacatggtgaaaccccatctctaataaaaatacaaaaaattagctgggcgtggtggcagacgcctgtagtcccagctactcggaaggctgaggcaggagaatggcatgaacccaggaggcagagcttgcagtgagccgagtttgcgccactgcactccagcctaggtgacagagtgagactccatctcaaaaaaataaaaataaaaataaaaaaatgaaaaaaaaaagaaagtgaagtatagagtatctcatagtttgtcagtgatagaaacaggtttcaaactcagtcaatctgaccgtttgatacatctcagacaccactacattcagtagtttagatgcctagaataaatagagaaggaaggagatggctcttctcttgtctcattgtgtttcttctgagtgagcttgaatcacatgaaggggaacagcagaaaacaaccaactgatcctcagctgtcatgtttcctttaaaagtccctgaaggaaggtcctggaatgtgactcccttgctcctctgttgctctctttggcattcatttctttggaccctacgcaaggactgtaattggtggggacagctagtggccctgctgggcttcacacacggtgtcctccctaggccagtgcctctggagtcagaactctggtggtatttccctcaatgaagtggagtaagctctctcattttgagatggtataatggaagccaccaagtggcttagaggatgcccaggtccttccatggagccactggggttccggtgcacattaaaaaaaaaatctaaccaggacattcaggaattgctagattctgggaaatcagttcaccatgttcaaaagagtctttttttttttttttgagactctattgcccaggcagagcttgcagtgagccgagtttgcgccactgcactccagcctaggtgacggagtgagactccatctcaaaaaaatttattaaaaata

SEQ ID NO: 26750 - DNA, 860 bp, Homo sapiens
tggaatcaactttagtgttcatcaatgggtgaatgtataaagaaaatgtgatgcacacacacacacacacacacatatacacacaatggaatactatgtacccataaaaaagaaatcatctcatttgcagcaacatgtatggaactgggggttattatcttaactgaaataatccaggcacagaaaaagacaaatgttattttttctcatttatatgtgggagctaaaatatttgattacatgtagatagagagtagaatgatagataacagagactgggaagagtgagtgggaggaaagtgtgaatgaaaagaagtggcttaaagggtacaaacatacagtaagatagaataaataaattcaatgatttatagaagagcagagtgactatacttaacaaaaatgtattgtactcaggagacggacaccctaaataacctgacttgatcactatgcattatgtatatgtaacaaaacttctcatgtgggtcattaatgtggtttgaatatttgtcacctccaaatcttatgttgaaatgtgattttcaatgttggagatggagcctagcggaaggtgtttgggttatgggggcagatccttcacgaatggcttgctgctctccccacagtaatgagtgagttcttgctctgtgaggtcatgtgagatcttgtttgaaaaggagcctgacacatctctctctctcttattgtctcaccatgtgatacgcctgctcctccttcaccttctgttatgattgtaagcttctgaggcctcaccagaagatgaacaaatgttggtgccatgattgtacagcctgaagaaccatgagccaaaataaacgtcttttctttataaataa

SEQ ID NO: 26751 - DNA, 480 bp, Homo sapiens
caagcatgcttttgctgatggtgcttgggatctttcatttctctgtgctctttgcaagtttcctgcccccaatcctcaagccccctctggcagacccctacaggtacctgggaattcctggagattaataccctgtctccctagttcccatggaaaatggagttccaaaaattcccacgaaacttttttccattgtctttttgcttttgtttgatatcgagaggaaaggaaaaagttctgtttgtccattttgttacagataaggaaagtggtttcacaaaggttaagcaacttgatcagtgttacccagcaaagagcagaatgattttcaacattcagtttaaaagtcggcggggggcagtggctcacacctgtaatatcagcaacttgggaggccaaggtggtacggtcgcttgaagccaaggagttcaagaccagcctggtcaacatagcaaaaccttgtctttacaaaaagtaaaa

SEQ ID NO: 26752 - DNA, 412 bp, Homo sapiens
cagcctgggtgacaaagaacctatccccccaaaaaagaaaatatgatcgtttgaccaaaggccttttcgaagtgcctgtaaagtgaaaattagtcacagcactaagattacttggcttttttcaccattctcaagtaggcagtggagtttccaagtaacaagactggtataaaaagtgcacaagcacataagaagctagatatctttgaagagatctatgttggttttgatttctaatgtaaatatttgtaattcacccaacaaaactcacctagactagtatattaatgtatttatgaactaaaataaagatgacagtttttaaaaaaaaatttggaggagtgggagagcaggtgtcccttgttggctttgtgggtagctcagtggtttgcacctgtgcagcagtggtttc

SEQ ID NO: 26753 - DNA, 370 bp, Homo sapiens
tgtttctagtttttattgttagatattccctttcttcttaaaggcctcaatgggttcagaaacgtcccttcatagattctacaaaaagagagttttcaacctgctgaatcaaaacacaggtttcattctgtgagaagaatccacataacacaaagcattttcacagtgcacttgtttctaatttttatcactggatattcagtatttctttagaggcatcaaagggctcagaaatatccctttgtagattctccaaaaagagtgtttccaacctgctgaatcaaaacacaagttccattttagtgcaatgaatccgcacatcacaaagcattttcatacgtagcttgcttctactttttatcgctggata

SEQ ID NO: 26754 - DNA, 470 bp, Homo sapiens
ccgagattgtgccactgcacctccgcctgggtgatagaacaagactttgtctaaaaaaaaaaaaagacaacattgtcagattggattgaacacacatatatacacatttacacaagacccaatacatgctctctacataaaacccaccttaatgtaattacatagatagattaaaagtaaaatgatagaaaaggttaaaccatataaatactgatcaaaagacagctggagtggctatattaatatcagacaaagtagccttcaaaacaagcaatattaccagggataaagagagatattacatattaataaaaaggttaaggctaggtccagtggctcatgcctgtaattccaacactttgggaggttgaagtggttggatctattgagcccaggagttcaagaccgacctggccaacatggtgaaatcctgtctctactaaaaatacaaaaattagccaggtgtagtg

SEQ ID NO: 26755 - DNA, 245 bp, Homo sapiens
atagatgtctgtttactccactagagcaaagttctctatagtcagcaagtaaatcccttatcactcttttaaaaacattagtgtttaggctgggcgcggtggctcactcctgtaatcccagcactggccagcctggcgaaaccctgtctctactaaaaatacaaaaattggccaggtgtggtggcacgcacctataatcccatctactcaggtggctgaagcaggagaatcacttgaacccgcga

SEQ ID NO: 26756 - DNA, 515 bp, Homo sapiens
acctggtgaaaccctgtctctaccaaatatacaaaaattaaccaggtgtggtgacacacacttgtaatcccagctaccgaggaggctgaggtgggagaatcgcttgaacctgggaggcagaggttgcagtgagacaagatcacgccactgcactccagcctgggcaacagaggggttggaagaaggggtggaggaacaaggagacggaatgtgcaggagtggggtaaacatgcctctggcctcacccggcgctggcacgcagtaggtggctcagtaaatcctggctgtgtagactgagccgtggaaaagatggttactgactccagagggagttaatttcatttccttccccaagagcagctcttgggagggtacatgaaacttggataatggggcacacatttaggctgctgaaaatggcttcgccctgctcttccatcttcagggtttcaccacgtcctggttgcgtggctgtggggtgagttaatgaggaagagcagcctgtctggggagga

SEQ ID NO: 26757 - DNA, 501 bp, Homo sapiens
tagagataaggtcctctggctggactcaaactccggggctcaagcaatcctcccacctcatcctacagagtagctgggcctataggtacatgcaaccatgcctggttctattttcttcttaaaaaggaagaaaaaaaggaactctggctaccaatactgaaaacagatttgggagaaatctgctaggagtagaggaaaaggaatggtagtagagaaagcaagggcttcaactctgaaatctttgccaattttgaactgagaaactttaaaactgagaaaacgggtatattaaagaaagatgttttaaactgggaaaagattaggtatatgaggcagactattagtcatatgatatttttctttttctttttttctagacagagtcttgctctgtcacccaggctggagtacagtggtgtgatctcggctcactgcaacctttgcctcctggattcaagcgattctcctgcctcagtctcccgagtagctggggctacaagt

SEQ ID NO: 26758 - DNA, 380 bp, Homo sapiens
gcttacctttcccattctggggtctgcactaaggtctggaattgagagctgctatataggacctgatgttagcaggcgtgtgccccaactgttttctccagtatcctaaaagaagagaaaccccaagccagctacatggataattcttctctggccaagaaagaaaaatgctcgcatggattatgcattttcagaaggaaccgtgcattctcagaagggtgtttttcctttgccaagctctgtgctgggtttttcctgtgctgggctcagacagtgtttggcacagagtagtcattcatttcacaagtatgtattgagcacgtgtgatgtattgttctaggtgttacttaaatggacaaaagagtaaaataaaaccatag

SEQ ID NO: 26759 - DNA, 1287 bp, Homo sapiens
atggactctctgtggggcccaggagccgggagtcacccctttggggtccacaacacccggctgtccccagacttgtgtccagggaagatagtgttgagggccctcaaggagagcggggcagggatgcctgagcaggacaaggaccctagagtccaagagaatcctggtgatcagagaagggtcccggaggtcaccggggatgcaccgtctgcatttcggcccctgcgggacaatggaggcctctctccctttgtgcccgggcccgggcctctgcagacagacctccatgcccagaggtcagaaatcagatataaccagacatcccagacctcctggacgagctcctgcaccaaccgaaatgccatctccagctcctacagctccacgggaggcttgccggggctaaagcggaggagggggccagcctcatcccactgccagctgaccctcagttcctcaaagacagtgagtgaggacaggcctcaggctgtctcttcaggtcacacccagtgtgaaaaggcagcagatatagcaccagggcagacactcaccctcaggaatgactcctccacatccgaggcctctaggcccagtacacacaagtttcccctgctgccatgcaggcgaggggagcctttgatgctgccacctcccttagagctggggtaccgggtcactgttgaagaccttgaccgggagaaggaggcggcattccagcgcatcaacagtgcactgcaagttgaggacaaggccatctcggactgcagaccctcacggccttcccacactttgtcctcacttgcaacaggggcttctggtctgcctgccgtttctaaagcacccagtatggatgcacagcaggagacacacaagtcccaagactgcctgggcctactggcccccttagcatctgctgcagaggtcccctctacagctcccatgtctgggaagaagcacagaccaccaggccccctgttctcctcctcagatccccttcctgccacctcttcccattcccaggactcagcccaggtcacctcgctgattcctgcccccttcccagctgcaagcatggatgcgggcatgagaagaacaaggcgtggcacttctgctcctgcagctgccgcagcagcccctcccccctccgcattgaaccccacgttggggtcactactggagtggatggaggcccttcacatttctgggcctcagccacagctgcagcaggtgcccagaggtcagaaccagagatcgcagacctcccggaccagctcgtgccccaaatga

SEQ ID NO: 26760 - DNA, 108 bp, Homo sapiens
tttcctggagttttaaacgtgtcatttctagtgtaaggaacacagcttataaacttctggaactattaggtgatataaggtagtaattaccctataactataggtatt

SEQ ID NO: 26761 - DNA, 901 bp, Homo sapiens
tcacccaggaacagcctggttctgtcacgctgtgcagccctctcttgctctcctcctccagccttccccacggtggtggatgcaggccccttgacaccttgcgacgcatgacatggagagctctttttgtgttaccatgttttgaagcattcattccagcttgactcttcagttactgtgtgaacaaacattggccatcttctcagtgagttgctgttgtgttttcctttcagcaagtgaacaatggcctcaccctcagtgaccttcctctgcacatgctgaacaacatcctataccggttctcagacggatgggacatcatcaccttaggccaggtgacccccacgttgtatatgcttagtgaagacagacagctgtggaagaagctttgtcagtaccattttgctgaaaagcagttttgtagacatttgatcctttcagaaaaaggtcatattgaatggaagttgatgtactttgcacttcagaaacattacccagcgaaggagcagtacggagacacactgcatttctgtcggcactgcagcattctcttttggaaggactcaggacacccctgcacggcggccgaccctgacagctgcttcacgcctgtgtctccgcagcacttcatcgacctcttcaagttttaagggctgcccctgccatccctattggagattgtgaatcctgctgtctgtgcagggctcatagtgagtgttctgtgaggtgggtggagactcctcggaagcccctgcttccagaaagcctgggaagaactgcccttctgcaaaggggggactgcatggttgcattttcatcactgaaagtcagaggccaaggaaatcatttctacttctttaaaaactccttctaagcatattaaaatgtgaaattttgcgta

SEQ ID NO: 26762 - DNA, 1594 bp, Homo sapiens
gacggaggggcagtgcctactacgcaggcgcacgctgcgggcgacaggaccaggcagcaacattgccacgcggatccgcgccggccaatcagcatggccaggggcggggcttccctgaggcgcgccgggaggcggcggcccacttccggcaataaccgcctggtcgccgtcaggtgcgggcccaggtggccggcgcgcccgttgggcactgggggacgcgggcgcgtcaggtgaagactgggggccgcaggcgcgctaggagaactatgccatttttgggtcaggactggagatctcctggatggagttggattaagacagaagatggctggaagagatgtgaatcttgtagtcagaaacttgaaagagagaataaccgttgtaacatcagtcacagcattatcttaaatagtgaagatggagaaatattcaataatgaagagcatgaatatgcatcgaaaaaaaggaaaaaggaccattttagaaatgacacaaatactcaaagtttttatcgtgaaaaatggatctatgtccataaagaaagcacaaaggaaaggcatggctattgcaccttgggagaagcctttaatcggttagacttctcaagtgcaattcaagatatccgaaggttcaattatgtggtcaaactgttgcagctaattgcaaaatcccagttaacttcattgagtggcgtggcacagaagaattacttcaacattttggataaaatcgttcaaaaggttcttgatgaccaccacaatcctcgcttaatcaaagatcttctgcaagacctaagctctaccctctgcattcttattagaggagtagggaagtctgtattagtgggaaacatcaatatttggatttgccgattagaaactattctcgcctggcaacaacagctacaggatcttcagatgactaagcaagtgaacaatggcctcaccctcagtgaccttcctctgcacatgctgaacaacatcctataccggttctcagacggatgggacatcatcaccttaggccaggtgacccccacgttgtatatgcttagtgaagacagacagctgtggaagaagctttgtcagtaccattttgctgaaaagcagttttgtagacatttgatcctttcagaaaaaggtcatattgaatggaagttgatgtactttgcacttcagaaacattacccagcgaaggagcagtacggagacacactgcatttctgtcggcactgcagcattctcttttggaaggactcaggacacccctgcacggcggccgaccctgacagctgcttcacgcctgtgtctccgcagcacttcatcgacctcttcaagttttaagggctgcccctgccatccctattggagattgtgaatcctgctgtctgtgcagggctcatagtgagtgttctgtgaggtgggtggagactcctcggaagcccctgcttccagaaagcctgggaagaactgcccttctgcaaaggggggactgcatggttgcattttcatcactgaaagtcagaggccaaggaaatcatttctacttctttaaaaactccttctaagcatattaaaatgtgaaattttgcgta

SEQ ID NO: 26763 - DNA, 1592 bp, Homo sapiens
agcggagtgtgagcgcgcagtgatgccctagagtgcagtcatcccgggcttggcgcccagcgggtggaaatacggccgcagggtggaaatgcggcggcggggctgcccaggctcctgtgggacccgcgcggcgcgggcacgcacattctcagggacgcgcgtcctcaggccacgagaacacctgaaggccccggccagcgtcctcccgtgaagacccggaccggcgtcgtcacccgccgcgcaggcctaaatctcaggagaactatgccatttttgggtcaggactggagatctcctggatggagttggattaagacagaagatggctggaagagatgtgaatcttgtagtcagaaacttgaaagagagaataaccgttgtaacatcagtcacagcattatcttaaatagtgaagatggagaaatattcaataatgaagagcatgaatatgcatcgaaaaaaaggaaaaaggaccattttagaaatgacacaaatactcaaagtttttatcgtgaaaaatggatctatgtccataaagaaagcacaaaggaaaggcatggctattgcaccttgggagaagcctttaatcggttagacttctcaagtgcaattcaagatatccgaaggttcaattatgtggtcaaactgttgcagctaattgcaaaatcccagttaacttcattgagtggcgtggcacagaagaattacttcaacattttggataaaatcgttcaaaaggttcttgatgaccaccacaatcctcgcttaatcaaagatcttctgcaagacctaagctctaccctctgcattcttattagaggagtagggaagtctgtattagtgggaaacatcaatatttggatttgccgattagaaactattctcgcctggcaacaacagctacaggatcttcagatgactaagcaagtgaacaatggcctcaccctcagtgaccttcctctgcacatgctgaacaacatcctataccggttctcagacggatgggacatcatcaccttaggccaggtgacccccacgttgtatatgcttagtgaagacagacagctgtggaagaagctttgtcagtaccattttgctgaaaagcagttttgtagacatttgatcctttcagaaaaaggtcatattgaatggaagttgatgtactttgcacttcagaaacattacccagcgaaggagcagtacggagacacactgcatttctgtcggcactgcagcattctcttttggaaggactcaggacacccctgcacggcggccgaccctgacagctgcttcacgcctgtgtctccgcagcacttcatcgacctcttcaagttttaagggctgcccctgccatccctattggagattgtgaatcctgctgtctgtgcagggctcatagtgagtgttctgtgaggtgggtggagactcctcggaagcccctgcttccagaaagcctgggaagaactgcccttctgcaaaggggggactgcatggttgcattttcatcactgaaagtcagaggccaaggaaatcatttctacttctttaaaaactccttctaagcatattaaaatgtgaaattttgcgta

SEQ ID NO: 26764 - DNA, 2211 bp, Homo sapiens
gcattgctataattttactatactctcatctaaatctaaaatcagtcttcaaaataaaaacaaattgtcctttgccaaaaatttttttaatcgcacaattaattgacattaactgccaattctttttggctaattgactaattttaacttctgtgttgcttttccagaggcatggctattgcaccttgggagaagcctttaatcggttagacttctcaagtgcaattcaagatatccgaaggttcaattatgtggtcaaactgttgcagctaattgcaaaatcccagttaacttcattgagtggcgtggcacagaagaattacttcaacattttggataaaatcgttcaaaaggttcttgatgaccaccacaatcctcgcttaatcaaagatcttctgcaagacctaagctctaccctctgcattcttattagaggagtagggaagtctgtattagtgggaaacatcaatatttggatttgccgattagaaactattctcgcctggcaacaacagctacaggatcttcagatgactaagcaagtgaacaatggcctcaccctcagtgaccttcctctgcacatgctgaacaacatcctataccggttctcagacggatgggacatcatcaccttaggccaggtgacccccacgttgtatatgcttagtgaagacagacagctgtggaagaagctttgtcagtaccattttgctgaaaagcagttttgtagacatttgatcctttcagaaaaaggtcatattgaatggaagttgatgtactttgcacttcagaaacattacccagcgaaggagcagtacggagacacactgcatttctgtcggcactgcagcattctcttttggaaggactcaggacacccctgcacggcggccgaccctgacagctgcttcacgcctgtgtctccgcagcacttcatcgacctcttcaagttttaagggctgcccctgccatccctattggagattgtgaatcctgctgtctgtgcagggctcatagtgagtgttctgtgaggtgggtggagactcctcggaagcccctgcttccagaaagcctgggaagaactgcccttctgcaaaggggggactgcatggttgcattttcatcactgaaagtcagaggccaaggaaatcatttctacttctttaaaaactccttctaagcatattaaaatgtgaaattttgcgtactctctctctctatatatatagttcaaaaatactttaggtggtcagctccacattctttgttgacgtgacactaacggccaataatatgcttcttaattatcaaattatagtttcccaattgggaaactaattgggggtgggttacaaaacatttgatccttgtaaatacattgtacagaatatttattttttctcaaaatgcattttaactactacattggctgtgcccaaatgagtcctctttgaatagaaagtgaacccagggcaatgacagccattcttgtcttagggattatggatcggggtatgaattgtgcacacgcagcccaacaacgggcagtggtctctgtgctcctaggcatccagcacaggttctggcagggcacccctgctggggttgggggctggtctgtgcataatcctggactgtgatgggaacagcccagtgcagttctaaacttcaattgtgttgaaactactttaatagacaaagtaataaatcatgtttatctattgatttaaacttcatcagttttgcatcctactgagaaatgttagtgattttgatacttaaatccttaaaagattgcttcgtttttaaaataacgcatgtccattttagaaaattagaaaatcagtcccaccacccaaagattattgtgcatgctgaaaagagtatgaaaaatcccctcagcaggcataggatagaaacgtattgttgtatatttccatttttgaatagggtcaaggagcccaagcaaatcatttctactttttcctttaagcataataataaaagtatacttttatggcgttataaataggactaaaaaaagattctggatttttcagccccacttctgtgaactgacacaaatggccaagaatgcatttatttgtcaaattatagtttctcctgaggcgatgcaaatacctggggcctctgcgaatatatgttagtttttcataagaccataaatgtcccgcatacccgttacttcac

SEQ ID NO: 26765 - DNA, 1621 bp, Homo sapiens
gacggaggggcagtgcctactacgcaggcgcacgctgcgggcgacaggaccaggcagcaacattgccacgcggatccgcgccggccaatcagcatggccaggggcggggcttccctgaggcgcgccgggaggcggcggcccacttccggcaataaccgcctggtcgccgtcaggtgcgggcccaggtggccggcgcgcccgttgggcactgggggacgcgggcgcgtcaggtgaagactgggggccgcaggcgcgctaggagaactatgccatttttgggtcaggactggagatctcctggatggagttggattaagacagaagatggctggaagagatgtgaatcttgtagtcagaaacttgaaagagagaataaccgttgtaacatcagtcacagcattatcttaaatagtgaagatggagaaatattcaataatgaagagcatgaatatgcatcgaaaaaaaggaaaaaggaccattttagaaatgacacaaatactcaaagtttttatcgtgaaaaatggatctatgtccataaagaaagcacaaaggaaaggcatggctattgcaccttgggagaagcctttaatcggttagacttctcaagtgcaattcaagatatccgaaggttcaattatgtggtcaaactgttgcagctaattgcaaaatcccagttaacttcattgagtggcgtggcacagaagaattacttcaacattttggataaaatcgttcaaaaggttcttgatgaccaccacaatcctcgcttaatcaaagatcttctgcaagacctaagctctaccctctgcattcttattagaggagtagggaagtctgtattagtgggaaacatcaatatttggatttgccgattagaaactattctcgcctggcaacaacagctacaggatcttcagatgactaagcaagtgaacaatggcctcaccctcagtgaccttcctctgcacatgctgaacaacatcctataccggttctcagacggatgggacatcatcaccttaggccaggtgacccccacgttgtatatgcttagtgaagacagacagctgtggaagaagctttgtcagtaccattttgctgaaaagcagttttgtagacatttgatcctttcagaaaaaggtcatattgaatggaagttgatgtactttgcacttcagaaacattacccagcgaaggagcagtacggagacacactgcatttctgtcggcactgcagcattctcttttggaaggactaccatcttgctttactattcaaggactcaggacacccctgcacggcggccgaccctgacagctgcttcacgcctgtgtctccgcagcacttcatcgacctcttcaagttttaagggctgcccctgccatccctattggagattgtgaatcctgctgtctgtgcagggctcatagtgagtgttctgtgaggtgggtggagactcctcggaagcccctgcttccagaaagcctgggaagaactgcccttctgcaaaggggggactgcatggttgcattttcatcactgaaagtcagaggccaaggaaatcatttctacttctttaaaaactccttctaagcatattaaaatgtgaaattttgcgta

SEQ ID NO: 26766 - DNA, 2453 bp, Homo sapiens
gacggaggggcagtgcctactacgcaggcgcacgctgcgggcgacaggaccaggcagcaacattgccacgcggatccgcgccggccaatcagcatggccaggggcggggcttccctgaggcgcgccgggaggcggcggcccacttccggcaataaccgcctggtcgccgtcaggtgcgggcccaggtggccggcgcgcccgttgggcactgggggacgcgggcgcgtcaggtgaagactgggggccgcaggcgcgctaggagaactatgccatttttgggtcaggactggagatctcctggatggagttggattaagacagaagatggctggaagagatgtgaatcttgtagtcagaaacttgaaagagagaataaccgttgtaacatcagtcacagcattatcttaaatagtgaagatggagaaatattcaataatgaagagcatgaatatgcatcgaaaaaaaggaaaaaggaccattttagaaatgacacaaatactcaaagtttttatcgtgaaaaatggatctatgtccataaagaaagcacaaaggaaaggcatggctattgcaccttgggagaagcctttaatcggttagacttctcaagtgcaattcaagatatccgaaggttcaattatgtggtcaaactgttgcagctaattgcaaaatcccagttaacttcattgagtggcgtggcacagaagaattacttcaacattttggataaaatcgttcaaaaggttcttgatgaccaccacaatcctcgcttaatcaaagatcttctgcaagacctaagctctaccctctgcattcttattagaggagtagggaagtctgtattagtgggaaacatcaatatttggatttgccgattagaaactattctcgcctggcaacaacagctacaggatcttcagatgactaagcaagtgaacaatggcctcaccctcagtgaccttcctctgcacatgctgaacaacatcctataccggttctcagacggatgggacatcatcaccttaggccaggtgacccccacgttgtatatgcttagtgaagacagacagctgtggaagaagctttgtcagtaccattttgctgaaaagcagttttgtagacatttgatcctttcagaaaaaggtcatattgaatggaagttgatgtactttgcaacttcatcgacctcttcaagttttaagggctgcccctgccatccctattggagattgtgaatcctgctgtctgtgcagggctcatagtgagtgttctgtgaggtgggtggagactcctcggaagcccctgcttccagaaagcctgggaagaactgcccttctgcaaaggggggactgcatggttgcattttcatcactgaaagtcagaggccaaggaaatcatttctacttctttaaaaactccttctaagcatattaaaatgtgaaattttgcgtactctctctctctatatatatagttcaaaaatactttaggtggtcagctccacattctttgttgacgtgacactaacggccaataatatgcttcttaattatcaaattatagtttcccaattgggaaactaattgggggtgggttacaaaacatttgatccttgtaaatacattgtacagaatatttattttttctcaaaatgcattttaactactacattggctgtgcccaaatgagtcctctttgaatagaaagtgaacccagggcaatgacagccattcttgtcttagggattatggatcggggtatgaattgtgcacacgcagcccaacaacgggcagtggtctctgtgctcctaggcatccagcacaggttctggcagggcacccctgctggggttgggggctggtctgtgcataatcctggactgtgatgggaacagcccagtgcagttctaaacttcaattgtgttgaaactactttaatagacaaagtaataaatcatgtttatctattgatttaaacttcatcagttttgcatcctactgagaaatgttagtgattttgatacttaaatccttaaaagattgcttcgtttttaaaataacgcatgtccattttagaaaattagaaaatcagtcccaccacccaaagattattgtgcatgctgaaaagagtatgaaaaatcccctcagcaggcataggatagaaacgtattgttgtatatttccatttttgaatagggtcaaggagcccaagcaaatcatttctactttttcctttaagcataataataaaagtatacttttatggcgttataaataggactaaaaaaagattctggatttttcagccccacttctgtgaactgacacaaatggccaagaatgcatttatttgtcaaattatagtttctcctgaggcgatgcaaatacctggggcctctgcgaatatatgttagtttttcataagaccataaatgtcccgcatacccgttacttcac

SEQ ID NO: 26767 - DNA, 892 bp, Homo sapiens
gacggaggggcagtgcctactacgcaggcgcacgctgcgggcgacaggaccaggcagcaacattgccacgcggatccgcgccggccaatcagcatggccaggggcggggcttccctgaggcgcgccgggaggcggcggcccacttccggcaataaccgcctggtcgccgtcaggtgcgggcccaggtggccggcgcgcccgttgggcactgggggacgcgggcgcgtcaggtgaagactgggggccgcaggcgcgctaggagaactatgccatttttgggtcaggactggagatctcctggatggagttggattaagacagaagatggctggaagagatgtgaatcttgtagtcagaaacttgaaagagagaataaccgttgtaacatcagtcacagcataggcatggctattgcaccttgggagaagcctttaatcggttagacttctcaagtgcaattcaagatatccgaaggttcaattatgtggtcaaactgcaggacaaattcgagcatcttaaaatgattcaacaggaggagataaggaatctcgaggaagagaaaaaacaactggacggataaaccatagcagtagtttagcaaggactagaagcctttcctctctaagagagaaaggaatgtatgacgtgcagtccactactgagcctaccaacttgatggccaccattttttggatagcagcatctttattagaatcagattatgaatatgaatacgtcctggctctcaggcttctcaacaaactgcttatccatttgcctttgcataaatcagagagtcgagagaagattgaaaatgtccaaagcaaatcgaaatggactagtttgccaggagtccagcagctcttccttaaggggatcagcgggtaccgag

SEQ ID NO: 26768 - DNA, 460 bp, Homo sapiens
acttaaaggtagagatatgttgtcttaagactgtcttcaagtagtttgggaatttttgggttatctgatgagaacttgtttgcttttaataaccttgtactgtccaaatttagttacctgatgtttttagttattttcgtaaataatatgaatcaaacctgaatgcttagatacactctggctctttctaatcttaacttttcctttttttccctcccttcactgcattccttcctgattctttcttcatgatctcgaaggactaccatcttgctttactattcaaggtacttccctgtcttgccacacatcctgtgttcgggatgaaaacgttgcatcgtgctgcatctcatgcacgtcatcttggccactgcccggctcgattccagctctcgctgacttgagctttctcaggaccctgagcagggctgagtggccactttgatcaaacacctcagca

SEQ ID NO: 26769 - DNA, 1527 bp, Homo sapiens
cggcgggtgtggagggttcattcagggagctgcgggcgagtcgggtgggcacgggggccgcccacaggtgcaccgcgcgtcctcagccgcttcccctgcccaccttctgcgaccccttcccgcccccaccctcctgggccgtcttgcaggcccgagcttgtgtccgcctcgctgggcaaggtgtttcggggacgactcctgccggcgtttgccctccgggctcggtccttgcctcttcgccggagaactatgccatttttgggtcaggactggagatctcctggatggagttggattaagacagaagatggctggaagagatgtgaatcttgtagtcagaaacttgaaagagagaataaccgttgtaacatcagtcacagcattatcttaaatagtgaagatggagaaatattcaataatgaagagcatgaatatgcatcgaaaaaaaggaaaaaggaccattttagaaatgacacaaatactcaaaaggcatggctattgcaccttgggagaagcctttaatcggttagacttctcaagtgcaattcaagatatccgaaggttcaattatgtggtcaaactgttgcagctaattgcaaaatcccagttaacttcattgagtggcgtggcacagaagaattacttcaacattttggataaaatcgttcaaaaggttcttgatgaccaccacaatcctcgcttaatcaaagatcttctgcaagacctaagctctaccctctgcattcttattagaggagtagggaagtctgtattagtgggaaacatcaatatttggatttgccgattagaaactattctcgcctggcaacaacagctacaggatcttcagatgactaagcaagtgaacaatggcctcaccctcagtgaccttcctctgcacatgctgaacaacatcctataccggttctcagacggatgggacatcatcaccttaggccaggtgacccccacgttgtatatgcttagtgaagacagacagctgtggaagaagctttgtcagtaccattttgctgaaaagcagttttgtagacatttgatcctttcagaaaaaggtcatattgaatggaagttgatgtactttgcacttcagaaacattacccagcgaaggagcagtacggagacacactgcatttctgtcggcactgcagcattctcttttggaaggactcaggacacccctgcacggcggccgaccctgacagctgcttcacgcctgtgtctccgcagcacttcatcgacctcttcaagttttaagggctgcccctgccatccctattggagattgtgaatcctgctgtctgtgcagggctcatagtgagtgttctgtgaggtgggtggagactcctcggaagcccctgcttccagaaagcctgggaagaactgcccttctgcaaaggggggactgcatggttgcattttcatcactgaaagtcagaggccaaggaaatcatttctacttctttaaaaactccttctaagcatattaaaatgtgaaattttgcgta

SEQ ID NO: 26770 - DNA, 1207 bp, Homo sapiens
gcattgctataattttactatactctcatctaaatctaaaatcagtcttcaaaataaaaacaaattgtcctttgccaaaaatttttttaatcgcacaattaattgacattaactgccaattctttttggctaattgactaattttaacttctgtgttgcttttccagaggcatggctattgcaccttgggagaagcctttaatcggttagacttctcaagtgcaattcaagatatccgaaggttcaattatgtggtcaaactgttgcagctaattgcaaaatcccagttaacttcattgagtggcgtggcacagaagaattacttcaacattttggataaaatcgttcaaaaggttcttgatgaccaccacaatcctcgcttaatcaaagatcttctgcaagacctaagctctaccctctgcattcttattagaggagtagggaagtctgtattagtgggaaacatcaatatttggatttgccgattagaaactattctcgcctggcaacaacagctacaggatcttcagatgactaagcaagtgaacaatggcctcaccctcagtgaccttcctctgcacatgctgaacaacatcctataccggttctcagacggatgggacatcatcaccttaggccaggtgacccccacgttgtatatgcttagtgaagacagacagctgtggaagaagctttgtcagtaccattttgctgaaaagcagttttgtagacatttgatcctttcagaaaaaggtcatattgaatggaagttgatgtactttgcacttcagaaacattacccagcgaaggagcagtacggagacacactgcatttctgtcggcactgcagcattctcttttggaaggactcaggacacccctgcacggcggccgaccctgacagctgcttcacgcctgtgtctccgcagcacttcatcgacctcttcaagttttaagggctgcccctgccatccctattggagattgtgaatcctgctgtctgtgcagggctcatagtgagtgttctgtgaggtgggtggagactcctcggaagcccctgcttccagaaagcctgggaagaactgcccttctgcaaaggggggactgcatggttgcattttcatcactgaaagtcagaggccaaggaaatcatttctacttctttaaaaactccttctaagcatattaaaatgtgaaattttgcgta

SEQ ID NO: 26771 - DNA, 1542 bp, Homo sapiens
agcggagtgtgagcgcgcagtgatgccctagagtgcagtcatcccgggcttggcgcccagcgggtggaaatacggccgcagggtggaaatgcggcggcggggctgcccaggctcctgtgggacccgcgcggcgcgggcacgcacattctcagggacgcgcgtcctcaggccacgagaacacctgaaggccccggccagcgtcctcccgtgaagacccggaccggcgtcgtcacccgccgcgcaggcctaaatctcaggagaactatgccatttttgggtcaggactggagatctcctggatggagttggattaagacagaagatggctggaagagatgtgaatcttgtagtcagaaacttgaaagagagaataaccgttgtaacatcagtcacagcattatcttaaatagtgaagatggagaaatattcaataatgaagagcatgaatatgcatcgaaaaaaaggaaaaaggaccattttagaaatgacacaaatactcaaaaggcatggctattgcaccttgggagaagcctttaatcggttagacttctcaagtgcaattcaagatatccgaaggttcaattatgtggtcaaactgttgcagctaattgcaaaatcccagttaacttcattgagtggcgtggcacagaagaattacttcaacattttggataaaatcgttcaaaaggttcttgatgaccaccacaatcctcgcttaatcaaagatcttctgcaagacctaagctctaccctctgcattcttattagaggagtagggaagtctgtattagtgggaaacatcaatatttggatttgccgattagaaactattctcgcctggcaacaacagctacaggatcttcagatgactaagcaagtgaacaatggcctcaccctcagtgaccttcctctgcacatgctgaacaacatcctataccggttctcagacggatgggacatcatcaccttaggccaggtgacccccacgttgtatatgcttagtgaagacagacagctgtggaagaagctttgtcagtaccattttgctgaaaagcagttttgtagacatttgatcctttcagaaaaaggtcatattgaatggaagttgatgtactttgcacttcagaaacattacccagcgaaggagcagtacggagacacactgcatttctgtcggcactgcagcattctcttttggaaggactcaggacacccctgcacggcggccgaccctgacagctgcttcacgcctgtgtctccgcagcacttcatcgacctcttcaagttttaagggctgcccctgccatccctattggagattgtgaatcctgctgtctgtgcagggctcatagtgagtgttctgtgaggtgggtggagactcctcggaagcccctgcttccagaaagcctgggaagaactgcccttctgcaaaggggggactgcatggttgcattttcatcactgaaagtcagaggccaaggaaatcatttctacttctttaaaaactccttctaagcatattaaaatgtgaaattttgcgta

SEQ ID NO: 26772 - DNA, 2625 bp, Homo sapiens
gacggaggggcagtgcctactacgcaggcgcacgctgcgggcgacaggaccaggcagcaacattgccacgcggatccgcgccggccaatcagcatggccaggggcggggcttccctgaggcgcgccgggaggcggcggcccacttccggcaataaccgcctggtcgccgtcaggtgcgggcccaggtggccggcgcgcccgttgggcactgggggacgcgggcgcgtcaggtgaagactgggggccgcaggcgcgctaggagaactatgccatttttgggtcaggactggagatctcctggatggagttggattaagacagaagatggctggaagagatgtgaatcttgtagtcagaaacttgaaagagagaataaccgttgtaacatcagtcacagcattatcttaaatagtgaagatggagaaatattcaataatgaagagcatgaatatgcatcgaaaaaaaggaaaaaggaccattttagaaatgacacaaatactcaaagtttttatcgtgaaaaatggatctatgtccataaagaaagcacaaaggaaaggcatggctattgcaccttgggagaagcctttaatcggttagacttctcaagtgcaattcaagatatccgaaggttcaattatgtggtcaaactgttgcagctaattgcaaaatcccagttaacttcattgagtggcgtggcacagaagaattacttcaacattttggataaaatcgttcaaaaggttcttgatgaccaccacaatcctcgcttaatcaaagatcttctgcaagacctaagctctaccctctgcattcttattagaggagtagggaagtctgtattagtgggaaacatcaatatttggatttgccgattagaaactattctcgcctggcaacaacagctacaggatcttcagatgactaagcaagtgaacaatggcctcaccctcagtgaccttcctctgcacatgctgaacaacatcctataccggttctcagacggatgggacatcatcaccttaggccaggtgacccccacgttgtatatgcttagtgaagacagacagctgtggaagaagctttgtcagtaccattttgctgaaaagcagttttgtagacatttgatcctttcagaaaaaggtcatattgaatggaagttgatgtactttgcacttcagaaacattacccagcgaaggagcagtacggagacacactgcatttctgtcggcactgcagcattctcttttggaaggactaccatcttgctttactattcaaggactcaggacacccctgcacggcggccgaccctgacagctgcttcacgcctgtgtctccgcagcacttcatcgacctcttcaagttttaagggctgcccctgccatccctattggagattgtgaatcctgctgtctgtgcagggctcatagtgagtgttctgtgaggtgggtggagactcctcggaagcccctgcttccagaaagcctgggaagaactgcccttctgcaaaggggggactgcatggttgcattttcatcactgaaagtcagaggccaaggaaatcatttctacttctttaaaaactccttctaagcatattaaaatgtgaaattttgcgtactctctctctctatatatatagttcaaaaatactttaggtggtcagctccacattctttgttgacgtgacactaacggccaataatatgcttcttaattatcaaattatagtttcccaattgggaaactaattgggggtgggttacaaaacatttgatccttgtaaatacattgtacagaatatttattttttctcaaaatgcattttaactactacattggctgtgcccaaatgagtcctctttgaatagaaagtgaacccagggcaatgacagccattcttgtcttagggattatggatcggggtatgaattgtgcacacgcagcccaacaacgggcagtggtctctgtgctcctaggcatccagcacaggttctggcagggcacccctgctggggttgggggctggtctgtgcataatcctggactgtgatgggaacagcccagtgcagttctaaacttcaattgtgttgaaactactttaatagacaaagtaataaatcatgtttatctattgatttaaacttcatcagttttgcatcctactgagaaatgttagtgattttgatacttaaatccttaaaagattgcttcgtttttaaaataacgcatgtccattttagaaaattagaaaatcagtcccaccacccaaagattattgtgcatgctgaaaagagtatgaaaaatcccctcagcaggcataggatagaaacgtattgttgtatatttccatttttgaatagggtcaaggagcccaagcaaatcatttctactttttcctttaagcataataataaaagtatacttttatggcgttataaataggactaaaaaaagattctggatttttcagccccacttctgtgaactgacacaaatggccaagaatgcatttatttgtcaaattatagtttctcctgaggcgatgcaaatacctggggcctctgcgaatatatgttagtttttcataagaccataaatgtcccgcatacccgttacttcac

SEQ ID NO: 26773 - DNA, 1540 bp, Homo sapiens
gacggaggggcagtgcctactacgcaggcgcacgctgcgggcgacaggaccaggcagcaacattgccacgcggatccgcgccggccaatcagcatggccaggggcggggcttccctgaggcgcgccgggaggcggcggcccacttccggcaataaccgcctggtcgccgtcaggtgcgggcccaggtggccggcgcgcccgttgggcactgggggacgcgggcgcgtcaggtgaagactgggggccgcaggcgcgctaggagaactatgccatttttgggtcaggactggagatctcctggatggagttggattaagacagaagatggctggaagagatgtgaatcttgtagtcagaaacttgaaagagagaataaccgttgtaacatcagtcacagcattatcttaaatagtgaagatggagaaatattcaataatgaagagcatgaatatgcatcgaaaaaaaggaaaaaggaccattttagaaatgacacaaatactcaaagtttttatcgtgaaaaatggatctatgtccataaagaaagcacaaaggaaaggcatggctattgcaccttgggagaagcctttaatcggttagacttctcaagtgcaattcaagatatccgaaggttcaattatgtggtcaaactgttgcagctaattgcaaaatcccagttaacttcattgagtggcgtggcacagaagaattacttcaacattttggataaaatcgttcaaaaggttcttgatgaccaccacaatcctcgcttaatcaaagatcttctgcaagacctaagctctaccctctgcattcttattagaggagtagggaagtctgtattagtgggaaacatcaatatttggatttgccgattagaaactattctcgcctggcaacaacagctacaggatcttcagatgactaagcaagtgaacaatggcctcaccctcagtgaccttcctctgcacatgctgaacaacatcctataccggttctcagacggatgggacatcatcaccttaggccaggtgacccccacgttgtatatgcttagtgaagacagacagctgtggaagaagctttgtcagtaccattttgctgaaaagcagttttgtagacatttgatcctttcagaaacgaaggagcagtacggagacacactgcatttctgtcggcactgcagcattctcttttggaaggactcaggacacccctgcacggcggccgaccctgacagctgcttcacgcctgtgtctccgcagcacttcatcgacctcttcaagttttaagggctgcccctgccatccctattggagattgtgaatcctgctgtctgtgcagggctcatagtgagtgttctgtgaggtgggtggagactcctcggaagcccctgcttccagaaagcctgggaagaactgcccttctgcaaaggggggactgcatggttgcattttcatcactgaaagtcagaggccaaggaaatcatttctacttctttaaaaactccttctaagcatattaaaatgtgaaattttgcgta

SEQ ID NO: 26774 - DNA, 1734 bp, Homo sapiens
gacggaggggcagtgcctactacgcaggcgcacgctgcgggcgacaggaccaggcagcaacattgccacgcggatccgcgccggccaatcagcatggccaggggcggggcttccctgaggcgcgccgggaggcggcggcccacttccggcaataaccgcctggtcgccgtcaggtgcgggcccaggtggccggcgcgcccgttgggcactgggggacgcgggcgcgtcaggtgaagactgggggccgcaggcgcgctaggagaactatgccatttttgggtcaggactggagatctcctggatggagttggattaagacagaagatggctggaagagatgtgaatcttgtagtcagaaacttgaaagagagaataaccgttgtaacatcagtcacagcattatcttaaatagtgaagatggagaaatattcaataatgaagagcatgaatatgcatcgaaaaaaaggaaaaaggaccattttagaaatgacacaaatactcaaagtttttatcgtgaaaaatggatctatgtccataaagaaagcacaaaggaaaggcatggctattgcaccttgggagaagcctttaatcggttagacttctcaagtgcaattcaagatatccgaaggttcaattatgtggtcaaactgttgcagctaattgcaaaatcccagttaacttcattgagtggcgtggcacagaagaattacttcaacattttggataaaatcgttcaaaaggttcttgatgaccaccacaatcctcgcttaatcaaagatcttctgcaagacctaagctctaccctctgcattcttattagaggagtagggaagtctgtattagtgggaaacatcaatatttggatttgccgattagaaactattctcgcctggcaacaacagctacaggatcttcagatgactaagcaagtgaacaatggcctcaccctcagtgaccttcctctgcacatgctgaacaacatcctataccggttctcagacggatgggacatcatcaccttaggccaggtgacccccacgttgtatatgcttagtgaagacagacagctgtggaagaagctttgtcagtaccattttgctgaaaagcagttttgtagacatttgatcctttcagaaaaaggtcatattgaatggaagttgatgtactttgcacttcagaaacattacccagcgaaggagcagtacggagacacactgcatttctgtcggcactgcagcattctcttttggaaggactaccatcttgctttactattcaaggtacttccctgtcttgccacacatcctgtgttcgggatgaaaacgttgcatcgtgctgcatctcatgcacgtcatcttggccactgcccggctcgattccagctctcgctgacttgagctttctcaggaccctgagcagggctgagtggccactttgatcaaacacctcagcaaggacgagagtgttgatgaaatattttgcagaacaacacctgagtgctgagggaggctgctagatgtgcgcataaacacttcaccacacagcacctggtttggcagcactgccagggcatgccatggagagatccagcactgaccccagagcctctggtcccgtttacctgcgttcctcctaagagtctgccagtcttcatccacaaaattaatttttctgtcgtcacttctcatattaaatataattctggatccttaggtatgtgagcatggccagctc

SEQ ID NO: 26775 - DNA, 399 bp, Homo sapiens
tatttaattccccaccagattctaaattctacaaggacaaggacttggccttatcctttcatgccatcacccaatgcttatttcagggcttagcaaacagtatgccctcagtaaatatttgctgagaaaactaactaatgaggacattttaagaaaactttctgcctgcatacagtattttctgaggaatttcaagaagatgaaagttttatttgggatcatcactgctttggacaaaattctttttagataaactcttcccatccagaccatttttagtttatttattttctctccataatttaaaccagaaaggatatttcaatagaattgtgctatagaaaaaaagtacaggcagcaaaattgtgcttatgtagtctgctctcacggaattcctcc

SEQ ID NO: 26776 - DNA, 400 bp, Homo sapiens
tttctctatgagagcacggttagttcccaaataaatcctagcctcctctcttctgttaatttcttcggaaggatttgaggtagcttttgaagtatttggtcaaagttgcaaactcctcgggaggaggccaggcatggtacctcacgcctgtaatcccagcattttgggaggctgaggcgggaggatcacctgaggtcaggaggtcaagaccagcctggtcaacatggcgaaaccctgtctctattaaaaatataaaaatgagctgagtatggtgatgcacgcctgtaatcctagctacttgggaggcttgaggcaggagaatcacttgaacccagaaggcagaggttgccgtgagatgagattgtgccactgcactccagcctgtgtgacaaaacaagac

SEQ ID NO: 26777 - DNA, 965 bp, Homo sapiens
acaaaaaggttccattttagacactttttttgatcaggcagcaggcagtctctggctgtgggaggtgggaaccagtcatatatgcatatgaccaaacagcttttctactggagaagtttagcattggtaagagaaggtgttccaagttgatgtttaaatccacccatttccattttgcttccttacctacaagaaaatttagaagttggtgcaaatggcatttccatgagtacttctcatgcatctttgcatatttcacctggggggaagcacagaggctgagcctgggaggctggatccgcgagggcgcgtcacctcgcctacttgggagtccaggcacatgcacagcgtctaaaggtctaaacagaaagatgggatgtcctgccccagcaaaaatctaatgattttctctctctgtaggagaaaacgaatacagcagggatgacttccaccagctccactttgcagctctgaggtgtattaaaaatgacctggaagaagtcatgccacgggccagaccttaacattcctttcggcttaccccaggatttcagacgaagcttcactttcctaaccagtcacaaatcagagaatttttgattccacctatgacctgtgagctcctgcttcaagatattccaccttttttaggccaaaccaatgtataacctccaagtgtcgatttacactttcgactgtaacttctgctttcctgagatttacccctgcctttaaaaacccttgcttgtaatccctcagggaggccgtgtatttattaatcatgagctgcccaattctccttgcttggtgccctgcaaataaacaccctcttttctcccactgcaaaacctcagtgtggatgtttggctttacttcacccccaggaaagcagacccaggtttgactcagcaacaacatctgtttctatttttctctgtataaatattaaaaaccataagtacatg

SEQ ID NO: 26778 - DNA, 1600 bp, Homo sapiens
gtaagatctgtgccttccgaagagggtagagtcttctggagggacattacaaataatcaggcactcccagtgctgggagctaagttctgttacagggaagagaaagaaacaatgggaataccaaggaggatatttacagagggggaaggctttgagctgaaattgaacggtgaataaaggctgagcagccatgtagagacggggttccaccgtgttagccaggatggtctcgatctcctgacctcgtcatcctcccgccttggcctcccaaagtgctgggattacaggcttgagccaccgcgccccgctctttcgtgttccaaaggctttttaaataaacttccactcctgtcctggattctgctttatggccctcagtcgaattctttcttctgaggaggcaaggactgaagttgcttctgaccagtacagattgggaaggagaaagtcacttgactcacaggccaactgctatggactgaattgtgtcttcccctcattaatatgttgaaaccctatcctccctccaatgtgatggtatttgcagatggggcttttgggaagtaatgaagtttagatgaggcatgagggctggatggatatgatcagatgagtgcccaaagaagagacaccagagagctagcttcttctttctctttccacctttacacactgagaaaaggccaagtgagcacacaccaagaaggcagccatctgcaaacccaaggagagagtcctcactagacaccctgctggtaccttgatcttggacttctagcctccagaactgtgagaaataaattcctgttgttcaagctagtattaatacctggtgttttgttatggcagcctaagtgactaagacaccaacttaatttacttagccagggtcaatcagtggtagggcccaggattctgacccagttctgcctaactccacaattcatgctttttctggatataaacatctgccttcccagtttccctgactcttagagccgtggagcagtgtgtgtcatgtgctgcacacccaggctggaacagcctgtctccaggagaaaacgaatacagcagggatgacttccaccagctccactttgcagctctgaggtgtattaaaaatgacctggaagaagtcatgccacgggccagaccttaacattcctttcggcttaccccaggatttcagacgaagcttcactttcctaaccagtcacaaatcagagaatttttgattccacctatgacctgtgagctcctgcttcaagatattccaccttttttaggccaaaccaatgtataacctccaagtgtcgatttacactttcgactgtaacttctgctttcctgagatttacccctgcctttaaaaacccttgcttgtaatccctcagggaggccgtgtatttattaatcatgagctgcccaattctccttgcttggtgccctgcaaataaacaccctcttttctcccactgcaaaacctcagtgtggatgtttggctttacttcacccccaggaaagcagacccaggtttgactcagcaacaacatctgtttctatttttctctgtataaatattaaaaaccataagtacatg

SEQ ID NO: 26779 - DNA, 977 bp, Homo sapiens
gtaagatctgtgccttccgaagagggtagagtcttctggagggacattacaaataatcaggcactcccagtgctgggagctaagttctgttacagggaagagaaagaaacaatgggaataccaaggaggatatttacagagggggaaggctttgagctgaaattgaacggtgaataaaggctgagcagccatgtagagacggggttccaccgtgttagccaggatggtctcgatctcctgacctcgtcatcctcccgccttggcctcccaaagtgctgggattacaggcttgagccaccgcgccccgctctttcgtgttccaaaggctttttaaataaacttccactcctgtcctggattctgctttatggccctcagtcgaattctttcttctgaggaggcaaggactgaagttgcttctgaccagtacaggagaaaacgaatacagcagggatgacttccaccagctccactttgcagctctgaggtgtattaaaaatgacctggaagaagtcatgccacgggccagaccttaacattcctttcggcttaccccaggatttcagacgaagcttcactttcctaaccagtcacaaatcagagaatttttgattccacctatgacctgtgagctcctgcttcaagatattccaccttttttaggccaaaccaatgtataacctccaagtgtcgatttacactttcgactgtaacttctgctttcctgagatttacccctgcctttaaaaacccttgcttgtaatccctcagggaggccgtgtatttattaatcatgagctgcccaattctccttgcttggtgccctgcaaataaacaccctcttttctcccactgcaaaacctcagtgtggatgtttggctttacttcacccccaggaaagcagacccaggtttgactcagcaacaacatctgtttctatttttctctgtataaatattaaaaaccataagtacatg

SEQ ID NO: 26780 - DNA, 1205 bp, Homo sapiens
gtaagatctgtgccttccgaagagggtagagtcttctggagggacattacaaataatcaggcactcccagtgctgggagctaagttctgttacagggaagagaaagaaacaatgggaataccaaggaggatatttacagagggggaaggctttgagctgaaattgaacggtgaataaaggctgagcagccatgtagagacggggttccaccgtgttagccaggatggtctcgatctcctgacctcgtcatcctcccgccttggcctcccaaagtgctgggattacaggcttgagccaccgcgccccgctctttcgtgttccaaaggctttttaaataaacttccactcctgtcctggattctgctttatggccctcagtcgaattctttcttctgaggaggcaaggactgaagttgcttctgaccagtacagattgggaaggagaaagtcacttgactcacaggccaactgctatggactgaattgtgtcttcccctcattaatatgttgaaaccctatcctccctccaatgtgatggtatttgcagatggggcttttgggaagtaatgaagtttagatgaggcatgagggctggatggatatgatcagatgagtgcccaaagaagagacaccagagagctagcttcttctttctctttccacctttacacactgagaaaaggccaagtgagcacacaccaagaaggcagccatctgcaaacccaaggagagagtcctcactagacaccctgctggtaccttgatcttggacttctagcctccagaactgtgagaaataaattcctgttgttcaagctagtattaatacctggtgttttgttatggcagcctaagtgactaagacaccaacttaatttacttagccagggtcaatcagtggtagggcccaggattctgacccagttctgcctaactccacaattcatgctttttctggatataaacatctgccttcccagtttccctgactcttagagccgtggagcagtgtgtgtcatgtgctgcacacccaggctggaacagcctgtctccaggagaaaacgaatacagcagggatgacttccaccagctccactttgcagctctgaggtgtattaaaaatttgtttttcagaaacctagagccccaccaaatgaatccgctggcacgtggacctcagatgggggaaactgaggactgaattc

SEQ ID NO: 26781 - DNA, 1052 bp, Homo sapiens
gtaagatctgtgccttccgaagagggtagagtcttctggagggacattacaaataatcaggcactcccagtgctgggagctaagttctgttacagggaagagaaagaaacaatgggaataccaaggaggatatttacagagggggaaggctttgagctgaaattgaacggtgaataaaggctgagcagccatgtagagacggggttccaccgtgttagccaggatggtctcgatctcctgacctcgtcatcctcccgccttggcctcccaaagtgctgggattacaggcttgagccaccgcgccccgctctttcgtgttccaaaggctttttaaataaacttccactcctgtcctggattctgctttatggccctcagtcgaattctttcttctgaggaggcaaggactgaagttgcttctgaccagtacagtttccctgactcttagagccgtggagcagtgtgtgtcatgtgctgcacacccaggctggaacagcctgtctccaggagaaaacgaatacagcagggatgacttccaccagctccactttgcagctctgaggtgtattaaaaatgacctggaagaagtcatgccacgggccagaccttaacattcctttcggcttaccccaggatttcagacgaagcttcactttcctaaccagtcacaaatcagagaatttttgattccacctatgacctgtgagctcctgcttcaagatattccaccttttttaggccaaaccaatgtataacctccaagtgtcgatttacactttcgactgtaacttctgctttcctgagatttacccctgcctttaaaaacccttgcttgtaatccctcagggaggccgtgtatttattaatcatgagctgcccaattctccttgcttggtgccctgcaaataaacaccctcttttctcccactgcaaaacctcagtgtggatgtttggctttacttcacccccaggaaagcagacccaggtttgactcagcaacaacatctgtttctatttttctctgtataaatattaaaaaccataagtacatg

SEQ ID NO: 26782 - DNA, 486 bp, Homo sapiens
cttagagtaaaaaatgctttactctattactctgctccaaaattagacaagtagctgtctttactttcattctcttctgagttcttgtacctcaattaagacattctttggccatgaaactgcgtgggcttctagtttatttttaacttttaaaaatggatataactgaaacacaagaatagaaataatctccctgttcatcacccagcatcaacagtttgtatattggcaggcctcttgatcttcataaatactgtacggacttattgtttttgttaagccatcagcttaacagtgcacttgtataaaagtgcattctgggcaaaaaactggctcaacaccattagtcattggggaattacaaattaaaatcacattgggatgctactatacacccacgttaatggctcagattaaaaagactgacagaacgaagtgttgttgaggatatggagcaattggaatgctcatactttgctggaggga

SEQ ID NO: 26783 - DNA, 298 bp, Homo sapiens
atatataaagtacctacatgtatcactgttctagtataatcagtatgttataaagcatacagagaataagggtatttgaaaagaacgaggaagaaaatgaatcatcttgtaaacttcctgactgcacacaccacagagagatcatttgtctttttcgagacataggagttagttctttttttctgattatgcttgtaatgggtccttcaggttcttgtgtatgatatctaagcaatttaaaaaattgataaccaaggcccagaagtaaacttacattcatggttaatattattgatcc

SEQ ID NO: 26784 - DNA, 457 bp, Homo sapiens
gtgggagatgattagacaatgggtgcagtttctaatagtttaacaccatctacctgggtactgttctcgtgatactgagttctcaaaagacctggttgtttaaaagtgtgtagtacggtcccccctacggcaccccgcttcctccagccatgtaagacttgccagcttcccctttgctttctgccatgattgaaagcttcctgaggccgagtgcggtggctcacgcctgtctcaacattttggaaggccgaggcgggattataggcatgagccatggtgctcggcctcaggtatttctttatagcagcacgacaacaaaactgatacaaacctagataaaagttcttaaattttcaatgtgatgaaatttgttctaaaaaccctcttaaaaaagtacaccaggatacacgttgaataaagccagctaagctatttcctgttatgcacatgtatagcc

SEQ ID NO: 26785 - DNA, 399 bp, Homo sapiens
ggtacgacgtcgaggtgtcatgggttattattttattcaatagattataatctattgttatgattctttgttttgctaccctgtatttggccagtgaaagcctctgggaaatacagggggctcttgtatgtttttgatatctcttcatcattccacgagtacctccttatatcttgtcagttatcaagatgtgaaactatttttttggtatgtaaaggctcatgaaaatgtctctttgtgtggatgtaatttctcttttaattttataacatctatatacttttggtaaatagagttttttttttattgttgccaatagccatacttcttaacattgtggctcctttggtttttacagtaatattcaaaaggcaagcactagtcagggtagcggaatct

SEQ ID NO: 26786 - DNA, 633 bp, Homo sapiens
cgtctgtaccttagtaggtcattaggatccacgtaatgggtcatggcccggacttttcttttttaatgaagagaacagaaccaggcacagtggctcacacctgtaatccatcacagcattttgggaggcccaggccggatgattgtttgaggtcaggagtttgagacccagcctggccaatatggtgaaatcccatctctacctaaaaaatacaaaaaaattagctgagtgtggtgccacatgcctgtaatcccagctacttgggaggctgagggaggagaattgcttgaacctggcaggcggaggttgcagtgagccgagatcgcaccaccgcactacagcctgggcgacagagtgagactccgtcgcaaaaaaaaagaaggaccggggtcttcgatgtggtgttcactgactttccagggagttcttctcactcactccttggagttcggaggccaaaacagaacattcagtcagggctgacatgaatttgtcataagtctcccctttgcctataacatataactagtgggaaccttgctaattaaaacaatttggccagtgacagtggctcacacctgtagtcccagttacataggaggctgaggcaggaggattgcttgaggccaggag

SEQ ID NO: 26787 - DNA, 598 bp, Homo sapiens
gaaaacatagtcactatctgagacacaaataggttagaacacaaatatgaacatttttatgggaacagacagggcacacttggatttgtatttagactcagcattaaataaatcttaataatgtagtacaaacatctcattttgctgatgagcacactgaggcttaagaaggtcaagtgactcatctaatgatacatatttaattgggtgaagagctcagactgggaagcttcacatcaaggagaagggcagggaaagggagagagagagtgaatacaagaaaaaaacagaaaggtgagtcatgggagagatgttaagctatatgttttcctttgctgtgagctgttgtaaaaggtaagcatctctttgacaatcatttggtttccaggctatctctggggacccatgtctgggactggaaatgatctttgtgggctctgatggaagtcatttttttttcctttcctgtcttaacaattgcacatacttattttattgagcctcccaagtttcctcctaaggtttccttttggaaaccaagaattaatcaaattaaatgatataacccataactttgtagcaacgtaacaaaaaaaaa

SEQ ID NO: 26788 - DNA, 329 bp, Homo sapiens
gttttagcatcggttgatgaccattgctttattcagttatttcagtgggggttccaaaatggtaatttttctaattctagcatttcttcaacattagctaacatttttctataaaaaagagctttctactctccctttccaagtattactatggattctgaaattctttcctttggaaatttaatgttttataattccttaacataattaattttgatgctcacatagtgtcccaaatttgactccctcaagccagatcctgtgttttttttttcttttttttttttttaatgaccctataaatatttgagaacttccttgctttctgg

SEQ ID NO: 26789 - DNA, 271 bp, Homo sapiens
tcccggtgggactatttttaacctctgtaaagaaaaaggccagcgatccacgtcgtgcccgctgcctcacacttactgggcagcttcctctcctggagggtcatttactgacagtgatgggtttcaggtgggcctagtttagcaggtggtttctataaagagcagagctgcatccccagggaacgagagccgggcagaggggaagccaggggagacaggcactgtccgtgttatggattttatcgagtcataaacaaggctggagaataaa

SEQ ID NO: 26790 - DNA, 359 bp, Homo sapiens
gaattgtattaactcactgctaatgttttcttttagtacttattaaacattcactaaacaaacatttctgaatgcctattatgtgccaggtactattctagacatataggatatgttgattaataccacaaatatctaccattctgtaacttacatatattaaaagacccactttataaaaataatgtagtttacttaaaatctgtgttgatatattttaatatggctgcataaccttttttacattagtattatcaaatatatcttcttttatatctttaatttcaaccttactgaaagaatatcttttatttaggtatgtattttatatacatattacgagtttatttgtttttaag

SEQ ID NO: 26791 - DNA, 607 bp, Homo sapiens
agtcgataacaggtctggggatggagttgaagaatacttaaatttcatgagtgttttcctcttttctctaaatataaaagagacttgtagtttacatgtcatgatgttaaataatagatcaaatccatgtggtcacttttgaactgttctatacttttttaaaaggtgaaataagatcgtgagtaatgaggaatactgatgtttcggtttggtgaattggaaattgtggctattaactaatatttaccaactcaccagtatctaagatgtgcccaggacttgttcctaggtatgatggcaacccacaatgcccaaaacacaaaaatctgtccttgtaaatttacttcccatgagagagaaaatactaaatcaataaagacacaatatgctgcatagtaataagtgctaaggaagaaaacagactaggagcaagacattttttggaagagttgttattcaaaataacttcacggtctggcgagagggttcatgcctataatcccaatactttgggaggccagggcaggataatcatctgagcgcaggagtttgagaccagactgggcaaaaaaagtgagacaccttcctcccaccccacatctctcca

SEQ ID NO: 26792 - DNA, 437 bp, Homo sapiens
atctcaataaaacagagcttgatccctgtcacttccttggtacaacagcctttatgcctctttacaggacagaccatgcaggaaaactgcatatgacattgttctctctgagaagcctcagtgcccaccacactcacagcctgctgtggaccatgtgccccagatacccaagccataggtagtgggaccagggataggtactcctgggaattattcttaatttggaggaagtgtaactatgtttaaacattttttttcagctgggcgcaatggctcacgtctataatcccagcactctaggagtccgaggcagggggatcactagctgggaggctgaggcaggagaatcgcttgaacggagaggtggaggttgcagtaagccaagaacgcaccattgcactccagcctgggcgacaagagtgaaactccgtctcaaa

SEQ ID NO: 26793 - DNA, 492 bp, Homo sapiens
atggcggaggacaggccgcagcagccgcagctggacatgccgctggtcctggaccagggcctgaccaggcagatgcggctacgcgtggagagcctgaagcagcgcggggagaagcgccaggatggggagaagctgctgcagccagcggagtctgtgtaccgcctcaacttcacccagcagcagcggctacagttcgagcgctggaatgtcgtgctggacaagccgggcaaggtcaccatcacaggcacctcgcagaactggacgcctgacctcaccaacctcatgacacgccagctgctggaccccactgccatcttctggcgcaaggaggactcggatgccatagattggaatgaggccgacgccctggagtttggggagcgcctgtcggacctggccaagatccgcaaggtcatgtacttcctcgtcacctttggcgagggtgtggagcccgccaacctcaaggcctccgtggtttttaaccagctctga

SEQ ID NO: 26794 - DNA, 415 bp, Homo sapiens
ttgggaccctgagcctcatttctccagggtgggcggtgtcagggctccaggtagggctgctacaggtctgagggccccaggacaccctgtcagcctgcaggtcactgggatgaagcaggcagggtggtgggcgtgtgaggactcacccaggctggctggtggcactggtccctggtgtctgggtgagggcctggggctgcaggggtcctgctgggcagagcctcatgtctgtctccccactttcctcctttccccctcctgcctcctctatcttgttaatcttttcccttccgtttctttcctgcttttttctgtctctgccatcccatgcctggctgttccacctctgtctcccctgcttctctggtgtatctgtgacctctgttctgccattgtctcccctgcctgcctctcc

SEQ ID NO: 26795 - DNA, 193 bp, Homo sapiens
gttggatgttttgctcccttgtggcacacaattggagacgtgcaactgtgccacattaaaaacaaaacactgctggcctcaaaacacacctgccacctctgacagcatccacttccctcccccttatgactgctgcctttttcaaaatgagagtgtttggaatgatttcctggcagtatccatagtggttgct

SEQ ID NO: 26796 - DNA, 879 bp, Homo sapiens
gggtctggaggcagggaaccgaaagctgattcatgctgacttcccagaactcaatcaaaaggaaaaccccaactttccatgcccaagtaacaaaaggactggatgctattccctttgcaagcctctcctaccttctctgtgtggcagatggaaaactgaaagtatttctcattggttgctttgtgcaaccatttctactactggcgccaggaggctgtgagcgggtgctgggactcggggcaagctggcagcgctctacacctggatgctcacctaaaagtcactgccctccccactccctcgtcctgactgcagtgtgcagagagtgctggcacctaacacccctcaaagcctgtctgtgcagctccacagtgctgtcctatgctgtgagcacacccctcccggagggacagtgacttgattcaacccattgtggtcatttatctactcatttcctctcctttgaatcgagaggtccttgaggtaaggatttctcttgttcattatcctatactcctaaagacttagaaatccacaggagaaccaccacacatttagaaacagaaactgggccaggtgtggtggcccattcctgtaatcctagcactttgggaggctgaggcaggaggatcacttgagcccaggagtttgagaccagcctgaacaatatagtagggccctgtctctacagaaaagaaagaaataattagctgggcatggtggcacacatctgaagtgtcagctacttgagaggccaaggtgggaggatcgcttgggtttggggggatcacttgagccagggaggtcaaggctgcagtgagccatgactgcaccactacactccagccttggcaatagagtgagatcctgtgtcaaaca

SEQ ID NO: 26797 - DNA, 340 bp, Homo sapiens
ctttgtacccctcacaggaacaccaaattgtaacaagtatctgcacacagaaaagcaccatcacaagaaccaaaaatcaggtgagcaatcacagcacctgatttcatatctctgaaaaaggtattgaggagggtccaacagacagtcttgaatcaccaacaccaaccctcccctatcccctggcaacagctgtacagcatggagagtatctgcacttgcagagtacaccaactgggggacattacattgaactcattgctcccctgtcatagtggcgagcaaagccaggctgggctcacccagcacccacacacacaggagcatttggaccagccctagc

SEQ ID NO: 26798 - DNA, 581 bp, Homo sapiens
tggccatctaaaaatctatgatagtctctccatttcaaaatccttaactctaattgcatttgcaaagtctgtcctgccaggtaagctaacaaatttataaattatctggattaggaccgcatcatctctgaagagccattattctgactaccacatcagtatgttagtttatgtcaagattgctgtaataatcaataggttctggtaccacaaatccagtagcagtcattaaggttgattgagtttattgattgctttcagctccattctgctattaatcacttttggggatataaaatgaagaccttatcacatagaggaagaggtagatgtgataggagcttgaatatgtaataagaattttttatgatatgtaaatgtgagaaatgaattaagtatgtgccatttgttctcttctttttaagacatttctttctaaaggtttagtgacagaagttgcattctattaaagatccctaagtgctgttctgctgtaggcataagctttctttcctgggtgcagcatgttaggatttaagatttctatttatctaatactctgctgtttgtcagataaaata

SEQ ID NO: 26799 - DNA, 459 bp, Homo sapiens
caaaatccccttgacgaagaaaaagaaaggcagtgagcttgaatgggaagagggcgggctttagtcacaacttctctgagcctcagctttctcatctccagaatggctactgtgatgcctatctagtagatttgttgtaagaattacacttattatgaaggctgggcatggtggctcatgcctataatcgcaacactttgtgaagccaagaagggcagatcacccggggtcaggagttcaagaccagtctggccaacatggtgaaaccccatctctactaaaaatacaaaaattagccaaaaacaaaaattagccaggcgcatggtgcccacctgtaatcccagctactcaggaggctgaggcaggagaatcgcttgaatctgggaggtggaggttgcagtgagccgaggtcacgccactgtactccagcctgggcaacaagagagaaactccacttca

SEQ ID NO: 26800 - DNA, 579 bp, Homo sapiens
tgttattctagctttataaaacataacccatttgaaaaatattcacttggacttgcttggcaagttaaggtccacttttggtgagaactgtggttaccatgtctgagtaatctatgaccccttcaaactctagtcattgatgcctgtgattgcattcactggctcttggttcaacaaggctttctcagagtggttcaaggcataagaataggtgtttccttaatgaaacacctatttgtgattaaattctctagaataaagagtgttaaacagatttctttactgcaggtcttcacagaggctttaatgtactaatatgtatctcaattttcctagaaagagtgtgcaagcttcccagacttatttgaccttagagcatcttgttggatgtggcttccatgaattatactttaggggactaatgtatttctttccttgctctctgagggcacagaaccacctgagtaaccatggttgtctccacaagttctagtgctacatcctctttagtgctgtaagggttgtaggagaactttaagaaagaggaccaacatcctctgcatggatctggattcagtg

SEQ ID NO: 26801 - DNA, 568 bp, Homo sapiens
ttagcaaggaccaggaccttaatataaacccagctccccattttcccgggtttctcatgcttccctaaactcggtcgccccctacagccccctgcccctgggttcttttccacatcccccaccactcctccatttcgcatccaagacttcatgaaaggctttcccagaaaagaaaaaatgaggagtcttgcgacttgaacagccctcccctgcccgtctgcaaatttgaattcctggatttcacaacagtgagctcttcttgtgcctaccacccggcatgagcaagacaagggggtgggtggtgggagagtggggaagtgtgggaaagaaaagtgtagacaaatgggtggaacaaagaagtttgacttaaagtttagatttgggggctagagttctggtcccagttcaactaagtgtacaagcttgataatcgtgggccttcctatcacactggcctcttccagcaaaaccctacccattctcatctctagaggccttgacttcccttatcaccctgcattataatatttgataacatgggccgggagtggtggctcatgcctgcaag

SEQ ID NO: 26802 - DNA, 231 bp, Homo sapiens
tattcaattcagatcggggttgtgtaaaatatatttttatcctgaatcaggaggagaagactccactcaggaacaaccttttccaatgctcttgggctgttttcctgaactgtgtttggtgagcacgctgatacctagaagcagacccttacgactttacagtagcatttgtggggtcattaactttgaataaatgcctaaggatgacctctttttacaattgtccttacc

SEQ ID NO: 26803 - DNA, 395 bp, Homo sapiens
tcctgatggccatcattagaataaataagtttccttctagtcctagttggctgggagtgttttttttttctttttaaatcatgaatggatgctccattttgccagaagctttttctgcatctatttagatgaccatgtggtttttcttccttattctattcatatagtggaatacattaagtgattttctaatggtaaaccaaccatgcactcctgtgataaatcctgcttagtcatagtgaattacattattttcatgcgtcactgaatcagatatgctaatatgttgtgaataatttttgcatcagtgtttgtgcaaacattgatgggatattgtatgatatttttcttttcttatcaagtttatgtcaggttttggtatcagggttgtactg

SEQ ID NO: 26804 - DNA, 469 bp, Homo sapiens
gttatgatggtaaaatctatgtttttttaacgggattattgcaaaagttgaataccagtaaacagtgtttgcattatagtaatcaggtaagtattgttatctttaggagcactgggcatgctggaagtattcttccttctctcagatcttaatgccatagccactttgacacttggagaataatcctgagatttagttcaaaaagattcttctgcttcatactcatcaattgctaaattcacacttagtttgctacagatatgaatcatatctgtcttatatattaggttggggcaaaagtaattgccattacttttagtttgcagttaaaagtaatggcaaaaacctgccaggcacagtggctgacacctgtaatcccagcactttggaggccaaggtgggtgaatcacatcacaaggtcaggagttcgagaccagcttggccaacatagtgaaaccccgtctctact

SEQ ID NO: 26805 - DNA, 320 bp, Homo sapiens
ccatgcaaagtgtagtcaagattttgcattcttggcatacaagcaagaacgtgtaggggactgggtgcagtgtctcatggccataatcccggcaatttgggaggctgaggcaggtggatcacttgaggtcaggagcttgagactagcctggtcaatacagtgaaactccatctctacaaaaattaggccaggtgtggtggctcatgcctgtaatcccagtactctgggagggtgaggtgggcagatcacctgaggtcaggagtttgagacgagcctggccaaaatggtgaaacggctcactaaatacactaaattcacta

SEQ ID NO: 26806 - DNA, 495 bp, Homo sapiens
aatttgattaattaattgaaaagtacagtacaggccttcaaggagagacttgatcaagcagaacaaagaatctcagaacttgaagacgggttgtttgaaatattttctgcagaaaaaaataaatataacaaaggctacagtacttatggaacaccattaggcaaaaaaatattcatattatgggctttccagaaggagaagagaagggaaaagcatagaaaacctattaatgaaataatagctgaaaacttcccaaggctgtggagagatatggacatctggatccaggaagttcaaacatccccaatgagacttaacccaaacaggtcttttctgaggtatattacagacaaattttcaaaagtcaaagacaaagagaaaattctaaagctagccagaggtaagcagcaagtcacatataaaagaatctgtaattagaccaacagcatttctctgcagaaaccttatagaacaggagagaatggtcaaagtacc

SEQ ID NO: 26807 - DNA, 389 bp, Homo sapiens
agatcagtttggctgcaattttggctccttggaccctcaagcatagctggtaaatcaagttagagatgtaactgccttaaaacgtgccagcttaggctgggcgcggtggctcacgcctgtagtcccagcacttcgggaggctggggcaggcggatcacctgaggtcaggagttcgggaccggcctgaccaacgtggagaaattctgtccctactaaaaatgcaaaattggccgggtgtggtggtgcatgcctgtaatcccagctacttgggaggctgaggcaagagaattgcttgaacccagggaggcggaggttgcagtgagccgagatcacgccattgcattccagcttgggcaacaaaagcaaaactctgtctcaaaaaaaaaaaa

SEQ ID NO: 26808 - DNA, 284 bp, Homo sapiens
cctgaccctgccctggaaccggcaccatccaacagacatgggaaatggagggacagtggccgcagggggatgctggaagctcacgaaacctcctagggggcggccgggggctgagggaagctcacaaaacctcctaggaggtgggccctgtccttggtgccgccccctcctcgccactccccccaccccttccaggaatgcaaggtgcccggctcagagggaggaaccacagccctctcctggaggcacaggagacgctgccctgagagtcaagaattaaccag

SEQ ID NO: 26809 - DNA, 366 bp, Homo sapiens
aagttctggaaaaacaaactgcaatcagtcagctgtgaagggaaatcatttacaaccctaaggcatcagaggatgctgctccgaactgttggaaacaaggacattagcttttgtgtttgtttttgttctccctttcccagtgttaatgggggactttgaaaatgtttgggagataggatgaagtcatgattttgcttttgcaagttttcctttaaattatttctctctcgctctcctcttcccactcccacactgaaaaacaaagaagaaaaaagaaacaaaaccataaacaaaatctatgaagaaatgcattgtagaaacattcatgtccactgatggttcctaagaagagaagggaaaaagaaa

SEQ ID NO: 26810 - DNA, 394 bp, Homo sapiens
gatgaaattctgcctaacaacagaggcattttgtctttgtttacagacagtggaatgtctttggcaggactttaatgattccacttcagcagcattttgacaagcaagtttagcaatggatgagaccaacaatagcaaatcaacagtgaaaagttcacttacaagtcaagaccaaacatttcatttgaatattttgcttggcagtaaataggggactctctgaacagttatttaaaatttgacatgataatagggaagaaagagtacttcctcacagagcacctccatgcaccttctgctcagcagacactggaaaacaagttgattagaacactgttgggtcttgtgtttggttttatttttttggtagagctgatttgatccacctcaactt

SEQ ID NO: 26811 - DNA, 349 bp, Homo sapiens
gctgctaatccacacctctgccatcctcttctgatggagttcagaatggggaggagttttacaggatatttcatttgttactattccatttcacccagttaaactgagtccattcctccaactgccacaacatttttttcattgttgtaaaatatatataacatgaagttggccattttatccaggtttaagtgtataagtcggcagcattaactatatttacaatgctgtgtaaccctgtcgtgatcttttgaagtactcttttgactgttctggtgcatagacaatgctcaataatttgttggtggattaaaaaaagaatgaatgaatatcatctgaaaaggttact

SEQ ID NO: 26812 - DNA, 468 bp, Homo sapiens
gattaaaaatttaaatgtaagacatgaaaaattagactaccatacactgttgttggtaagttaaattatttcacttattatgaaaaactgtatggtggtttctcaaaacaaaaatagagacaccatatgatctagtgatcccactactaggtgtttatccaaaggaaaggaaatcattacacttaagaggcatctgcacctccatatttattgcagctgtcttcacaataaccaagatatggaattaagctaaatatccatcaatggatggatagataaaaaatgtggtatatacatataccaaatttgtatatacattcatatatatatatatatatatgaataatattctgccataaaaagaatgaaattctgtcatttgcagaatcatggataagactagcgaacattatgttaagtggaataagtcagactcagaaaaattaatactgtctgtccttacccata

SEQ ID NO: 26813 - DNA, 304 bp, Homo sapiens
cctgcattttccacaggagacaactgaggcaggaaggggtacagaagtccaacagggaggcaacagatgagaggggcatggctatcctagctgctactgttcccctgctctggaaagggtcttctctgagatgctttctacagtggacgttttggggtagtcaaagtacagcctgtgtagcctgccatgagcaaggctttttctttcgaaatgttcgtgttttagctttaaagtgtctgtgaagctgcctttcattccataatatgtctatacttcttttaattaaaaaacggtttgcattgtt

SEQ ID NO: 26814 - DNA, 339 bp, Homo sapiens
tgagtggccgcttttgaggatggaatttgaagtttttgtgcattaaagaaagcagattacctcacacctgtaatcccagcacttggagaggccgaggcaggcagatcacctgaggtcaggagttcaaaaccagcctgaccaacatggtgaaaccccgtctctattagaaatacaaaaattagccaggtgtggtggcgggtgcctgtaatcccagctacttgagaggctgaggcaggaaaattgcttgaacctgggaggcagaggttgcagtgagccgagattgcgccactgcactccagcctgggcaacagagcaagattccatgtcgacgcggccgcg

SEQ ID NO: 26815 - DNA, 2504 bp, Homo sapiens
taaattaaataattaaatagatgatttttacatactgtagagctatagagaaaatatagctggatgggtgatagtgacttggggatgggggtggctactctggatagggtagtttaaggtgacatctctgtgcagatgtagaatgggctagtgctttctaagaactgaaagatcagtgaagaaggggagcatagtgactgaggagtagtgtggcattagatggggtctgagagttacacaggaacatgtggagcctgtaggccatggtaaagcctttttctactcttctggtgatttaaagccattgtaaagttttgagcttgggagtaggtagcaaaataagatttatatttttatggggttactctggctgttgagaggagaaaaagacatgaatctgggaggccacttgggaagcaaggccatcagtgaagagaaagagtgggagaaaaaggtttgaggagagaaggtataggactttcactaaccttggaccatatatttgccaggaagaatgtaagttctccaacatcttcaaataaagaagtggttatgaggaatgatcagaataatggagatatgaaaccattccagaatttcacaacaataccaatcacacaggctctcaactacaatctgagcaaagaagggcatttagaaaaagaaccttggaatgcattcagccatcatggcccagttaatgtctccatcaatggaattccttgcattctcttctgggccaaaagaataatgattaaatttaagaatcaaacctggctggaccttacagacgagccatttggtcagaaggtaactgtggaccctgacaactcaaattgcagtgaagaaagtgctagaaaaaaaaagtaggctcctttgtataggaccctgacacacatctttgaggaagtatttactgtctaaaataaaggaacaagtcagaagttaacttcaaaaattgttggctgggcatggtggctcacgcctgtaatcccagcacttcgggaggccaagggagtggatcacctgaggtcaggagttggagacaagcctggccaacatggtgaaacctcgtctctactaaaatacaaaaattagccgggcgtggtggcaggtgcctgtaatcccagctactcaggaggctgagacaggagaattgcttgaacctgggaggtggaggttgtggtgagctgagatcgcgccattgctctccagcttgggtgacagagtgagtgagactccatctcaaaaaaaaaaaattgttatattttcccggcagttttcttctgaacctttttgctaattgtcggaataacttgtagaaaatgagactttggaaagcaagggttctcaaactcgttttgaaaacagcaaaggattccaggcttggtctcaactccaaatggttgtctttgaagcttggtgatgctggaaaccccagaagtcttgctataagattcatccttaccaattacaacaagttgtccatccagagttggtttagtttgcgccgagtcgagatcatttccaacaattcaatccaagcagtctttaacccaactggcgtatatgctccctctggttactcctaccgctgccaacgcgtgggcagcctgcagcaggaccaggccctcttgctgcccagcgacacggatgatgggtcgagcctgtgggaggtcacttttattgatttccagatccaaggttttgccatcaaggggggacgatttaccaaagcccaagactgcgcctcctccttctcgccagcttttctgatcggcctggcaatgtccctgatcctgctgctggtgttggcctatgccctgcacatgctcatctacctgcggtatctggaccaacaatatgatctcatcgcctctcctgcccacttctcgcagctgaaagctcgagacacagccgaagagaaggagctgctgaggagccagggggctgaatgctataaactgagaagccaacagatcagcaaaatctatgtttagcagcacaggctggcccccaccatgtccacagtgggctccgaaagttgtctctgttctgtgctatttgacttgtgaattacagattttcaccaaatggcttgattacaaaaaaaaagaaaaaacacaaaaaggaaatagataatgaattctttttgaaccatccactggcctacttaggtagacttggggcaatcaaaaaaggcatctcagggatcccacagagacaaatatgactgttagttgcctcaaagtaccctgaaagcaaaggggtatttcaagtacggaaaaagagagagagagaagaagaaggaggaggaggaggaggaggagaaggagaaggaggagcaggaggaagaggaggaggaggaggaaagggagggagggagggagagggagagagagagaaagattggcaacacagagaagggaaaacacacttggtcctccttgcctgtgccagtttggatgtgacaattatagaaataataaaccaagattatctgg

SEQ ID NO: 26816 - DNA, 1552 bp, Homo sapiens
gacgcggggctaggtcagagtaggaaggagtcgctgagctgaatctttgtggagtggagtggggcgagagtcctccgagtagtctggaaaattagacttctgagccttaattcatacttataagcagctagtaaattgtaaaatatagtgaagcaatgtagtgtagtaactaaaaccccaagctttggagccagattgggcctttaaccctaaagttgccgtttattttgactggcgagtcatttacttatagatttatttatttttatttttattttttttgagactccatctcaaaaaaaaaaaattgttatattttcccggcagttttcttctgaacctttttgctaattgtcggaataacttgtagaaaatgagactttggaaagcaagggttctcaaactcgttttgaaaacagcaaaggattccaggcttggtctcaactccaaatggttgtctttgaagcttggtgatgctggaaaccccagaagtcttgctataagattcatccttaccaattacaacaagttgtccatccagagttggtttagtttgcgccgagtcgagatcatttccaacaattcaatccaagcagtctttaacccaactggcgtatatgctccctctggttactcctaccgctgccaacgcgtgggcagcctgcagcaggaccaggccctcttgctgcccagcgacacggatgatgggtcgagcctgtgggaggtcacttttattgatttccagatccaaggttttgccatcaaggggggacgatttaccaaagcccaagactgcgcctcctccttctcgccagcttttctgatcggcctggcaatgtccctgatcctgctgctggtgttggcctatgccctgcacatgctcatctacctgcggtatctggaccaacaatatgatctcatcgcctctcctgcccacttctcgcagctgaaagctcgagacacagccgaagagaaggagctgctgaggagccagggggctgaatgctataaactgagaagccaacagatcagcaaaatctatgtttagcagcacaggctggcccccaccatgtccacagtgggctccgaaagttgtctctgttctgtgctatttgacttgtgaattacagattttcaccaaatggcttgattacaaaaaaaaagaaaaaacacaaaaaggaaatagataatgaattctttttgaaccatccactggcctacttaggtagacttggggcaatcaaaaaaggcatctcagggatcccacagagacaaatatgactgttagttgcctcaaagtaccctgaaagcaaaggggtatttcaagtacggaaaaagagagagagagaagaagaaggaggaggaggaggaggaggagaaggagaaggaggagcaggaggaagaggaggaggaggaggaaagggagggagggagggagagggagagagagagaaagattggcaacacagagaagggaaaacacacttggtcctccttgcctgtgccagtttggatgtgacaattatagaaataataaaccaagattatctgg

SEQ ID NO: 26817 - DNA, 1638 bp, Homo sapiens
gacgcggggctaggtcagagtaggaaggagtcgctgagctgaatctttgtggagtggagtggggcgagagtcctccgagtagtctggaaaattagacttctgagccttaattcatacttataagcagctagtaaattgtaaaatatagtgaagcaatgtagtgtagtaactaaaaccccaagctttggagccagattgggcctttaaccctaaagttgccgtttattttgactggcgagtcatttacttatagatttatttatttttatttttatttttttctgagacagggtctcactctgtcttctaggctgttgtggtgagctgagatcgcgccattgctctccagcttgggtgacagagtgagtgagactccatctcaaaaaaaaaaaattgttatattttcccggcagttttcttctgaacctttttgctaattgtcggaataacttgtagaaaatgagactttggaaagcaagggttctcaaactcgttttgaaaacagcaaaggattccaggcttggtctcaactccaaatggttgtctttgaagcttggtgatgctggaaaccccagaagtcttgctataagattcatccttaccaattacaacaagttgtccatccagagttggtttagtttgcgccgagtcgagatcatttccaacaattcaatccaagcagtctttaacccaactggcgtatatgctccctctggttactcctaccgctgccaacgcgtgggcagcctgcagcaggaccaggccctcttgctgcccagcgacacggatgatgggtcgagcctgtgggaggtcacttttattgatttccagatccaaggttttgccatcaaggggggacgatttaccaaagcccaagactgcgcctcctccttctcgccagcttttctgatcggcctggcaatgtccctgatcctgctgctggtgttggcctatgccctgcacatgctcatctacctgcggtatctggaccaacaatatgatctcatcgcctctcctgcccacttctcgcagctgaaagctcgagacacagccgaagagaaggagctgctgaggagccagggggctgaatgctataaactgagaagccaacagatcagcaaaatctatgtttagcagcacaggctggcccccaccatgtccacagtgggctccgaaagttgtctctgttctgtgctatttgacttgtgaattacagattttcaccaaatggcttgattacaaaaaaaaagaaaaaacacaaaaaggaaatagataatgaattctttttgaaccatccactggcctacttaggtagacttggggcaatcaaaaaaggcatctcagggatcccacagagacaaatatgactgttagttgcctcaaagtaccctgaaagcaaaggggtatttcaagtacggaaaaagagagagagagaagaagaaggaggaggaggaggaggaggagaaggagaaggaggagcaggaggaagaggaggaggaggaggaaagggagggagggagggagagggagagagagagaaagattggcaacacagagaagggaaaacacacttggtcctccttgcctgtgccagtttggatgtgacaattatagaaataataaaccaagattatctgg

SEQ ID NO: 26818 - DNA, 1120 bp, Homo sapiens
gacgcggggctaggtcagagtaggaaggagtcgctgagctgaatctttgtggagtggagtggggcgagagtcctccgagtagtctggaaaattagacttctgagccttaattcatacttataagcagctagtaaattgtaaaatatagtgaagcaatgtagtgtagtaactaaaaccccaagctttggagccagattgggcctttaaccctaaagttgccgtttattttgactggcgagtcatttacttatagatttatttatttttatttttattttttttgagactccatctcaaaaaaaaaaaattgttatattttcccggcagttttcttctgaacctttttgctaattgtcggaataacttgtagaaaatgagactttggaaagcaagggttctcaaactcgttttgaaaacagcaaaggattccaggcttggtctcaactccaaatggttgtctttgaagcttggtgatgctggaaaccccagaagtcttgctataagattcatccttaccaattacaacaagttgtccatccagagttggtttagtttgcgccgagtcgagatcatttccaacaattcaatccaagcagtctttaacccaactggcgtatatgctccctctggttactcctaccgctgccaacgcgtgggcagcctgcagcaggaccaggccctcttgctgcccagcgacacggatgatgggtcgagcctgtgggaggtcacttttattgatttccaggcacttggactagtaccctgcatgaaagttcatttcaaggcaaacagaacaatattcttggaatgggaggaaaaagcttcgagtttgaacaggcactatgctgagcacagaattgaatgtgtgggcacagcaataagctggcaggtgtgtctccagccagccttgtggatctacaaacataccaaagaggaggcgcacactggtgtaatgggccagatgacaatcttgtgtcttcccactctgagttccacttagagacggggtttcaccacgttagccaggatggtcttgatctcctgacctcatgacccgcccgcctcggcctccccaagtactgggattacagagatttggacttgcatatacaaatggcag

SEQ ID NO: 26819 - DNA, 480 bp, Homo sapiens
gtaagttgatctctcagtttgaggaagcccctagggctattgcgttctgttaactctgcattcaactttttttgtcatttcagaaaaaaaaagtaggctcctttgtataggaccctgacacacatctttgaggaagtatttactgtctaaaataaaggaacaagtcagaagttaacttcaaaaattgttggctgggcatggtggctcacgcctgtaatcccagcacttcgggaggccaagggagtggatcacctgaggtcaggagttggagacaagcctggccaacatggtgaaacctcgtctctactaaaatacaaaaattagccgggcgtggtggcaggtgcctgtaatcccagctactcaggaggctgagacaggagaattgcttgaacctgggaggtggaggttgtggtgagctgagatcgcgccattgctctccagcttgggtgacagagtgagtgagactccatctcaaaaaaa

SEQ ID NO: 26820 - DNA, 886 bp, Homo sapiens
cagaactgccagcccaactgggaagtagatcctaggagagaagggatgtatcacttcagctccttcctttctcctgcagatccaaggttttgccatcaaggggggacgatttaccaaagcccaagactgcgcctcctccttctcgccagcttttctgatcggcctggcaatgtccctgatcctgctgctggtgttggcctatgccctgcacatgctcatctacctgcggtatctggaccaacaatatgatctcatcgcctctcctgcccacttctcgcagctgaaagctcgagacacagccgaagagaaggagctgctgaggagccagggggctgaatgctataaactgagaagccaacagatcagcaaaatctatgtttagcagcacaggctggcccccaccatgtccacagtgggctccgaaagttgtctctgttctgtgctatttgacttgtgaattacagattttcaccaaatggcttgattacaaaaaaaaagaaaaaacacaaaaaggaaatagataatgaattctttttgaaccatccactggcctacttaggtagacttggggcaatcaaaaaaggcatctcagggatcccacagagacaaatatgactgttagttgcctcaaagtaccctgaaagcaaaggggtatttcaagtacggaaaaagagagagagagaagaagaaggaggaggaggaggaggaggagaaggagaaggaggagcaggaggaagaggaggaggaggaggaaagggagggagggagggagagggagagagagagaaagattggcaacacagagaagggaaaacacacttggtcctccttgcctgtgccagtttggatgtgacaattatagaaataataaaccaagattatctgg

SEQ ID NO: 26821 - DNA, 1830 bp, Homo sapiens
gacgcggggctaggtcagagtaggaaggagtcgctgagctgaatctttgtggagtggagtggggcgagagtcctccgagtagtctggaaaattagacttctgagccttaattcatacttataagcagctagtaaattgtaaaatatagtgaagcaatgtagtgtagtaactaaaaccccaagctttggagccagattgggcctttaaccctaaagttgccgtttattttgactggcgagtcatttacttatagatttatttatttttatttttattttttttgagactccatctcaaaaaaaaaaaattgttatattttcccggcagttttcttctgaacctttttgctaattgtcggaataacttgtagaaaatgagactttggaaagcaagggttctcaaactcgttttgaaaacagcaaaggattccaggcttggtctcaactccaaatggttgtctttgaagcttggtgatgctggaaaccccagaagtcttgctataagattcatccttaccaattacaacaagttgtccatccagagttggtttagtttgcgccgagtcgagatcatttccaacaattcaatccaagcagtctttaacccaactggcgtatatgctccctctggttactcctaccgctgccaacgcgtgggcagcctgcagcaggaccaggccctcttgctgcccagcgacacggatgatgggtcgagcctgtgggaggtcacttttattgatttccaggcacttggactagtaccctgcatgaaagttcatttcaaggcaaacagaacaatattcttggaatgggaggaaaaagcttcgagtttgaacagagctggggtctcccaaagttgccaatgctggtctccaactcctggcttcaggtgatcctcccacgtcagcctcccaaagggttgggattacaggcatgagccaccatgcccagcccagatgattcttataagatgagaacagctgctccaaaagagtcagatgctgagatccattgtccaccctggctcctgctctgaattgacatcagtttgcaactagtagtttcataaatcaagaaaaagaagaaaggtaaattaatgactgtgttaactagaggggctctgaatttctgctttacatgtactcattttgaatttcacttttattataatgaacttgcaaacacagcattgcaatagtatatgcacctcccaaagatgctgggaaatagctgatatttcatcatttgaggacagtttgtgcctgcaagtggcagaggtgcaggaggagacaaataaaagggatgcctacatcctatttccatgaatttctgtcctctgagctgaaagacaatttacaagttggctgataagaccttgaagaaagaagatattttaaaactttaattgaaaatccccattccttctcattgaagaagcaaaagaagaaactataatgatggacactctggtgctagtatcagtcattttgatcacaagacgtggaccagcccaccttggagctcactgtggtggtggcctggtcctaatgcaagtcctaatggagctcttggaactggctgtagcctttgctgagcaggagcaactatgtctctggttcttaaggattgaaaaggtttcttggaaaagctttcattttctgaaataaacatccccttgagcctggtgatgccactgctttgcttcgctttgagaactgctgtcagaaagacgcaagcacacacagctgaactggtggtctcttcagagaaaatacttgtaaatggaagactggcttattactaattacttttaataaagactgcagagagc

SEQ ID NO: 26822 - DNA, 158 bp, Homo sapiens
tgcgggtggtgtgggagctggaagaaggcaggtgggcacgctggcatggcgtgggcaccagcagaccccaggcaggccccaccagtgggagccactgcagaggaaagagatgagtgggaggctctgggtgtgggggttagagccagggcctgaccttg

SEQ ID NO: 26823 - DNA, 631 bp, Homo sapiens
ttatagcccaagttttggaggcacaaagtaagttatggggcacttactgtgtgccaggtgctgtgttataggcatttgattctcacaaggattttttcgttccctactccctgagtgggactgagatcagtaccatctcacagatgaagaaaatgaggctgagagattcagtaaccttcccaagatcacactgcaagtaggaggaagagctgagattcaaagtggtctttctgactcagaattcaccctccttcccaacacgccaactgtcccagggagcaccaaatggggaggaacctgagaaaccatctggttgacacgctccccattttgcagatggggaaactgccttgcccagggttagacccagagctcagctctcccgactcagtccagtgttgttttcccagtaccatttaccttcctgacctccatctctgcttgaacactcagagggatgaggcagatttggaggtgagttctgtcttggattcagggattcctttaataatttctgggctgggcgcagtggcccacgcctgtaatcccagcacttcaggaggccaaggcaggcggatcacctgagtttgagatcagcctggccaacattatgaaacccccatctctacta

SEQ ID NO: 26824 - DNA, 309 bp, Homo sapiens
caggcctctgaggccagggtcccaaagaaagggcccgtctctctggggctggccacaggggccagttgtccctcctgcgccatacatctgtgcctgctggctggagggacaagctgtggcgcccgagcccagccgttccccttccctggcattttcccaaaggaagggcccattcgtgcggaaccccagcagccagaaaacctgagtagctgacgtcctgggcggtgggtgctgcaggagtcggagctgccctgatggattggcgggggcagcagcacaggtggggtggatatgccagcacccccctag

SEQ ID NO: 26825 - DNA, 393 bp, Homo sapiens
cacatcaaaaaatactatatgcacttacctatgttcaacttctagatgccatacatatcctgaaggatttcaaaaatctgacctcctaaaaggacacagcttattaaagttaattcagcttgtgttttagtactttgatggtaggaaggacagagctccaagagtgggggagggctgggtttcagtgccaggtctcaggttagcaaaaaatcttggagaaccttaatctctctgggtctggctcatacatctgcaaaataaggtgtgctgaacaagaccactgaagtgtcttccaactcaaaaccagactgagaaatagaacatagattaagtcttcagcctaaatcttacagcatagtgactggtacagcgtagatgcttgatgtacactta

SEQ ID NO: 26826 - DNA, 626 bp, Homo sapiens
  misc_feature (622)..(622): n is a, c, g, or t
gtgacatgtcccttctaggccagagcctttcatggccatgaggatccacagaactcactttcctctggtagaccaaagtcaaggtggcaactgctcagtgagagggagcctccctgctaccccagtggatggtagtgtgaaggataaaccaacttttgttgttgtgagcccttgagatttgagagttttgttacagcaacatggctagcacatcctgactgattcttcatcatcatcatcatcatcactcaagcctgtcccccggccaggggtccatccaggagaacaacagccatggaggagacccgtcaaaaaatagaactttattaccaatctgtttctataattgtttgactcattttctcactcatttgtttgctttatcaccaatttctttacatcatttattccttcaaaaacacttcttggctgggtgcagtgggtcacgcctgtaatccgagcactctgggagcccaaggcaggcagatcacctgatgtcaggagtttgagaccagcctggccatcatatagtgaaaccccatctctactaaaaaatacaaaaattcggtgagctgagatcgtgccattgcactccagcctgggcaacaagaacgaaactccntctc

SEQ ID NO: 26827 - DNA, 397 bp, Homo sapiens
gagcaaaataatcagataaaactaattttaatattgtgttttttaactcactccaaattagtatttcaaagtttcaatataaaaattgagatatttcacattgttttttcctactaagtaattaaaatcaaatgcaaattttacttaatagcacatctcgaatgttcagtatccatacatgggcagagcagttctagaagatttattgtttttaccctttcacattatatcttatgttccacctgaaaatgattttttgaatgaattgtgaggtagaaatcattacttactcatttgggcatccagttgccttaagaccactttattgaatataaagacagtcctatcttcactgttctgttatgctactttggtattaaagtgtccacatatgtgt

SEQ ID NO: 26828 - DNA, 534 bp, Homo sapiens
gattactcaatggtttctaggactgactttggtaggcctcactagccccatgtcaattttgaagattctttactttaatgcctttagatagtcagttgctgctctcaaaccttccagcacaagaacagacatttcagaagaggatggaaataataactttcacgaggaggaaggacatcatgtgtggggcataattttaagaggaagcctttgagactcacggtgtgatgtctggactttgtcttaagcctctcttctagctattttgtaataagtataccttactgttaaccactgtctccctaatgtgcaacagaacaccagaaattattcctcctatgtcatggtaactttgtacctgttgaccaacctttttttcagacttccttcacccattaagtttttaacaaaatatacatcttgaaaaactaggaaggtcgcagaagatttagagtatatatattgactcaatgcccaccttcttttccaaagtgtttaccataatctgattaaactttatttaaaatgtttcta

SEQ ID NO: 26829 - DNA, 900 bp, Homo sapiens
cagagatcctttaccagtcatttagagttcctgtattgctcatttgattttgaactatctttaaacaattagtctaaaatatgcatttcctttggatccgtctcttctggtaggttttaaaatgaagccattttgaagttactcagctgcaatcaaaatttgaacattttctttaaaagtgtgaaacatgtactttgttctgctctaaaaattgttgagtgagcttttgggaattttcttcagataacattcagctttgcggggaaaacctgactaaaaattgaggagaaaaaaactcaaatcgcaaaggaaagacctaaagaacatttataagtagttacccgcctttatcgaatcttaatcaaattaggcctttggtacacttggcttggattcatgacctgattcataaggctattcctgaaagatgcctagcattttaatatttaacctctttcctctttcctcattactttgttcattttcagtcacttgtcccttttttaaactccttctctcacctttcattctttggcttttttttcttccctcattattgtactccttcttcatctctttgttctccttgcttcccttacgctagaaggaagttttctgattacccaattatgagtttgaaccagagacctggagttagtgctgatccgggtatagggaagcagacacacatgaacactttttgtatgcatataaattggaaaggttttaaagaatttacattgaatttatacagtataatctatgcaatagcttttttaaaagatgaattatgtgaaaaaggccgattgtggaatagtgtatttaatataatgcaatatttgtaattacaactaattatgaatataaaattattatttggatggttattcacccctctgc

SEQ ID NO: 26830 - DNA, 390 bp, Homo sapiens
cttcccccacaattttcctgtgttgaagtcctaacccccagtatttcagaatgtgactttatttaaagatggagttttataaaggtaaccaagtaaaaatgaagttgttaggtgggtcctaatccaatacgactggagtccttatgaaaaggggaaatttggaagcagaaatatgtacagagggaagatgatgtgaagacttggagcaagaagacagctgtctacactccaaggagagggcctggaacagatccttccatcacagcccccagagggaatcaaccctgctaacaccttgatttcagactcctggccatcagaactgtgagacagtgaattctgtggtggaagctgtccaatttgtggtacttggttatggcagccctagca

SEQ ID NO: 26831 - DNA, 536 bp, Homo sapiens
attcaaaattcagaatgctccaataatcgtttcctttgagcatcatgtcagtgctcaaaaagttgcagattttgaggtatttcagatttttgaattaggaagactcaacttgtactatcattctatagactttatgattgggtagactacatgagtattgaacccagaaatcattgtctagcaaaagccagtatagtgattaattaccctgtgactattatataatgttcaaaaaagctaacatattagaatgtccttagcgtgcagagagcaaacagagacaaaaagaaaagttaccctgaaaagtttgtcagaaaaatagaatatcagacgctaaactactcatccagaattttgtcaaaaaagaaaaataagataaaattcactggtagacaaaaagtagtaacataccagtttgtaatttctcagtttcaaaccatgaatatgtatttgtataccaaaaatcatttcaggagcagagaaggaggatatgccttttatgtggagactttaaacataaaattggaaaactaaaa

SEQ ID NO: 26832 - DNA, 300 bp, Homo sapiens
actttgtgttcacatctgtgccttaaataaaatcatcacgatgtgatgtgaggccctgagtagattctgtgacaggttgtagcactatgatgaaaccaaaggggaacatatatttatcctttgtatttggaaatttcctgtaactgcagcagtaatgattacagctgggactgttggaagacaaatgtacacactgccttcttcgtttgagaagtaccataacctcctttgtgaaaatgcactgtaatcaagtggaagagataaaaagtcccaagtttgaggtcttcactaataatatat

SEQ ID NO: 26833 - DNA, 406 bp, Homo sapiens
gatttgcaatctttcagtaattttaaatttctacataggtcttattttttaaatttttgtttattttgatttttagaaatttcaaataaaagtacttgatgaagcaaagtagccctgtgatcttgtgcacaccatttaaaagttagcttggtttttctgctgagctgtttggaataaattctcaacagcaaaagttaggtcttgaatgcttccttatttctggggtcttttttctggctatttctacgttcgtgaatctatctacgatccttgcacatgtagtcttttgtgatatagagatgggactaaaaaaacataaattctaattacttcccaaagtgctttgtgctcttttagatatgtccatgagtgctggttctggattcatgcaaaaatgcttattgct

SEQ ID NO: 26834 - DNA, 893 bp, Homo sapiens
gttaatattcttttaataaatgccttttttgtgtagaaatgcttgtttggtttctgatagttgtaacctaaagaatctttagtaagccattggtctgctgtggggagcgtcgagatgaaactggaacgttgtttgaacctagatcataaagtgactccaacatcttcataccagggagaggaggaagctgtgctgtgaaggatcctttttcatcatgattattgcatccacagaagcagtgataaattctaacagataatgcaactcagtctacttggatgttcacacctgagactggagaagacctgctgccttctgcagagccaaacattcctcacatgctcctccacaatgctagttaatgcagcaagaatagtcttatatagactataaactcctggtacactgtgtctacattgctcactgcagtatcccaacatctaagaccatggtcttagatgtctggtacaggactggtgctcagtatgcattgaatgaataaatgaatgaatatagcaaagcaaaaaaaaaaaaaaaaaaaaaaaaaaaaaaaaaaaaaaaaaaaaaaaaaaaaaaaaaaaaaaaataacaagggggggggcgccatgagaatacctcgccaggagggcaccaaataatgagccaccagcccttgtctggtaagcagggggaccccccatatgggggagacgcatataaaagaggcagaacaagggggaagcaccataagacaagcacgagggtaggggcaaagcagaggctgcagggagacacgcaggagggagaagaaaaccacatatgcgcgggggggggacaacagtcagggcgcgacgaactctcgtcagagatgaatagaaggccagggagaagaacaccaacatacgaggtgctaa

SEQ ID NO: 26835 - DNA, 836 bp, Homo sapiens
gttaatattcttttaataaatgccttttttgtgtagaaatgcttgtttggtttctgatagttgtaacctaaagaatctttagtaagccattggtctgctgtggggagcgtcgagatgaaactggaacgttgtttgaacctagatcataaagtgactccaacatcttcataccagggaagcagtgataaattctaacagataatgcaactcagtctacttggatgttcacacctgagactggagaagacctgctgccttctgcagagccaaacattcctcacatgctcctccacaatgctagttaatgcagcaagaatagtcttatatagactataaactcctggtacactgtgtctacattgctcactgcagtatcccaacatctaagaccatggtcttagatgtctggtacaggactggtgctcagtatgcattgaatgaataaatgaatgaatatagcaaagcaaaaaaaaaaaaaaaaaaaaaaaaaaaaaaaaaaaaaaaaaaaaaaaaaaaaaaaaaaaaaaaataacaagggggggggcgccatgagaatacctcgccaggagggcaccaaataatgagccaccagcccttgtctggtaagcagggggaccccccatatgggggagacgcatataaaagaggcagaacaagggggaagcaccataagacaagcacgagggtaggggcaaagcagaggctgcagggagacacgcaggagggagaagaaaaccacatatgcgcgggggggggacaacagtcagggcgcgacgaactctcgtcagagatgaatagaaggccagggagaagaacaccaacatacgaggtgctaa

SEQ ID NO: 26836 - DNA, 1156 bp, Homo sapiens
gttaatattcttttaataaatgccttttttgtgtagaaatgcttgtttggtttctgatagttgtaacctaaagaatctttagtaagccattggtctgctgtggggagcgtcgagatgaaactggaacgttgtttgaacctagatcataaagtgactccaacatcttcataccagggagaggaggaagctgtgctgtgaaggatcctttttcatcatgattattgcatccacagaagcagtgataaattctaacagataatgcaactcagtctacttggatgttcacacctgagactggagaagacctgctgccttctgcagagccaaacattcctcacatgctcctccacaatgctgtgagccatatttattcatttaaaagctagtacctcgctatttcttgtacattaattcttttaaaacgtttacaaaacaaactaaatttaaagaggaaattatttactgatagaactaatagcctgaaaatagttgcccaacatagcatcgcacatagcaacaggaagtagtttatatactaggaagtctctttaaaatgtgcttggatattgccaaaattctctgccttataaactaaggagttcttttttttattttttagagttaatgcagcaagaatagtcttatatagactataaactcctggtacactgtgtctacattgctcactgcagtatcccaacatctaagaccatggtcttagatgtctggtacaggactggtgctcagtatgcattgaatgaataaatgaatgaatatagcaaagcaaaaaaaaaaaaaaaaaaaaaaaaaaaaaaaaaaaaaaaaaaaaaaaaaaaaaaaaaaaaaaaataacaagggggggggcgccatgagaatacctcgccaggagggcaccaaataatgagccaccagcccttgtctggtaagcagggggaccccccatatgggggagacgcatataaaagaggcagaacaagggggaagcaccataagacaagcacgagggtaggggcaaagcagaggctgcagggagacacgcaggagggagaagaaaaccacatatgcgcgggggggggacaacagtcagggcgcgacgaactctcgtcagagatgaatagaaggccagggagaagaacaccaacatacgaggtgctaa

SEQ ID NO: 26837 - DNA, 312 bp, Homo sapiens
ttttttttcctttttatggagaacaaggtctcactatattgcccaagcaggtctcaaactcccgggctcaagctatcctcccacctctgcctccctaagagctgagattacaggtgtgaactactgtgcccagctaactaggatttttttaaactccaaattttatagcaagtgaatggtgaatcaagaaagtgattccagagacaaacaatgtagtaagccccattttaacacaggtggtgattccatgggtcaggatttgcaagtcacatatttatctgacatgtaaccagctctcacattgttttaacc

SEQ ID NO: 26838 - DNA, 2096 bp, Homo sapiens
  misc_feature (1319)..(1319): n is a, c, g, or t
tattcttatctgcattttgttagaagaacacagttaataaagtgggtgtggggaagaaaacagtgcaggagaaggagaactggaagaggaaccagagtggcttgagttatctagtaaagtcttcattgcatgatgtgaccagctctcagaggggcatctaatacagagcagtttagtttaacctcagaaggtcatcagggtgctagaatcatgtcccattttcatggtaattgggcaagactgggaaaatgttttgggaatacacattttatcttccacttccagcagtggcttctaaccactgaggactctccacgttaccaatctctactgacctacctcaagctttgtaaaatcttatttaccgaacaaattacatttttaagtaataattaagcccccccttttctgtagagatatataataactgttaacctggggtcatttttatcgggctttatataattccaacagaaagcaaaggactgtgagtgcttaagttagcctgagcagtaaagaggcttttagacctactgagaatagtttttggattcacattaccactgcttgacctgagactcgatttgggagctagaaactaaaaccagttatgcctttccattgaatagatggaggctgggaggctcgggcttgtctagcttgtagggactcaagggcactttggtcgtgtcacggtgctgctttctctcctgcgcgagcctcatacttgctttctctgttgaatggtaaaagccagcctcttgtttgctattccggggttagaatttcaattccttttttaaaaactctgtttagatcagaaaccatccagacactcattcagaaaccatctggggaaggtatgacttgagatagaaattgaagagatagagaggaggagaagaagatagtatacgagttagtttaaatgaccccagatgagtttggccgggaaatcaactgcagaatgcatcctctgtccctggcctgtatccctcaagggcctttgatagagtcttggcttagttgcagccacttttcctctagaactttaactcagtaaaggtgtgcagtaaaaatggggaagagggatgaggaggagccaggagagaatcgaggaagagcaaatattacgagcgtagaacgcgaagcttggcatgtctgcctggttccacttactcacgtttgttgagctccttctatgtctgaagctgtttctaaaacgtcagtttctagaaaacaggatcctgaattcagctaagcatgattcccagggccatccctgggaagctgtcctgaagatgcctcctgctaagacnggttgcggaggggagtcagtggctgaaagggtgatttcaggatagattgtcctggcaaataaggaggggtcctctgcatgaataagcagtgtaccctgccaaaggaagctggcaggaggtgattcctgctgaagcctgacagtacatgtccaccctgaactcatggccttggatgcagaccggccaactgtacacagttgagcgaggaagtggcgacagcacggtttgaatctggctgataaaacagatgttcgggggaagggctcttattttctcccagttataggatcgggggtgggggaagaaaacctaattccctatctgccaaatgtttctgttggtaatgtcctggcaacagtgagatgcccccaagaatggagtggttgaaagttctagctatcgactcagccctggatgtaaattctgaattctgtgtgaccttgggcaagttacttaacctctctgagtacccttggcctcatctgtaaaatgaggataatgatacctacttttggcggggtgcaggggcttgtgcctgtagtcccggcactttgggaggctgaggcaggtggatcacttgagatcatgagtttgagaccagcctggccaacacggtgaaaccccgtctctactaaaaatacaaaaattagctgggcgtagttgtgggtgcctgtaatcccagaatcgcttgaacccaggaggcagaggttgcagtgagccaagatcatgccattgtactccagcctgggccacaagagtgaaactctatctcaaaaa

SEQ ID NO: 26839 - DNA, 579 bp, Homo sapiens
catgattgcaccattgcactccagcctgggtgacagagggagaccctgtctaaaaaaaaaaaaaaacagtaataacaacacttgtctctgagaagggtaatacttggtctcaaagactagtaagaccacatcttacttcccttcagccatgcctgacccaggactaggtacacagttagttcaatgaagcttggcaggaaaaaagacaagcagccagccatgctcaataaatgctaacgattattagtgttcatcattattagtattctagacactccagtaatcattgcacaatatcagaagcaacatcatcttcaggacctgggctcccaggggactctgtcacgtttcccttcctcttccaaagacaacttctcttttaaaagagacatgagccaccagccttggcagaaccacagaccagagaaggagcagacacatagaccaagggaacagaatagagaacccagaaacaatctatacagtaaattaattttcacaagtgtgccaagaatatacattggggaaaggatgtcttcaatgaatgacactggacacccttcgggatcctctaactcg

SEQ ID NO: 26840 - DNA, 637 bp, Homo sapiens
cctgaagaaaatagctggtggcttccttggccttttgccatcaatgatgcttcttacttggatttaaactgccattaggaaacctcttgatcaagaatttagacaagaatttcattcccatgtgataatttaggttataacactagaatggaacaaagagtagaatgtctttagttctttattttgcattatgtcataagaaagttcttgctatgttgtaaaatcgttgttagattcaggcttttggggattctgaaaacacattttgttagagttgaagtctattacctgagaaaggtaaaattgtgtcataattgttcatcatactaggtattaagggtagagacaagttacttcaaggtatagaaacactgaccagtactcgactgtgaaaaacatctttacctttagcattttttttttgaaacagtctcgctccgttgctcagactggggggcaatggcgcaatctcagctcactgcaacttccacttcctgggtacaagcgattctcaatcctcagctactcaggaggctgaggcaggagagttgcttgaacccaggaggcggaggttgcagtgagccaagatcatgccactgcactccagcctggtgaacagacgatggtccgtctccaa

SEQ ID NO: 26841 - DNA, 439 bp, Homo sapiens
gtgtctgcaaagcatgtggacgcatgggcagttatgtgtatgaacttttttttttttgagaatggctttagtgttcagaccaaggatggaatgaaagatcacgtgtgctttccactgtagagctgccctgcttgttttgattttatagttattctaagtgttaagttccttcatctttcaaagcaaattcctttgatccctgaaaatcagctaatgtttgggaggcaattaaaagatgaggctgtggggttggggtgaaggcttccccagcaggaagagaggagaagcccactggatctgggagcacggtgctaggactctctaagcgtgacctccttcagtttggcccagagtggtcagatagtttgccggggcataggatggatgacaggcctcatacgcatcacgtctgaagggaaagcccttgaattttccacgc

SEQ ID NO: 26842 - DNA, 393 bp, Homo sapiens
tacccgttcctaatcagtatagacatggagtcaggagctaaacagaaatataattctttcagagttttatttctaattatgaattattttaagcattcagaaaagtacagaaaataatataacagacttctgtgtacctgccttcctgattgaacattttgccattttgacttcaaaattctggtgatctttaaatgaaactaaagactcctgttccctgcacgcttcctcctccacccttctcagtggtgaccactatcccgaggttagtgagtaacagtctcatgcatgtttttggctttttatcatatatgcatgtgggtgtaaaccatatatagtatcattgtgtgtgctttaagaattttaccaaaattgtaacataatgctctatct

SEQ ID NO: 26843 - DNA, 447 bp, Homo sapiens
gtttattttttgttaataattgccttatttattgtaattcacttttatcatgaattattctctagttattttatatctgtccattatttacaaatagaaataaactttctgatggcagagaacatgatttataataatggtgatgattaataagaaaaatagccgggctcagtggctcacgcctgtaatcctagcactttgggaggccaaggctggcagatcacaaggtcaagagatggagactatgctagccaacaaggtgaaaccccatctctactaaaaatacaaaaattagctgggtgtggtgacacatgcctgtagtcccagctacttgggagtctggggcaggagaatcgtttgaacccagaaggtggaggttgcagtgagccgagatcgtgccactgtactccagcctggcaacagagtgacactccgtctcaaaaaaaa

SEQ ID NO: 26844 - DNA, 406 bp, Homo sapiens
  misc_feature (256)..(257): n is a, c, g, or t
  misc_feature (259)..(259): n is a, c, g, or t
  misc_feature (261)..(262): n is a, c, g, or t
  misc_feature (265)..(265): n is a, c, g, or t
  misc_feature (270)..(271): n is a, c, g, or t
  misc_feature (277)..(277): n is a, c, g, or t
  misc_feature (290)..(290): n is a, c, g, or t
agtaataattttaagtttcataatcaaggagatgttgattttcttcctggttttctggtgctccttatcttttctggatcactaacttaaattaagatccacttatgaatgctgcattcaggagcacttgtgaaaataaacgatggcatgcccaccatttagtttgccaagctttccttgaaaacgcaggtgcaaactgaacaatgaggacgcatggacacaggaaggggaacatcacacaccagggcctgttgtnncncnnggngaagnngaaggnatagcattagggnatatacctaatgttaaatgacgagttaatgggtgcagcacaccaacatggcatatgtatacatatgtaacaaacctgcatgttgtgcacatgtaccctaaaacttaaagtataatt

SEQ ID NO: 26845 - DNA, 305 bp, Homo sapiens
cccactctaacctgtctgctatacctactcagtgctgacacccgtgcaggtgccaccagtgtgctcttcagtctagccgggctggactgctgctatcacctttatctgccctatcacttcctacctgtgcatgcggctcatcttcttcccacagcctggactgcttgtccattttagctcctcctcaccaaatcctccccacccttgaagagccacagctgaaacgagccctccaggaagccttctatgatctacaaccagaaagaatccttcttttttttttttttttttcaactgccataccc

SEQ ID NO: 26846 - DNA, 1417 bp, Homo sapiens
gtcaggccacaccggtggtctgggctgtggcgcgcgggtcggggcccgaggcgggcggccaggaaggtacggaccacgagcagccggccgcgcccccaagcctcggtatcttcgagacctgatgaccttcgaggatgtggccgtgtacttctcccaggaggagtgggggctcctggacacagcgcagagggccctgtaccgccacgtgatgctggaaaacttcacacttgtgacctcacttggactctctacctcccgacctcgtgtggtcattcaacttgagcgtggcgaggagccctgggttcccagtggaaaggacatgaccctggccaggaacacctacgggaggctcaactctggttcctggagtttgacagaggatagagatgtttctggagaatggccacgagctttcccagataccccacctgggatgactactagcgtcttcccagttgccgatgcctgccacagtgtaaaaagcctgcagcgacaaccgggtgcctccccatctcaggagagaaaacccacgggggtgtcggtgatctactgggagaggctcctgctaggctcgcgcagtgaccaggccagcatcagcctgcgactgacctccccactcaggccccccaagagcagccggcccagggaaaagaccttcacagagtaccgggtgcctgggaggcagcccaggacgcctgagcggcagaagccatgtgcacaggaggtccctgggagagccttcgggaatgcctcggacctgaaggccgccagtggtggcagggatcgcagaatgggcgcagcttggcaggagcctcatagactcctcggtggccaggagccctcgacctgggacgagctgggcgaggctcttcacgctggggagaagtccttcgaatgcagggcgtgcagcaaagtgttcgtgaagagctccgacctcctcaagcacctacgcacccacaccggggagcggccctacgagtgcacccagtgcggcaaggccttcagccagacgtcgcacttgacgcagcaccagcgcatccacagcggcgagacgccctacgcgtgccccgtgtgcggcaaggccttccggcatagctcctcgctggtgcggcaccagcgcatccacacggccgagaagtccttccgctgctccgagtgcggcaaggccttcagccacggctccaacctcagccagcaccgcaagatccacgcgggtgggcgtccttatgcttgcgcacagtgtggccgccgcttctgccgcaactcgcacctgatccagcacgagcgtacgcacacaggcgagaagcccttcgtatgcgcgctctgcggtgctgccttcagccagggctcctcgctctttttgcaccagcgcgtgcacacaggcgagaagcccttcgcctgcgcccagtgcggccgc

SEQ ID NO: 26847 - DNA, 341 bp, Homo sapiens
tgttcgttttattatttttttaatttttaaagattttcttttccccccttttccccctcccggccactccggtttgtgtttgccacaagactcataattcctttagaaagtggagtcgaattcataaaagtgatggggggagagcgcggagagggaaggctgggagcccagggagtcttcactacctacactgccgctcagctcccggcgcgagtggaggtcggggtggggagacgcgactcctgcccgggatggctgacactctgcgagccccggcgccccgcggccgatagaaccatagcgcggagggcgcggacggctcgcgcgtgcggatcggcgct

SEQ ID NO: 26848 - DNA, 921 bp, Homo sapiens
  misc_feature (398)..(398): n is a, c, g, or t
  misc_feature (552)..(552): n is a, c, g, or t
atgtattcatttatggcaggatccatattcatcacaatatttggcaatcttgccatgataatttccatttcctacttcaagcagcttcacacaccaaccaacttcctcatcctctccatggccatcactgatttcctcctgggattcaccatcatgccatatagtatgatcagatcggtggagaactgctggtattttgggcttacattttgcaagatttattatagttttgacctgatgcttagcataacatccatttttcatctttgctcagtggccattgatagattttatgctatatgttacccattactttattccaccaaaataactattccagtcattaaaagattgctacttctatgttggtcggtccctggagcatttgccttcggggnggtcttctcagaggcctatgcagatggaatagagggctatgacatcttggttgcttgttccagttcctgcccagtgatgttcaacaagctatgggggaccaccttgtttatggcaggtttcttcactcctgggtctatgatggtggggatttanggcaaaatttttgcagtatccagaaaacatgctcatgccatcaataacttgcgagaaaatcaaaataatcaagtgaagaaagacaaaaaagctgccaaaactttaggaatagtgataggagttttcttattatgttggtttccttgtttcttcacaattttattggatccctttttgaacttctctactcctgtagttttgtttgatgccttgacatggtttggctattttaactccacatgtaatccgttaatatatggtttcttctatccctggtttcgcagagcactgaagtacattttgctaggtaaaattttcagctcatgtttccataatactattttgtgtatgcaaaaagaaagtgagtag

SEQ ID NO: 26849 - DNA, 688 bp, Homo sapiens
atgttaagtcatgtgttggatcaagccttttcttgctaaaacccttccagtgactttccacctccttagagtaaaatccaacttccttgctttctgcaaggccctgggggatacggtttcttctcaccttccctccttgtgtcagaccactttgcctatgcttcctccactccagtcacactggtcctccttccagtcctccagtagaaggctaattcttgctggcaccatgttttggctggggcttctgcaaaccactgggaagcctttggaaagcttgaagctggcatgatttgattaagaagaaatgaatgaatgaatgaatggatgaatttacatcgaattgaggagaaagcacttctttttttttcacaaacaggaacttaggcattttgcagagcactctgaaatgttttaaatgtcagtgattgataaacgtattatgaactagtgagaggtctttctaagtgtatttacaatgagtttaaatacagtcgagttaggattagcattctcagaacagacctgaatccaagcttagaaactggaatttactcttaactcgctccctcaacagccttctcacgtctctcgcacacccactaccgggttacccatttacgcgcaaccccctccctcgcacatctctcccttctcactgacccctcccacccttcccccgaccccc

SEQ ID NO: 26850 - DNA, 761 bp, Homo sapiens
atgttaagtcatgtgttggatcaagccttttcttgctaaaacccttccagtgactttccacctccttagagtaaaatccaacttccttgctttctgcaaggccctgggggatacggtttcttctcaccttccctccttgtgtcagaccactttgcctatgcttcctccactccagtcacactggtcctccttccagtcctccagtagaaggctaattcttgctggcaccatgttttggctggggcttctgcaaaccactgggaagcctttggaaagcttgaagctggcatgatttgattaagaagaaatgaatgaatgaatgaatggatgaatttacatcgaattgaggagaaagcacttctttttttttcacaaacaggaacttaggcattttgcagagcactctgaaatgttttaaatgtcagtgattgataaacgtattatgaactagtgagaggtctttctaagtgtatttacaatgagtttaaatacagtcgagttaggattagcattctcagaacagacctgaatccaagcttagaaactggaatttacatataaatagaaaattaaatcagttttctaaacaggtatttttgaaaatccaataacaggttaacaaatttaaggtttatacaaatacagagaatatttttgacttaattttaattaaacttcatgaagtattcgattgataaatgggaatggaacaaagcattctctcagcattccaaatagcactgaaagatgttgatggctta

SEQ ID NO: 26851 - DNA, 344 bp, Homo sapiens
ttgtgcactcgttatgagaatctaactaatgcctgatgacctgaggtggaacagtttcatcccgaaaccatccctcacctcccacgacctgccgcaatccatagaaaaactgtcttccacaaaactggtccctggtgccaaaaaggctggggacccctggcatagaggctcagcgtgcaaaggtatgtgtcaagtgagtgaggccagggataaggtagagaatgtgagaaaggactcctgctttcagctggctttgtctgctgctaatcctggcccatgaggtgaagcatctagcagagagtgagatgacagatgtacttttgcatctcctaacatgagtccct

SEQ ID NO: 26852 - DNA, 491 bp, Homo sapiens
ataacatacatttatgattgttaagtaaccatgaaatgtgaatgacaagcatatcttgtgtccagatagtttttaaacctcagtttctagtagctcaagaaaaggattaatatcttgttttgatgacttaggttaaagtaaatagcttaagcagctggttgaatagtgttaaaacacttagattggtcaaaattggtcatttactggatattaatctgcatgagacccaatatctggttgcattttatattttattgcacagatgagatcatttgttgtcatgtaacttcagtctacattttcataacagggactcagatgttccgaacatggctatgtgcccaaagtaccaaaatactgcacaaatagtcatttcaagacaatttgccaggggaatgaatttctcttcatattttaggaatctcttttggctccatacagagagttagagagaaaggaggcttggcaagatgtgtgctttgggtctaact

SEQ ID NO: 26853 - DNA, 363 bp, Homo sapiens
taactttatccttgaaggcattttcactggttatggaaaatcctaggttgggaagttattttgtttcaagccctgtgaaagatgtcaattcccattatcttctgtcttcctattgtttctgtggagatggtagctctcagacaaattgttggttgctcgtttgtacatactccccactcccatcctgccctgggtactctaacattttttcactttgtgtttagtttcagcagttttaagataacatgcctaggtcgggcgcgggtgcacgcctgtaatcccagcaccttgggaggccaaggctggtggatcatgaggtcaggagatcgagaccatcctggccaacatggtgaaaccccgtct

SEQ ID NO: 26854 - DNA, 513 bp, Homo sapiens
ccaaacctctggtaaaatactgctgtctttttcctatacatttttacatcattaaaattagagacgggctgggcacggtggctcacacctataatcccaacactttgggaggctgagttgggcggatcacttgagtccaggagtttgagaccagcctgggtgacagaatgagaccctgtcaaagagtatttacaaccctgtatctgttttcctcaactttatgacatagcctttcccatgtaactaaaaactttggctgggtgcagtggctcacacctataatcccagcactttggaaggccgaggtgggaggccaggagttcgagagcagtctgggaaacatagtgagactctgtctctacaaaaacaataagaaaattagctgggcttggtggtgcgcatccgtagccccagctactcaggaagctgaggcgagaggattccttgagcccaggaattcgaggatttgtgctcctgatgctgcactccaacctaggtgacagagtgaaaccc

SEQ ID NO: 26855 - DNA, 494 bp, Homo sapiens
atgactgaagtctctagaaacactgagttttaaccaatatgagacacacgaagaggaaaatgaatgcttgcttcttggaagaactgctaggaaagttagcatttttgcagttctaactaatttagatgtgaggccaagtaaaaatgccatttttttggccattgaatttgaaaatcaaattgattatcctccagaatctctacaaactttgaaatactctctaaggatcaaagaagtcaaagagctatgtgtgtctcagaataatctccttcttctggtcacagtatctttgtctctgccaggtggctcttcatttctttggtagctatttttagacttacagtcattcaccaatatacagttagcagtgttctgatagacacagtatcagtcatattctccgttgagtcataatttcaaactcaacaagatttcagaaaggtataatcatgtaatttctcatattaaaactgagaagagaggccaggcatggt

SEQ ID NO: 26856 - DNA, 788 bp, Homo sapiens
  misc_feature (39)..(40): n is a, c, g, or t
  misc_feature (50)..(50): n is a, c, g, or t
cctttccacacccacccccatgacccccttggactgccnnccttggaacncaccggggccttgccgttctagaactagtggactcctcgcgctgcaggaatttttcacgagctggccctgctgaatggatactaccaggaactagaaaagaactgacttactcacctgctttgcactggcctcctgaaagtccatggtcttaattataccagtttcattattgctctgaattttcatccttgcatgcttttaaggctatctgtattcaaacaacatacagtagcctcagaaataagaggccccttaccattctcaatagagaggtctataatggccacgtgcaatgatttgaaggctatctccaaaacttatcttgaaatttaattgccatcttgctggtgttaagatgtaggactgttaagaggtgattaggccatgagggctccaccttcattaatggattaatgttgttatcaattgagtgaatttgttatcatgagaatgggttagtatgaaagtgagtttggccctctctctcttgcttgctcttgtgttttcctgtccttctgccttctgccatggggtgatgcgctgccaccgccctcaaccccttatgacaatccccacgccacactcttacactaccaagcttcccaccaccatctcctacaaccacactacactctcctataacacacccccaccccacgcctccccctaacgctatctccctacgacctacaccccccccgcacaccctctcagcctccccctcctccccctcctcc

SEQ ID NO: 26857 - DNA, 658 bp, Homo sapiens
  misc_feature (39)..(40): n is a, c, g, or t
  misc_feature (50)..(50): n is a, c, g, or t
cctttccacacccacccccatgacccccttggactgccnnccttggaacncaccggggccttgccgttctagaactagtggactcctcgcgctgcaggaatttttcacgagctggccctgctgaatggatactaccaggaactagaaaagaactgacttactcacctgctttgcactggcctcctgaaagtccatggtcttaattataccagtttcattattgctctgaattttcatccttgcatgcttttaaggctatctgtattcaaacaacatacagtagcctcagaaataagaggccccttaccattctcaatagagaggtctataatggccacgtgcaatgatttgaaggctatctccaaaacttatcttgaaatttaattgccatcttgctggtgttaagatgtaggactgttaagaggtgattaggccatgagggctccaccttcattaatggattaatgttgttatcaattgagtgaatttgttatcatgagaatgggttagtatgaaagtgagtttggccctctctctcttgcttgctcttgtgttttcctgtccttctgccttctgccatggggtgatgacagcctcagattcatgtgtttccctttgatcttccagagaacttagccacttccagaaatctgttcct

SEQ ID NO: 26858 - DNA, 775 bp, Homo sapiens
  misc_feature (39)..(40): n is a, c, g, or t
  misc_feature (50)..(50): n is a, c, g, or t
cctttccacacccacccccatgacccccttggactgccnnccttggaacncaccggggccttgccgttctagaactagtggactcctcgcgctgcaggaatttttcacgagctggccctgctgaatggatactaccaggaactagaaaagaactgacttactcacctgctttgcactggcctcctgaaagtccatggtcttaattataccagtttcattattgctctgaattttcatccttgcatgcttttaaggctatctgtattcaaacaacatacagtagcctcagaaataagaggccccttaccattctcaatagagaggtctataatggccacgtgcaatgatttgaaggctatctccaaaacttatcttgaaatttaattgccatcttgctggtgttaagatgtaggactgttaagaggtgattaggccatgagggctccaccttcattaatggattaatgttgttatcaattgagtgaatttgttatcatgagaatgggttagtatgaaagtgagtttggccctctctctcttgcttgctcttgtgttttcctgtccttctgccttctgccatggggtgatggcggcactaagtccttcatgagatgtgagtgccacactcttagacttccaagtctccagaaccataaaataaacaagtttatactgtttataaattacccaatctcatgtattctcttatagtaaaacataatgaactaagacaaaaaactggtacacagaagtaaggctgttgctataacaaata

SEQ ID NO: 26859 - DNA, 210 bp, Homo sapiens
cctttgtgtgtgacctgtgtgcaatcatatgcacatatatttcatagctcagcagaagacacctcaactggcaccctatcttggtctctaatgccattacccactaaaaggaaccagttcttcaaagacatggccaatttcagggctgaggaagggtagaaaggagatgggcttggaacatcctactacaccaaaaagcaaataagtgct

SEQ ID NO: 26860 - DNA, 491 bp, Homo sapiens
gttggaattcaaacctaggcagaggttggggtcttataccctgccccaccctgcctcctcctatgtagtggctctatttgctcaagtggtggcttgatctgacccatcttttctgtggaaggatctagaccagtctctagggagataactttacccattttgctacaacatcccaagagattaaaatcttacatgaacccacaggagactggcgtttctcttaagtgtgttcttcagagtgctagccctgtaaaatttttctcaaaaagagagttctgttgtagaatgagttgggaaacactgcatgctctatctatacctcccacccactttgaagagatactttgttgatgacatattaatagctccagaagtctttcaagaaaggaacctgaaacacgatttgggagatgctaccaaagactgggttccataaggaaacagctggctttttatctaataatggatttaaatagtccatgagttctcat

SEQ ID NO: 26861 - DNA, 323 bp, Homo sapiens
ttctttttttaatttagtgtatgcgttgaattttatgcttaagatctctcacatcacagtttccaggataagaaaaataaagagccatacacatttttttctgtaaattttgctaaaaaaaatacagtaaacaagggttatttattagtaggtgattaggtattgataattaaattgccattacatttcagcgggaagtcagagtagagaaggaatatgtgcaattaaaatggggtttctattaatacattttgataactcactttctatggcttaacaatttgtaattatttataacaataccagattgtctaccaatgggg

SEQ ID NO: 26862 - DNA, 348 bp, Homo sapiens
cttattttcttgacaatgcatttagaaagatttaaaaatatttttatcttacccagtatcttcagtgttttcagctggggtgagttcagtgggttttggcccaggtattaatctgcattactgtttccccatctatgcttcaggaatgcagggactctgttcctttagttaattaactgctgtatccttcatgcctgaaaccgtgtccagtatgtttactgtttgtctaatgagtgattggctatactctgctgtgatgtactcttttgcatttttaaggaaattatagcaatgaaatagtcaaattctagcctgggcaagacaatgagaccctgtctataaaaaaaa

SEQ ID NO: 26863 - DNA, 365 bp, Homo sapiens
ggcctaaagcaaaaggttaagccaagtcagtcatcagtccgtaggacattatgacttaacatttaacattgagtggttctgtttatgagcattgtaaccatagtactaagttttttctttggtttgttttttttttttttttagaaacaaggtcttgctctgtcacccagggtgagtgcagtggtacaactgtagctcactgtgacctcaaactcctgggctcaggagaatcttctgctttggtctcctaagtagctgggactacaggcttgcaccaccataccagcctggccaacatggtaaaaccctgtcgctactaaaaatacaaaaattagctgggcatggtggtgcatgcctgtaatccc

SEQ ID NO: 26864 - DNA, 373 bp, Homo sapiens
ccctctatcgtccaggctggagtgcagtggcaccatcacgactgactgcagcctcctgcgccccgtgatcttcccacctcagtgccctgagtaactgggaccacagcttcccatgggtggccagccgaatgcattatgggagaaagcaggtctcgtggataatatttctgaagatcggagcaggttgtcaggtccacgtcggccatgactgcagcacgctccggaggcagcagggggcaccctggagttcgcatcctccttcaggcccgcggcatctcccctggctccaccatccccaggtgtctcaggttggacgcacggtagttcgctatggccatttctgattaaagacagaacaaatggattgtccgga

SEQ ID NO: 26865 - DNA, 423 bp, Homo sapiens
gtggcccgtaatggttttgagtacagtgcttaggaatgtgaagaagtccaagaaacatctgttcctaaaaatcatctagatttttaagagttcgagaaaggattggggcttgtcaaaaggaaatagggattgggtgcagtggctcacacctgttaacccagcacttcgggaggctgaggtgggcagatcacttgagcccaggagttcaaaaccagcctgggcaacacagtaagaccctatccctacaattaattagttaataagccaggcgtggtgtcatgtgcctgtatgtaatcccagctactcagaaggctgaggtgggaggttcacttgagcctggatatttgaggctgcagtgagctatgatcactccattgcatttcagcctgctcagtagagtgagaccccgtctctttttattta

SEQ ID NO: 26866 - DNA, 447 bp, Homo sapiens
ccatatcttgttcatgtaggctctttcatgactgtttttttcttgtgtgttttattatttcaacaataggttcatctttagtaacagtgattttctctagtattcctacatagggtctttaaggcaaccttatgcagtcatctatattttctttgctgggcctttcatggatgctgggccatttttaagttaattcctcactccatggaggaatatctttgggaccccactcttacaagcttcatgtttctttttgtttcttgtccccaggccagtgagcagagatactctgagcctgttttcaagatatgtgtcttctgggctgctggttttatgcagggagctctgtgagagtttccttgaccagggcttgtggccatagtggctactctctcaaggccttgtcacagtggttctcaggacaggctgtacactggaatcaaatgg

SEQ ID NO: 26867 - DNA, 263 bp, Homo sapiens
ggtgctgtggtgcacgcctgtaatcccagctactcaggaggctgaggaaggagaattgcttgaacccaagaggcggaggttgcagtgagccaagatcgtgccactgcactccagcctggctgacagagcaagaatccatctaaaaaaaaaaatgtttttaggcatttcattacatttgcaatatatttatctaataatataatcttaatcactgaaaatgtataaacatgtaaattaaaggtaaacataaattgaaagtatca

SEQ ID NO: 26868 - DNA, 504 bp, Homo sapiens
tggggagtgttctttaatttaaactaagtagattttctgtaggaaatctgaaaaagaacaatctgtatactaacatacaccgttacatatgaccactgaacacctctaagtgaagtgtgaagatgaactagttaagatgttctccaagtgtgctctcaagaccagcagcatgagcatcctctgagaactggttaggaagcatattctcaagggccagccatggaagctcacacctgtaatccctgccctttgggatgccatggtggcaggattacttgaggccaggactttgagatcagcctgggcaacatagtgggaccctatctctacataaaatttaaaataattagccaggtgtggtgatgcatacctgtggtcccagctacttgggaggccagggtgggaggatcacttgagcccgggaggtcaaggcaacagtgaggtatgacagggccactgcactccagcctagatgacagagtgagaccctatctcaaaataatt

SEQ ID NO: 26869 - DNA, 425 bp, Homo sapiens
gatgcacaaatcctgaagaggggagaagcttcctccacctccaccctcacccctacatcttctctagggcaggagtcatcacagcccctggtttagatgcttccctgggtggcccttttgaaagtatgtggaccctaagagacaggagactttgagtgcatggatgggggataatttgcttttgcagaaggacagaaaatttatctctaggttcttcctttattcggcagttaggaattacatcctctgtattgcacagaagaatctaccatattcagagcactgagtacatggattatattcactaaagattggagagccaaaagtttctctgcaagagtgacctgatctagtaagaatgtcaaaattgttactatatttgtacccatgctcttcggtttagagggcaggtgcttccgtgtgta

SEQ ID NO: 26870 - DNA, 392 bp, Homo sapiens
tatatcttcttcagagaaatgtctattcaagtcctttacctattttttgttttgttttactaattttaaaattttctctctaataagcactgtccccagacttcaatttgcccattttttgattggattgtttttgttgttgagttgtagtagctctttatgtattctgattattaacccccatcacgtatgtagtttatgatttctttctcccatttctttcattgtctttttactctgttatttccgttgctgtgcagagggttttgagtttgatattagccccatttgttcatattttcttttgttgcttgtgcatttggtgttatatccaagaaatctgccaaatccactgtcatgaagctttccccctttgtctcttataggtcttt

SEQ ID NO: 26871 - DNA, 542 bp, Homo sapiens
ccgggccgctgactctcttggctcccgaagggctgttgctttccgcagttgcagttggaattctcgccacacttcactttaaaaatgccaagacaaaatcacagcacactgggcttgagaacacaggcagtctttcagtgtgggtctgatgtttgctattttagctcagctccgcctggcagggtgtggtctgctgacagagggtatgcaggcagctggggtatgtggagtatgacgtttgaaagtggcatggtggtggctgggcgctctggctcatgcctgtcatctcagcactttggggggcccaggcgggtggatcacctgaggtcagcagttcgagaccagcctgaccaacatggtgaaaccccgtctctactaaaaatacaaaaaatagctggacattgtggcaggcatctataatcccagctactcaggaggctgaagcaggagaatcatttgaatctgggaggtggaggttgcagtgagctgagatcgcgtcactgcactctagcctgggcgacagggcaagactctgtctcaaa

SEQ ID NO: 26872 - DNA, 429 bp, Homo sapiens
acatgtaatgaaattccgattaaataatcttaagaatctacttaatacattaatttcttgaagccattgaatgtttcaacaatagaacatttacataaaatataaaatatttaactatgagtaattgataggtatttacttgttcttcataaatgggataatataagtgatttgtgttggattcataacatcttagagactatgtagtatcttgaggtagacacataaaaagcattaagacggggcttcttaaaagtttttaaaatataggaagtagcctcttatgtgtattatgaattatttaacctgcgaataacatgccccctagcttttaaaaatttatgacagaagtattttgttgaaacttaataaatgtcacacattttcaactttaatgagtggtttaaagggaatttcatacattcagtg

SEQ ID NO: 26873 - DNA, 468 bp, Homo sapiens
gtttaaacaaatgcttttcataattgctgtcttccccagccagaaactaaggcctgctgtgtgctttgggtgtgtgggtgggtgggttgctgggggaagggtccttgtaatattcggggagttttggctggggccaattatttgttcataattctaagtatttaaacaatgctacgtattttctgtcttttatggaggcagatatctctaagtggcccctcctggtgctggggtatgatcaaaagggacttctgtaagttttcactggactgctttaattttctatcagaacagtgtatttagtacttgattaagtaaaaaacaagaaaaaaccaaaactaaaaatctagtaacacatgttgatgatttgaaaaagaaaccaaaactgagaagggtgtgattgaagagcacctcccacttctcccttttcactcgcccccccgcatccataaacacactgaacagact

SEQ ID NO: 26874 - DNA, 714 bp, Homo sapiens
gttgtatggccatagctatccgaaaagcaagagacaaagcaagacaaatattcacacaaaaatgaagtgtgtcctctggagggtcatatatacaatttcttttgtacagatgaaaatcaatcagctgcttagatttagaaatctactcttgctggtctttgtaagttgcatgaatatttgactttgaaaaaatatcttaacgacatggggcaaaaagtgcaatctaaatggtagcctttactaatgtgtgtggaaagaggtgttcctcattatctaatatttcaatgtgttaagagtttaatttttttgttatcattaaaaaagacaggattataaagagatatcaaagcacgattttagataacctaaacggcccagcctatacgaagttgattatatctcgatgtctgtaaaagattgctgttcttggagtcttgaggtcttgtgaattgatttcctgctttctttcatttttttcaatttaagtaataatacatttgttatattcctttcagtgtaagtttctatttggacaattttatgggaacatgtgcattctctatgtgagcttctatcatattcctgttttattagcagaacctaaaggaatttatttaatgatgttgtgacattactgctttttcttttttcttttcttagttcatatttgcattttcgttcaaggatatgcttagcaataaaatgttcttccca

SEQ ID NO: 26875 - DNA, 544 bp, Homo sapiens
ttattttgtgatataaggtaacatatatccagggattaggacatgtatctctctgagggccactgttcagctgaccacagaggtgactataatgtactcttgcactcatagaccttaccatgaattagacagacatccatgattcaagtgtgtgaaatttgctgtcacacaaagaaaggactgagggaacatggaggatgaatttaattttgttcgaagggattggggatgacatgcaaaatgaagaaaaatggcttgaataagtggggaagagtatatcaagtaaaatagcaaaagcagaggcattgaaggatatgccaaagtcagacatggcaagtcatgctgtgacgattcaccagaaaggtgccgggctgggagaagggggatgtggcaagaaatatggcagaaaaggacaggctggggccatattatggagagccttgaatgatgagccaagagttagaatttaacttgccagatagtgtggagcccttagggctttctgagctggggaatacgtgattagatttgtgtgaaatagaga

SEQ ID NO: 26876 - DNA, 368 bp, Homo sapiens
taaaactggacacaagaacacaaaacgcttgggctgctgagagattagaccaacaaccctccacggctacaaaccttttccacgttatatggcacgttataagtgggtgttcctagtgatggttctgattttttttttaaaaagtctaaatatgtttaatgttgtctcagaagacaaaatatattttagacagatattcctcagtgatgagtaagcctcagctatctggaaaattcatgcaggcgccagagatcattactgagtaattcaagctaataactgcgtcatgctggttgtaccctgcatgccaatatctgctaaaagcagcaccacgaaagggaaatacgaatctcactaagcactcgccc

SEQ ID NO: 26877 - DNA, 399 bp, Homo sapiens
tttttttttgagacagggtctagttctgtcacccaggcgggagtgcagtggcatgatcacggctcattgcagccttgacctccccaggcttaagcaatcctcccaactcagccttccaattagctgggactaccgacatgcaccaccacgcctggctaattgttgtatttttcatagagatggggttttaccacattgtccaggctggtcccaaactcctggactcaaacgagccacgtacctccgcctcccaaagtgctgggatgacaggcatgagccaccgaacccagccctgagattctatctccgggaataactgtatgaaggagagggcgttgctgagagggaatttaaaacacaaaaccctgaagcaatccttcttggagaacagggagcaac

SEQ ID NO: 26878 - DNA, 395 bp, Homo sapiens
tttttttttttggcgatagagtatcactgtgtggcccaggctggagggcagtggcgcaatcttggctcactgcaacttttgcctcctgggttcaagcaattctcctgcctcagcctcccaagtagctgagattacaggtacccactaccaggccagctaatttttgtatttttagtaaagacagggtttcaccatgttggccaggctggtctcgaactcctgacctcaagtgatccacctgactcagcctcccaaagtactgggattacaggcgtgagccaccacgcccagccatgacagcaaacttaatcaatgttgtatgtgttctgactgctctaccaactggccattcctacatctctctccctctcgtatagcctcccttttccctgaga

SEQ ID NO: 26879 - DNA, 472 bp, Homo sapiens
gaaaaagtcagtggttccagcatttgctttagtctgtgacttaaatggattataactcttgaccgctgacatttaccaagataaatcagtggtcatagatgtggagcttgatgtctcttcggctctgggaccaatccccttggacaaaagttttcctgtgttcttagtattctgaactggctacagcaacttttaggaaaataaaggttacaaaaaaagttctgacaatttgtttgcttttacattttcaaatttgtgaaatgtagagataattttgttttcaaatctttgtaattccctgaagcaaatactttcaagccagttgcaaaatgctgctttagaaataattcatataaacatgcttctctatttaatcacaaggggagatgtggagaatggatgttttattttttcagtagtttttgctctataaaaatattaaattgctattatgattactaaagataaaaaa

SEQ ID NO: 26880 - DNA, 447 bp, Homo sapiens
gatgtgttgacaaggactatacagagatttagttaaacccagtgtccagcacctgatgaaaaagcctgatgttacgttggctggactttgctctgtgtgcactgttaacccattgtactaccaggaaagagccatgtccattggtacttaaagaagaactaaagggccgagcacagtggctcacaccggtaatcccagcattttgggaggctgaggcgggcagatcacttgaagtcaggagttcaaaaccagcctggccaatctggtgaaaccccgtctctactaaaaatacaaaaattagctgggcttggtggtgcgtgcctgtagtcccagctacttgggaggctgaggcagattgaatcgcttgaaaacccaggaggcggaggttacagtgagccgagatcacgccactgcactccagcctaggtaacagagcaagactccgtc

SEQ ID NO: 26881 - DNA, 509 bp, Homo sapiens
  misc_feature (89)..(89): n is a, c, g, or t
caatgagccttgtgcagttctgaataagcctgagtgggtgcagctgagagagattagtgttttacagtgcaccttcacgagcacttgangaacaggccagggacattcacatcacatggggatgcagaccccacatcccatgcccactgggtgctcaggccccctgaaagcaaaatgccaggcaggccaccttgagtacctcgtgtttcaactcatctatgaggtcctgaggtcactaaggataaatttagttcccattttatgacacaagtatctgagggtcagatatcccaggatttatgagccctatgaggattagcaaatgtacatacccatagagtgataaaaatgaggtaatgaagcaagcagtagtttgaatctttgcttcataacatgctaattttgctactttagaaaaatttatagactttttcaaagcttaatttcttcattatgtcttttcttatataaaacttcatcatgggtttgtgtaggggtgaaaaaaaaaa

SEQ ID NO: 26882 - DNA, 2707 bp, Homo sapiens
cgctgggaatcctgctcctcctcaggtcctggcaagtttcagggcccctccctaggccttacttaaaaggctgaggcatccttggaggaacaggcagactccacagctcccgccaggagaaaggaacattctgaggggagtctacaccctgtggagctcaagatggtcctgagtggggcgctgtgcttccgaatgaaggactcggcattgaaggtgctttatctgcataataaccagcttctagctggagggctgcatgcagggaaggtcattaaaggtgaagagatcagcgtggtccccaatcggtggctggatgccagcctgtcccccgtcatcctgggtgtccagggtggaagccagtgcctgtcatgtggggtggggcaggagccgactctaacactagagccagtgaacatcatggagctctatcttggtgccaaggaatccaagagcttcaccttctaccggcgggacatggggctcacctccagcttcgagtcggctgcctacccgggctggttcctgtgcacggtgcctgaagccgatcagcctgtcagactcacccagcttcccgagaatggtggctggaatgcccccatcacagacttctacttccagcagtgtgactagggcaacgtgccccccagaactccctgggcagagccagctcgggtgaggggtgagtggaggagacccatggcggacaatcactctctctgctctcaggacccccacgtctgacttagtgggcacctgaccactttgtcttctggttcccagtttggataaattctgagatttggagctcagtccacggtcctcccccactggatggtgctactgctgtggaaccttgtaaaaaccatgtggggtaaactgggaataacatgaaaagatttctgtgggggtggggtgggggagtggtgggaatcattcctgcttaatggtaactgacaagtgttaccctgagccccgcaggccaacccatccccagttgagccttatagggtcagtagctctccacatgaagtcctgtcactcaccactgtgcaggagagggaggtggtcatagagtcagggatctatggcccttggcccagccccacccccttccctttaatcctgccactgtcatatgctacctttcctatctcttccctcatcatcttgttgtgggcatgaggaggtggtgatgtcagaagaaatggctcgagctcagaagataaaagataagtagggtatgctgatcctcttttaaaaacccaagatacaatcaaaatcccagatgctggtctctattcccatgaaaaagtgctcatgacatattgagaagacctacttacaaagtggcatatattgcaatttattttaattaaaagatacctatttatatatttctttatagaaaaaagtctggaagagtttacttcaattgtagcaatgtcagggtggtggcagtataggtgatttttcttttaattctgttaatttatctgtatttcctaatttttctacaatgaagatgaattccttgtataaaaataagaaaagaaattaatcttgaggtaagcagagcagacatcatctctgattgtcctcagcctccacttccccagagtaaattcaaattgaatcgagctctgctgctctggttggttgtagtagtgatcaggaaacagatctcagcaaagccactgaggaggaggctgtgctgagtttgtgtggctggaatctctgggtaaggaacttaaagaacaaaaatcatctggtaattctttcctagaaggatcacagcccctgggattccaaggcattggatccagtctctaagaaggctgctgtactggttgaattgtgtccccctcaaattcacatccttcttggaatctcagtctgtgagtttatttggagataaggtctctgcagatgtagttagttaagacaaggtcatgctggatgaaggtagacctaaattcaatatgactggtttccttgtatgaaaaggagaggacacagagacagaggagacgcggggaagactatgtaaagatgaaggcagagatcggagttttgcagccacaagctaagaaacaccaaggattgtggcaaccatcagaagcttggaagaggcaaagaagaattcttccctagaggctttagagggataacggctctgctgaaaccttaatctcagacttccagcctcctgaacgaagaaagaataaatttcggctgttttaagccaccaaggataattggttacagcagctctaggaaactaatacagctgctaaaatgatccctgtctcctcgtgtttacattctgtgtgtgtcccctcccacaatgtaccaaagttgtctttgtgaccaatagaatatggcagaagtgatggcatgccacttccaagattaggttataaaagacactgcagcttctacttgagccctctctctctgccacccaccgcccccaatctatcttggctcactcgctctgggggaagctagctgccatgctatgagcaggcctataaagagacttacgtggtaaaaaatgaagtctcctgcccacagccacattagtgaacctagaagcagagactctgtgagataatcgatgtttgttgttttaagttgctcagttttggtctaacttgttatgcagcaatagataaataatatgcagagaaagagaaacaaaaaaaaa

SEQ ID NO: 26883 - DNA, 2678 bp, Homo sapiens
ggagagtcccacctctaacatctcctgtaggcctggcaatggcaggcaggaaagacagaggaaggaaggagggagaagggaaggagtgaaggaaggagtgaaaaaggggagtctacaccctgtggagctcaagatggtcctgagtggggcgctgtgcttccgaatgaaggactcggcattgaaggtgctttatctgcataataaccagcttctagctggagggctgcatgcagggaaggtcattaaaggtgaagagatcagcgtggtccccaatcggtggctggatgccagcctgtcccccgtcatcctgggtgtccagggtggaagccagtgcctgtcatgtggggtggggcaggagccgactctaacactagagccagtgaacatcatggagctctatcttggtgccaaggaatccaagagcttcaccttctaccggcgggacatggggctcacctccagcttcgagtcggctgcctacccgggctggttcctgtgcacggtgcctgaagccgatcagcctgtcagactcacccagcttcccgagaatggtggctggaatgcccccatcacagacttctacttccagcagtgtgactagggcaacgtgccccccagaactccctgggcagagccagctcgggtgaggggtgagtggaggagacccatggcggacaatcactctctctgctctcaggacccccacgtctgacttagtgggcacctgaccactttgtcttctggttcccagtttggataaattctgagatttggagctcagtccacggtcctcccccactggatggtgctactgctgtggaaccttgtaaaaaccatgtggggtaaactgggaataacatgaaaagatttctgtgggggtggggtgggggagtggtgggaatcattcctgcttaatggtaactgacaagtgttaccctgagccccgcaggccaacccatccccagttgagccttatagggtcagtagctctccacatgaagtcctgtcactcaccactgtgcaggagagggaggtggtcatagagtcagggatctatggcccttggcccagccccacccccttccctttaatcctgccactgtcatatgctacctttcctatctcttccctcatcatcttgttgtgggcatgaggaggtggtgatgtcagaagaaatggctcgagctcagaagataaaagataagtagggtatgctgatcctcttttaaaaacccaagatacaatcaaaatcccagatgctggtctctattcccatgaaaaagtgctcatgacatattgagaagacctacttacaaagtggcatatattgcaatttattttaattaaaagatacctatttatatatttctttatagaaaaaagtctggaagagtttacttcaattgtagcaatgtcagggtggtggcagtataggtgatttttcttttaattctgttaatttatctgtatttcctaatttttctacaatgaagatgaattccttgtataaaaataagaaaagaaattaatcttgaggtaagcagagcagacatcatctctgattgtcctcagcctccacttccccagagtaaattcaaattgaatcgagctctgctgctctggttggttgtagtagtgatcaggaaacagatctcagcaaagccactgaggaggaggctgtgctgagtttgtgtggctggaatctctgggtaaggaacttaaagaacaaaaatcatctggtaattctttcctagaaggatcacagcccctgggattccaaggcattggatccagtctctaagaaggctgctgtactggttgaattgtgtccccctcaaattcacatccttcttggaatctcagtctgtgagtttatttggagataaggtctctgcagatgtagttagttaagacaaggtcatgctggatgaaggtagacctaaattcaatatgactggtttccttgtatgaaaaggagaggacacagagacagaggagacgcggggaagactatgtaaagatgaaggcagagatcggagttttgcagccacaagctaagaaacaccaaggattgtggcaaccatcagaagcttggaagaggcaaagaagaattcttccctagaggctttagagggataacggctctgctgaaaccttaatctcagacttccagcctcctgaacgaagaaagaataaatttcggctgttttaagccaccaaggataattggttacagcagctctaggaaactaatacagctgctaaaatgatccctgtctcctcgtgtttacattctgtgtgtgtcccctcccacaatgtaccaaagttgtctttgtgaccaatagaatatggcagaagtgatggcatgccacttccaagattaggttataaaagacactgcagcttctacttgagccctctctctctgccacccaccgcccccaatctatcttggctcactcgctctgggggaagctagctgccatgctatgagcaggcctataaagagacttacgtggtaaaaaatgaagtctcctgcccacagccacattagtgaacctagaagcagagactctgtgagataatcgatgtttgttgttttaagttgctcagttttggtctaacttgttatgcagcaatagataaataatatgcagagaaagagaaacaaaaaaaaa

SEQ ID NO: 26884 - DNA, 1376 bp, Homo sapiens
ggagagtcccacctctaacatctcctgtaggcctggcaatggcaggcaggaaagacagaggaaggaaggagggagaagggaaggagtgaaggaaggagtgaaaaaggggagtctacaccctgtggagctcaagatggtcctgagtggggcgctgtgcttccgaatgaaggactcggcattgaaggtgctttatctgcataataaccagcttctagctggagggctgcatgcagggaaggtcattaaaggtgaagagatcagcgtggtccccaatcggtggctggatgccagcctgtcccccgtcatcctgggtgtccagggtggaagccagtgcctgtcatgtggggtggggcaggagccgactctaacactagagccagtgaacatcatggagctctatcttggtgccaaggaatccaagagcttcaccttctaccggcgggacatggggctcacctccagcttcgagtcggctgcctacccgggctggttcctgtgcacggtgcctgaagccgatcagcctgtcagactcacccagcttcccgagaatggtggctggaatgcccccatcacagacttctacttccagcagtgtgactagggcaacgtgccccccagaactccctgggcagagccagctcgggtgaggggtgagtggaggagacccatggcggacaatcactctctctgctctcaggacccccacgtctgacttagtgggcacctgaccactttgtcttctggttcccagtttggataaattctgagatttggagctcagtccacggtcctcccccactggatggtgctactgctgtggaaccttgtaaaaaccatgtggggtaaactgggaataacatgaaaagatttctgtgggggtggggtgggggagtggtgggaatcattcctgcttaatggtaactgacaagtgttaccctgagccccgcaggccaacccatccccagttgagccttatagggtcagtagctctccacatgaagtcctgtcactcaccactgtgcaggagagggaggtggtcatagagtcagggatctatggcccttggcccagccccacccccttccctttaatcctgccactgtcatatgctacctttcctatctcttccctcatcatcttgttgtgggcatgaggaggtggtgatgtcagaagaaatggctcgagctcagaagataaaagataagtagggtatgctgatcctcttttaaaaacccaagatacaatcaaaatcccagatgctggtctctattcccatgaaaaagtgctcatgacatattgagaagacctacttacaaagtggcatatattgcaatttattttaattaaaagatacctatttatatatttctttatag

SEQ ID NO: 26885 - DNA, 576 bp, Homo sapiens
tagctccctctctgcattattaggagtcaggtaactggggtaccagtcccacctctgcatctcatgctctccacaactcaggtccagcacatccattctcaaagtctgcctgctcacctgtggaatgagagtctggactaagggaactcccagccccctcctcctgacactgtgagtttttcctttctcgaaggctactggtaggccccactggagactgaaaggggaagattgcagtaaaaggcgcaggctgtcgaaggataacatgtccttctacatcattcactagcctaggatgccagtcaacttcattcttggaacctttattttccaatttgcgggcattttgcaataggctgattttaatcacattttatactttttttcctttgttgcagaaatgtttgtattacctgttctttgaatgcagcatctgtagaccacaaggtctttccataggaactaagcctgttatattgctgctagttttgagtaaatgagctgaatcttgcagccaagcctcagtgcaaacaaaaacattttctggccaaacattttctggttattcaactccat

SEQ ID NO: 26886 - DNA, 1369 bp, Homo sapiens
caaaaatgtaggcttctctgtttctttgcagtgaactaaaacttcttatgaactctggttatactgaaaacaggagtcatgggagacttgatcttgcttaaaggatattttagtctttgatttctttgaggtaaatgttcaatctttttgcgtatcttcctcctaccttttcatagccaagatgacagctgaacaggctctcatcttaaacctgaacaggcatcagaatcacttggagagcttgttaaaatacagattgatgggccccacccccagaatatctgattccatacatatgagtcagggcccaagaatttgcattacaaatgcattctcagatgatgcctttgctagtctgggcaacacactttaagaatagttggtataacagaaagcttcttgtgtgtcttgtgtgtctatgtggacaggagttgtgggcttcagattcatcctctgtgtcctctggtctcagttgtgaggagggggaagagtgggaagtctggccttgtctctggactcctgagtaaataatgtgctgatgcagtgttgggcccagcaggccttttagagggtcatgccagcacccactgctgaggtctgtagtctctaccatctgccctacacataataagtacccttcctctgctattctctcttgctgaccccaagcccaccaatgaattaattgaatcaagagttccaaggcattaggttaaagacattgaaaaatatatccatttattttttcaaatatacataaagaaatccatacaaactaaggccaattgtggcaaaactacatgagacttgactaaaataacccacaattcaaatttccttcataacatttctacctataaatttgattcagagaaattacacttcatagataaactagccataaaaaagattacagcggcaaaagctatcatcagtaatatttgatatgcataagaaaccgtgaggaaccaaatcatggtaaaattgattctaaggaaatggttgcacaaaaataaaagtgaaatggtattttttaaaaggaagtggttcaactgtattgcatagaaaatgaatcaaggaattacattggcttaaatggcattagctcaaaaaagtgttctcaaaaattaatggaaattggtgtattctgattgagatatgttttattcaataacatggagtcaaaacaagaagattttttaaatgtcctctgttcccatggagcttgcattctgcaagagcaacagacatcaaaaagataactgggcaaatgaccacatgattgcagttgggataagtgctaagtctagggtaatcttcatatcaccctgtggcatgtataaaggaagaccttttgctggtgttttgt

SEQ ID NO: 26887 - DNA, 161 bp, Homo sapiens
acatggttttaatcattatagtttactgttgtgaaataagggagaaaaacatctacatttgaaaaaaggacaaataaaaaataaaaatggtgagaaaaggtctgtgatatcttgatatttatctttctgatattttgaactgtgaagtatctattaaattc

SEQ ID NO: 26888 - DNA, 426 bp, Homo sapiens
accttcacacttactagtttggccaggtgtacagttctagtttgaaagtccttttccctcagaactttaaagagattgttcccttaagttccagctttttattaaaaaaaaaaaaatagagtttcccctcacttctctttaaaagtttttaggggcggggcgcgatggctcatgcctgtaatcacagcactcctgatcacaaggtcaggagattgagaccatcctggccaacatggtgaaaccctgtctgtactaaaaatacaaaaaattagccaggcgtggtggcgggcgcctgtatagtcccagctactcgggaggctgaggcgggagaatggcatgaacccgggaggtggagcttgcagtgagccgagatcgtgccactgcactccatcgagcctgggcaacagagcgagactccgtctcggg

SEQ ID NO: 26889 - DNA, 759 bp, Homo sapiens
aagcacacttttatttttcatcccttttagccagaaaattgcattcttattgactcttagaccaagaatgatcctcagtcatttagatcacaaaattaagaaatatttacttttccatagaaatattaaatggttataaaaattataacacccctatgttcctaaatggtgctttattaaaaatgtagatatacattcttttctgttttcagtctgcatttgaagtgtttgacaccgtcaggtgttctggatttaaatgataaaaagcattatccaaaaggaattagtgaccctgaacttaaaaacatctaatagtctctctccctttttctttttactagacgtgtgcctatagtttgttcatatgaaatagtctttatgcttcagatgcaaagtgtaatgtacataacagtatatacttagtttttcaatcatatgagctttttgccaaccttaaagataaatcattggctgctttgggcacactgcctattgggcagtcctgctccacagggagcagtgtaaaaaaaaaaaaagatatgtggtggagattttgtacattaaagatattgctttaaaagcctagtgtatttggctaaatgtggattctccaaggaattacgtcttagttattttgaaaaacatgcatccatttacatggaagacctctccagcacttagaaatttctgaatggggggagcctatggccattgataacacatccaagatatctttgagataagtcaatgtcttccagg

SEQ ID NO: 26890 - DNA, 2453 bp, Homo sapiens
ctggccaagggcgtccactagacaactctatcccttgcgctgaagctcaatcgtgctgagggagagctttcttaatattactgtgttgctcttagcccttctctgggttaggatctgtcagcatttctatgataaactcctattctcaaaggtttttaatttgaccataaaaatgtgccccaggctgaagtttgctatacagggctgtaccaaagagtcaaggtttacttccttctctttccaacttcttccccattctccaaggaaaagaacaacaaaaaaatctggtatggtccctccttaatagtgatttcagaattttggaaagcaccaagatccaagatggtagttttaatgtagttactcattcgcacacattttttaaatttaatgggtcacctggcatatattgtagataacatatcttttctataatttgtaagtcaataatttttttaactgctacatgatatttttttttgcccaaagattttaaaagacttgaagttggtcagttcaaaactcagatttttctacacattgtctgccatgtccattaggagtttggggaaaatactctcacacagacccttactttgcatgcagtttagagggtaagatacgtgcttcttttggggataaagatttccttacttaattgtcaaatttcatggagccattctagtctgttggggaaaatagtgattaaaaccacttccaaaattaacattttttgacaattcagatatgataagaagcaggggaaaataatacactttactcttttcttgcttaaaggcaaagaaatcaatgaaacttgaggacacactaaacatttgataactgcaaatgtgctttaaaaattggttcaatggtgcttacacatgaaacggtaacaaatggggttcctaggacgtcagaaggaatctttagtttgtatgtaattacacactagaggaggaggtgcttttaagccagtcttttatttttaatcatctcaaatatgcaaccatacatgcagtaacattaagggtcgtaaactggtgggaaacaggaacttcagtggagaggcttaaatgcctctggttagagtgggggtttttgtttgtttgtttattgttgggtttcaacactgagcatcatttctgtgatcaagtttctaactggcatgtgttttgatcatgaggtttaccatatcttgcccatacagacaaatgagagatctagtttcattttgttccctaaagaaagaacactctctaaaattaaatcatacctgtaaatttcttcagcatttgtttctgttcaatgaaattgagacccttaatgttgctttaatgtaaaattgaatattttgtctgtgatatactttaataatttaaagtaagtaatagttctaaagtcttcactgttgctactaagagaaaatagaattttaaaggtgatgataaagatgctataatgtcagttcactccagtccaatcaaatgtagtaagaaaaagtccttgaatagttctctagggacaatttctcacttgccattgacattaatctttggtgtattctcagaaaaaataaaaagaaattgaaactggtccaaggttatagtcatatcctcgataacttttgaaaaaaaattttattaggaaattaatactagcctttttcattctggctgaaagaaaattattaaaggattagttgagtgtgaaattcaacagtattttgctcatacatactaaaaaggtgcgtagggacttggcgcatttaaacaagtttctgaaaggtttcaatttgactcaagaaaaaaattcaatatttcttttgaaaatactgaatttatcacttgctgcatggatcagatggcataggttaatctttgattttcagaatcctaatgaaataactttcaaacaatttgtgtccttaattaaaggtggaatgagatccaatttttccccctaatccttcagtttaagctgatacatgtaggttaatgtggaatgaaatcatctgtgatatattatgttcatttatcaactgagcttttttgatgttgcctgtttttatgtaaaacatgttcttaaagttaataaaataatagtacttggtgtatgaactactacataataccttagctgaagggtacgctcctcagttcatttgccatattggagtaaaatttcaccttagttcaattcacaattgacacattcagttcacgaaggaatagcccagctgtgttcttagggggaattctctctatgcaaggctttaaaaattagtcatgcggtcagagtgtagctttcccacatgtcctccatagcacagtgtgtatttcatgagcataattcaaaaacagctatttcaaaaatgtcccttttcatatattacgttcctgcctgggccactgacttggataaatacaaataaaccaaataccattcagccc

SEQ ID NO: 26891 - DNA, 329 bp, Homo sapiens
caaaaataacaaaatataaaaaggaaaaaacgtaattctaccaaaacacattaacattttaaggtatatttatcctttcaaagttaaaaataacttttaccacctccctaaattataaatatattgtaaaaaagcctaaatggtagcgtagtgcttccttgcttctgcccctgatggtctttgtttagcgttttttgtttgtttgtttgttttttgagactgagtgtcgctctgtcgcccatgggcgatctctgctcactgcatcctccgtctcccgggttcaagcgattctcccgcctcagcctcctgggtagctgggattacaggcg

SEQ ID NO: 26892 - DNA, 545 bp, Homo sapiens
ccctttttatatagttttctctttagcaggaaataaagggcatgaaatatgttgaattctggtttttcctggtaatcctttaacaatacttcattggttccaaaaagtgagtcttattcagaacttttatcatccttagcatttcagggacacttctattcactataggctctaacctttttgtgagtattataatagctatttgctcttctgatatatggctatgtggcttttcctccaatttttgtacataattggttcagtctgaacttaaaagaaatctgcctgctccagtactttagtgttttgatatttatctttttctcttcattgagataattcttctttgcactaaaaggatccttttgagctgttcgccttttagcatttcacatcatggaaacatacctatctttttgagattttgaaaatctaattgccaaactattattaatcacttcttcacataggctgtagactttagcttggaaacaatgtccagatttaatggttttaaatgaaaccttttgattatttactcacag

SEQ ID NO: 26893 - DNA, 496 bp, Homo sapiens
tctagaatgagccctggggcaccgaccttttccagtatagaggaatggccagagagaggaggaaaaccagaggaatatgaagtcataatataagtgaagacatggtgatctttgctgaggctttgaagggattgcaaaatgaagacagaatttattattggatgcaacaaaacaatgtattggtgactgacaagagctatctaaagagacatggggggaaaagcctaatggcagaattttgaaagaaattttcagttaaacatggcagactgagcataaacattaacctccatttcctgcccaaaccctactcacataaagtaataaaagaccaaaaaaaccccacaaagaatgggagaggagacactagtaagcaagagaagtcaacaaaattatagagactgggaatggatggagaagtgataactgagttagctagagaaagttgagacttacgtttgtgggtgaagccaacaagagaccattcctgccagca

SEQ ID NO: 26894 - DNA, 415 bp, Homo sapiens
ccgagagttgcattttcaaggcattagcatatctgttaattccagagaggcttgtcgcctcttggtagggctttagtagttttataccctttagagagaagagaagagctaagcctagagactgtaagtgatttgcccagggtcccagtgttcttgggagtagaaagcatgccttatgtatctttgtgtggctcacaagtctcagaacagacagtgtcaggcccagaaggagctcagtccaagttcattgtattgaattggttctgtatgcactagattctgggtctctggactcctggtcactcacttgatgttgaaaatacccaaagtcaagtgtacccctagagatgagtttggctgtagactacagtggacacagggtggtgggataccccagctcctatcgtatgttttc

SEQ ID NO: 26895 - DNA, 281 bp, Homo sapiens
gaggaggctgacaaatacaggctacatattcaaattcttctgtcagtagcagttgcaatttactatacaccaaagcctatacaaagcagggatctcagcagcatcctttcctggggtattagtcaaagttctccagagaaacagaagcaataggatatatttagagtgagaggaagagatttgtttttttttaattggctcacacaattgtggggctcacaagtctgaaatatgtagagcaggctagcagactggaagctcaggcaagagttgatgctacc

SEQ ID NO: 26896 - DNA, 497 bp, Homo sapiens
gtgtgggtgaaagagctatgcattgcagaagtaactgcatttccaaatgaccgaaaatccttgacctgtcataggaatacctcagggtaaatgttgctgagggcagttgcaatctaagaaagaaaacatgcttgccctttatcatagtgtcaccttgcaggcctttttttttcctttgtgactcaccgggagtgctgatatgtgtatgtcttttccccctcatagtaccaagcagagtaatagggaaccggtgtgcttttaggatttctaccttctgtggcgcgatcctcccactgctgcatgccagtcgcctgcctctttcatgaaatctccttcccgttttggtttggctttgtttctatgttcgtttttatgggatagattttttttttcaggttaaacaaattttaaggggatttgcttattcaaaaagaacactgaatacatgcatcttactgaaagcttgtaatacagtgagtgctttagattggtttttt

SEQ ID NO: 26897 - DNA, 442 bp, Homo sapiens
atcccttccagaacaaacaaaagtgattcagctataactaaagcaccctcgtgccagctggctctatcagggacaaacacagctttccgcgccctctcttttcctttccctcctaatccctgggtttggccctccaggccatacacagtcacacacaacacacaacacacacacacacacacacacacacacacacacacactcccaactcaagctagacctgaaatgaggcaaacctgagagcacagcctgccttcctaattgtgcgatccctggttctccactgaacttgtactccacctgctgctgaaatgactcattctttctcattcattcattcattcattttgtgttagggaatggggaatcctttatcaaaactgccgtaatactgacattaagctagttaaataaaagacatctaattataaactgggaggtg

SEQ ID NO: 26898 - DNA, 418 bp, Homo sapiens
aagtaagacgtaacgggatgaacgggatgttttctaaacttggtgaaacgtataaatctacaaattcataaagctccagaaagcccaaccaggatgtgtgtccagaaatccctgtctaggcttgtcattgtcaaactgctgaaaagcagcagtaaagagaatctttaaggcagccagagaaaaaaggatccatgacatacaaggggacactcatgggaatcaccacagccgccctgtcagaaaccatggggttcaggacacagtggatcacatcttcgaagatctgggctgggaggaattaacccagaattctgtgtgcagcagaaatattcttcaagagtgtaagtgtaataaggagagttcagacagaatccaagagcatttgtcgtcagcagagcccctcctattagaaatgcta

SEQ ID NO: 26899 - DNA, 430 bp, Homo sapiens
aatcacttgaacccagaaggcggaggttgcagtgacctgagattgcatcattgcactccagcctgggcaatgagcaagactccgtctcaaacaaacaaacaaaaccaaaaagttaatactacatgctagatattatgccaagggtgcagtggttaccaaatcagacatagttcctactcttatggagcctacattctttttagcgttgtacaacttatgcaatactttaattataataactcattaaatggttttatgtttaaagcctttgtttaggtctcacattcatgattttcaccactctgtatatcacttatactattaattatttacaatgtttctttaaatgactcacaacctgtgctataggtaaggtaccttatgtatgttttctcatttaatgttcacatgaacctttcaaagtaaagct

SEQ ID NO: 26900 - DNA, 540 bp, Homo sapiens
tggtgctgttgttctagtttgagggacatggagctggaaacctggggaggagccggtgttgatcttctttgagggtcatggagctggagatccgaggaggagccggtgttgttctagtttgagggtcgtggagccggagacccggggaggagctggtactgttgttctggtttgagtgtcgtgaagctggagacctggggaggagccagtttcgttctaatttgggagtcgtggagctggagacccggggagcagtcgctgtttttttagtttgagggtcgtgaagctgcagacctagggaggagcgctgttgttctagtttaaggatcgtggagctggaaactcagggaggagccggtgttgttctagttttcaggtcgtggacctggagacctggggatgagtggtattgttcttgttttaaggtcatggagctagagacccaaggaggagccattgtttttttagttttagggtcatggagctggagacccaaggaggagctggtgttgttccagttatagagtcgtggagctgaag

SEQ ID NO: 26901 - DNA, 939 bp, Homo sapiens
atggatggagataaccagagtgagaactcacagttccttctcctggggatctcagagagtcctgagcagcagcggatcctgttttggatgttcctgtccatgtacctggtcacggtgctgggaaatgtgctcatcatcctggccatcagctctgattcccacctgcacacccccatgtacttcttcctggccaacctctccttcactgacctcttctttgtcaccaacacaatccccaagatgctggtgaacttccagtcccagaacaaagccatctcctatgcagggtgtctgacacagctctacttcctggtctccttggtgaccctggacaacctcatcctggccgtgatggcgtatgatcgctatgtggccacctgctgccccctccactatgtcacagccatgagccctgggctctgtgtcttgctcctctccttgtgttgggggctgtctgttctctatggcctcctcctcaccttcctcctgaccagggtgaccttctgtgggcctcgagagatccactacctcttctgtgacatgtacatcctgctgtggctggcatgttccaacacccacatcattcacacagcgttgattgccactggctgcttcatcttcctcacccccttagggttcatgaccacatcctatgtacgtattgtcagaaccatccttcaaatgccctcggcctctaagaaatacaaaaccttctctacctgtgcctcccatttgggtgtggtctccctcttttatgggacgcttgctatggtgtacctgcagcccctccatacctactccatgaaggactcagtagccacagtgatgtatgctgtgctgacacctatgatgaaccctttcatctacaggctgaggaacaaagacatgcatggggctccgggaagagtcctatggagaccctttcagaggcctaaatga

SEQ ID NO: 26902 - DNA, 203 bp, Homo sapiens
taaatcattttaagacaggttttaaattttaacttttgtcagcagatccctgctcccattccccacaatgaggcactgagacacacttctaaaatgacttttaagtaaaagatcatgtggtaaagacacaggttgacataccaagtccaattctattcgtacaaaataatttcctgctgttgattaaaaccgttatctcctga

SEQ ID NO: 26903 - DNA, 338 bp, Homo sapiens
taaatttttatttatttttttttgagatggagtttcactcttgttgcccaggctggagtgcaatggcgcaatctcggctcaacgcaacctccacctcccaggttcaagcggttctcctgcctcagtcatgcatgcgccaccacgcctggctaattttgtatttttagtagaggcggggtttctccatgttgccaggcatggtggcgcatgtttgtaatccccccgcaaggctgaggaggagaattgcttgaacctgggaggtggaggttgtagcgagctcagattgtgccactgctttccaccctaggcgatagagtgagaccctgtttcaaaaaaaa

SEQ ID NO: 26904 - DNA, 328 bp, Homo sapiens
taactatctgaatgtcgtgctatgaattccagttctattttctttctattttcccaaattctgttgctagcatagaggatctctaataacatactaaccagttttacttcagggcaattatttcttttcagtattctgaggtctgtttaagttctcccaaatgtaacacagggataaggaataagtattttctctctaggttctccttggcccattttcattttatcgcatgccaaaaggagcttatagtgaagaatacttagaaaatatctaaatgattctgagtaaactgtttcaagtaaggccatggctctttaagttacacact

SEQ ID NO: 26905 - DNA, 193 bp, Homo sapiens
gtagaatgtgttgttttctctttctgtatttcctcccccagtcacctatagattcctggaattagagctagcacttcacagaacagagctggacttgctctgaagcttacagctggaacctctgagtgtgtatacgtgcacactctagaatcagatgagccagactgcattccagctcagcacctttctcgct

SEQ ID NO: 26906 - DNA, 447 bp, Homo sapiens
caaagaatagaacagtggttaccagagactaggaaggggcaggggtatgggccccaggagtggttggccaaccagtaccaagttacagttaggcaagaggaccgagctctggtattctattacacagtaggataaccagagcaaataacaaggtattgcgtatttcaagatagccagaagagaagatttagaatattattaccaccaagataaatggtaaaagtttaaaatgatggacatggtaacttcctcaattccatcatgatactatgtatatacgcattgacacatcacactgtattccataaacatgtacaattaccacgtgtcaattagaaatgaaaattaggcagggcggggtggctcatgcctgtaatcccagcactttgggaggcctaggcgagtggatcataaggtcaggagcttgagatcagcttgaccaacatg

SEQ ID NO: 26907 - DNA, 392 bp, Homo sapiens
gtgtgttttagtctaatataatttgaagagggaaatacttcaaggcccaaaggcttataatgtgtacaagcaataatcaaaattttaaacctatttttctctaggtcttagccaggcacagtggctcacgcctgtaatcccagcacttgggaggccgaggcaggcagatcacttgaggttaggagttcgagaccagcctggccagcatggtgaaaccccgtctctactaaaaatacaaaaattagctgggtgtgatggcgtgcacctgtaatcccagctacttgggaggctgaggcaggagaatcacttgaacccgggaggcggaggttgcagtgagccaagatcatgccactgcgctccagcctgggcaacagaacaagactccatctcaa

SEQ ID NO: 26908 - DNA, 410 bp, Homo sapiens
atctcttgccttgggggagaggcatgggtggtggtggtataaacttggctcctggcttactaagctgggtggaggaaactatgagatgatatctcactgattagcatacgatctttcacttgctctccttcttgtaggtccagtggctctctcctgatagttcccctgatgtacccaagtgggaagtcctcctggttcaatttcactacagtacactttgtctcctgctagcatggaggagggatggagttttgggctgaactgtatctccctaaattcaagtgttgaagtcctaaccccctcataccccagaacgtgagtgtatttggagatagggcctttaaagaggtaaataaggtaagatggagtcaaatgggtgggccctaatcccatatgtttataagaaaagg

SEQ ID NO: 26909 - DNA, 510 bp, Homo sapiens
ataaccccattaaaaaatgggcaaagaacatgaacagacagttttcaaaagaacacatatgtggccaacaaacatattaacacatgcataccatcactaatcattagagaatgcaaaacaaaacatcaatgagatactatctcacacgagttagaatgacttctgttaaaaataataaaaatatttaaatattcaatattaaaatgttatttagattgagataaattaatttgtcattattctcaaaacatggatatttaagaataaccttacttcacatgtaataacacaacaactacctgaaaaaataaaagctggggcctagcatggtgtctcaagtctgtaatcccagcactttgggaagctgaggtgggctgatcacgaggtcaggagtttgagacaagcctggccaacatggtgaaaccccgtctctactaaaaatacaaaaattaactgggcatggtggtgggcacctgtaatcccagctacttgggaggctgaggcaggaga

SEQ ID NO: 26910 - DNA, 198 bp, Homo sapiens
aagtgcatatacttactttccccaactgcctacactgagaaaacctatactcaaccttcctataaaacatctcataaaatctgtttcaccatatttagaggctcattctccttatgcttttatatagacaatgatcccacattttttttttttttttttttgaggcagagtcttgctctgtctcctaggctggagtgc

SEQ ID NO: 26911 - DNA, 9197 bp, Homo sapiens
cacttactacagatgggtgctaatgtccacgctcgtgatgatggaggtctcatcccgcttcataatgcctgttcttttggccatgctgaggttgtgagtctgttattgtgccaaggagctgatccaaatgccagggataactggaactatacacctctgcatgaagctgctattaaagggaagatcgatgtgtgcattgtgctgctgcagcacggagctgacccaaacattcggaacactgatgggaaatcagccctggacctggcagatccttcagcaaaagctgtccttacaggtgaatacaagaaagacgaactcctagaagctgctaggagtggtaatgaagaaaaactaatggctttactgactcctctaaatgtgaattgccatgcaagtgatgggcgaaagtcgactcctttacatctagcagcgggctacaacagagttcgaatagttcagcttcttcttcagcatggtgctgatgttcatgcaaaagacaaaggtggacttgtgcctcttcataatgcatgttcatatggacattatgaagtcacagaactgctactaaagcatggagcttgtgttaatgccatggatctctggcagtttactccactgcacgaggctgcttccaagaaccgtgtagaagtctgctctttgttacttagccatggcgctgatcctacgttagtcaactgccatggcaaaagtgctgtggatatggctccaactccggagcttagggagagattgacttatgaatttaaaggtcattctttactacaagcagccagagaagcagacttagctaaagttaaaaaaacactcgctctggaaatcattaatttcaaacaaccgcagtctcatgaaacagcactgcactgtgctgtggcctctctgcatcccaaacgtaaacaagtgacagaattgttacttagaaaaggagcaaatgttaatgaaaaaaataaagatttcatgactcccctgcatgttgcagccgaaagagcccataatgatgtcatggaagttctgcataagcatggcgccaagatgaatgcactggacacccttggtcagactgctttgcatagagccgccctagcaggccacctgcagacctgccgcctcctgctgagttacggctctgacccctccatcatctccttacaaggcttcacagcagcacagatgggcaatgaagcagtgcagcagattctgagtgagagtacacctatacgtacttctgatgttgattatcgactcttagaggcatctaaagctggagacttggaaactgtgaagcaactttgcagctctcaaaatgtgaattgtagagacttagagggccggcattccacgcccttacacttcgcagcaggctacaaccgcgtgtctgttgtagagtacctgctacaccacggtgccgatgtccatgccaaagacaagggtggcttggtgccccttcataatgcctgttcatatggacactatgaggtggctgagcttttagtaaggcatggggcttctgtcaatgtggcggacttatggaaatttacccctctccatgaagcagcagctaaaggaaagtatgaaatctgcaagctccttttaaaacatggagcagatccaactaaaaagaacagagatggaaatacacctttggatttggtaaaggaaggagacacagatattcaggacttactgaaaggggatgctgctttgttggatgctgccaagaagggctgcctggcaagagtgcagaagctctgtaccccagagaatatcaactgcagagacacccagggcagaaattcaacccctctgcacctggcagcaggctataataacctggaagtagctgaatatcttctagagcatggagctgatgttaatgcccaggacaagggtggtttaattcctcttcataatgcggcatcttatgggcatgttgacatagcggctttattgataaaatacaacacgtgtgtaaatgcaacagataagtgggcgtttactcccctccatgaagcagcccagaaaggaaggacgcagctgtgcgccctcctcctagcgcatggtgcagaccccaccatgaagaaccaggaaggccagacgcctctggatctggcaacagctgacgatatcagagctttgctgatagatgccatgcccccagaggccttacctacctgttttaaacctcaggctactgtagtgagtgcctctctgatctcaccagcatccaccccctcctgcctctcggctgccagcagcatagacaacctcactggccctttagcagagttggccgtaggaggagcctccaatgcaggggatggcgccgcgggaacagaaaggaaggaaggagaagttgctggtcttgacatgaatatcagccaatttctaaaaagccttggccttgaacaccttcgggatatctttgaaacagaacagattacactagatgtgttggctgatatgggtcatgaagagttgaaagaaataggcatcaatgcatatgggcaccgccacaaattaatcaaaggagtagaaagactcttaggtggacaacaaggcaccaatccttatttgacttttcactgtgttaatcagggaacgattttgctggatcttgctccagaagataaagaatatcagtcagtggaagaagagatgcaaagtactattcgagaacacagagatggtggtaatgctggcggcatcttcaacagatacaatgtcattcgaattcaaaaagttgtcaacaagaagttgagggagcggttctgccaccgacagaaggaagtgtctgaggagaatcacaaccatcacaatgagcgcatgttgtttcatggttctcctttcattaatgccattattcataaagggtttgatgagcgacatgcatacataggaggaatgtttggggccgggatttattttgctgaaaactcctcaaaaagcaaccaatatgtttatggaattggaggaggaacaggctgccctacacacaaggacaggtcatgctatatatgtcacagacaaatgctcttctgtagagtgacccttgggaaatcctttctgcagtttagcaccatgaaaatggcccacgcgcctccagggcaccactcagtcattggtagaccgagcgtcaatgggctggcatatgctgaatatgtcatctacagaggagaacaggcatacccagagtatcttatcacttaccagatcatgaagccagaagccccttcccagaccgcaacagccgcagagcagaagacctagtgaatgcctgctggtgaaggccagatcagatttcaacctgggactggattacagaggattgtttctaataacaacatcaatattctagaagtccctgacagcctagaaataagctgtttgtcttctataaagcattgctatagtgatgaatagtatgagtaactgatacatactcaactgctactgttccctttgaggaaatgtttacaggggcggccttttaacatatctcaggctcattttcattgcaattatccatttctaaaacaagattgcttcgatctagacttggaaatggaaaataagaaaaccaatgctttttcaaatgttcacaattcacacactacatttgttttgttatgcatgacgtgtctataacaaatatacacatacgacaggcaacaagcttgtttttgatttgccagacatgcatcattggctattgtttgtttgttttttgtttttttgtgttttttgggttactttgaaaatgagccagagccttcttgaggatattttgcacaaagtcacgctgacaaaatcattagcagtgcaacccaagcttctggctgagcaagattcagtttccactttttaaaatttttttattttgctctgtagctgcacttctcgttatcataaattgagatgaaaaggaaaaaacatcaagttttagtacctttttatgaattggcctatcttacaagagaagggcacaaacaccaacctgacttaggaacgcctaaattcagagaagtcaaagccggtgaaggccacttgctctttccaacacaagcctgccacagaggtcttcgggacagtactggagatgcaggttgacacgggcttgagttccaaggtgaaaaaactggggaggctgtgaaggaagagctgcattaaggagggtgaggagcgtgtggttctgtatcatggcagccccaatggatccaggggatgcctccaaaaaatacatgcttcccttcccttaatctgtactgttgggattgttacccctccaaattagctgccttatttcaaaagtcagtgaaattactgcacttgatgagggtcacaaaaataccacttgattgtttctttagttgagaatgctgggattcagactcgaatagtggatagatacacacaaatgcaaggacttttttgtttactccagatttggggtttattttgagtggcatgcttcaaatagttcataaagatccttgcattaaatttctgaaccatttcttcaaacttcttagtgtgtttagacaaggagaacaaaaattgaaaccaaagccctttctgttattttttcaatgaaggtgagaaagaaataccatacaattttctttgtgaaattactgtttattttcatcaacatttaccaagtgccattgacatttataaaaaaaatgatcctttatagttcttacacttgcccttttcaccttaactgaatatgaattgagtgcactaacttatttacttgatatactgtgcatctactctgctttgaagcgaaagaaatataaacacgaggaggaataggaaagacagtgtgacacaaacttgccattgcaattcaaagccctgaaaacgatgggtttaatgcaaggtgattaagctgtgacctcctttaatctcctgaagcaaaataaaatggttacatgcaaaacttctagaaatagactcttaaaatatatacattttgctttgattttggcttcaacccagtgctggaactaggcatccagactagtttgaatgtttgtagctgaatttttatgggtcctcaaaattaaatcgagaattagcctcagttgttgcttcttttgaagtttcagtgacccaagctgggtgtttgtgtcttggctacttgtttaatagcactagaattccaggtgaagctttgagagttgatattcattaagagggctttttttccccttctttccttctcttttgctgtaacaaagggttgaagaaattgccatctgtgtagttttcagtagctgtcaagtgtgtcttacttaccttcccccagacgtagtttaaaatggtaaacacagctgtgatttttagttaagtaaaagagttaatatgatatagatatggaaagctttatggcttcattaaaaagataaaccactacctaactgtggttgtatgttgtttccatcatactaactagatgaatggatgcgccagttttcatcttggtccttacacttgagaagttaaactgtggttcagtatttaaactgccagtgttatacgtctcatgctctgtgtgccaggtgaaggtactgtgtaaggaagacatttgcggtgcttcttgtcctataatgattcaagtatatagtagttcttgaaagagtgtgcatatattactcatctgcttaagagagtgggttaatggatatatcagaggagccaaatacatttttttcagaacttgaaaaccaaaggtcatcatgagtgcactcaaaagttaggacaagtttattacatttgggattttcatctgtagccgtatgaagaaccctttccaatataaaagcatggcattaaattaggctgaagtcttttattttttgtatatgtactatatagaaatactagcaagttaggatcatccaatatggcctaccccgaaatggcccctctgtttccctaaccacatggaagaaagaatctgaacgtctccaccggctctacccgagttccaaaactaaagggcttctccagacctgatggttccagtttacctgctgttggcctgctggatacttgactcaggcataaattaagtgccctggtcccgaactttctccctgtatttgacctccttccctctttcctaaattactagtctggaattaaaattagctccagcaatgacctttgactccattcattttctcctcatcttgggtcttaaaaaaggagaccagatacctcctagcttttgtatcacaaccaggaatgggtattaggcctcatgcgctttgctcagaacactgccgctttgttaacaaatgacagcatggaacccagagttttgattcgatgcaaaataacagcagtgcaaccaggattcttgttttccttttccttcttggagtttggaatttctagcttttcaagcagcataagtagaatcaacattaggatgttttcatgaaatagcatccttatacttctttgagcttgatgttagtggctagactgatttccctttgctctcaaaatacaaagtgcattgaagtatacagagaaatgcctgaatatggcaagcaaataatgtagattaacattctattattgtatccgttttacaaaaaataaaattttgatatatgccggagaacggcattagaatgcaataagttgtctaggtttttctgtttcagtgtctctcccaatggcacgaagggttattgggcattgtccccacccccgcctttttaacatgtgcactatctggattcctgtaaatggccttgcaaacagaagtggtgtgtattttcaagcacctttcccccattgtatccgaatccctcttgtgtgatatctgtgacaaatagccttcttcttgtgttttctgttggactaattgtctcacgtaaagctatagaccttactaatttggcaggtattcaaaactgccattaagataggatttcatgtcagatacgtatttaaagagtaaagtcaaatttgtttaatgtcagatcagtgacagaagtgaaaagaaagtaattgtgaaagtgatgtttgagctattgtacacatctagcatatggaaagcaaatgcactcgaaaactactattctagaacatgaggcttcttcagcaacttgtgcactctgccattaataaattaaatttttcccctctagaaagccttaactatggcggaaactttttaaccttttatattttaataaataaaacattgtagtcccatttcttagtgtttgaaaggtgtgtcagtgagtcggccatgtctccatgtgtttcagacctgttcatcttattttatgatggtatatttcataagtaatattcccttacatgcaatggagctgattaaaattaatccatttcaatttctccatattggaacttcctcagctaccagatttctggtttggagaagtgctggaaagatttcaaagcctattcagttgtgtatgtggggatacgacagcaactgtgataccttgtagaatatgagtgatatgcaagctgtgttttttaattgttttaaaatgtaaattatggttatgctaaagtgaaaacctagaggaagctaatgattttatatactttgcacgaccaaatatggtcgtagtatgacgagttttatacattgccagagagttctgcctcctctgaaataacattcgcactgtagattgcatttcggcttttcctcctttcacattcttttttgctttacacttcacgtcttcgcacctgccctacctcccatcctttcaaagaggtttctttcacgttccagaattcagattgttctgtgatttcttttacatcagtctacccatttctgcaggcagccctgaaagcccttgtgttgattcagagtgtttgcagagaaatgcagttgaaccctggtagtggggtgtccctcacacacccgcgcacccctcccaaagttcaggatgaaaggctagaaaacccattcaaagttaggaaagaacacagatctttgaggccgatagcctagacctagaagatgaccttgagtatgtaaacattgtctccgtgacacaaaacactgaaactcttcatgtgcatataacacctgcttctgctcccattgtttcaagctcatcttatctttgtagtagtaatgtttgtctttgatacctacaaactaaaaaggtacttttatcaaggtttctcaaaacatttacaaaaccagctttgagaaaatgttatgttgcctggcaacagcactcggagtagtaattgtgttttctcattgtgatgttggtctgtgtgagcaaccagtgtagtgactctttggttcattattcgtgttgtttttatttttagtctctgtgtgacccaacagtggcaggggttacaaccccctctcctttcttttttgtatttatctatttgtaggattgtcagatcaagtacaagatgcccagttaagtttgaatttcagagaaacaatttcacgttaagaatgtttcatgcaatatttggcatatatttacagtaaaagcattcattatttgtctgaaattcaaatttaactgagcatgctggtttttctcattgtttggtttttctaaatctggcaatcctacagctgtggtcatgggaaatcacctacagcatgttaaagtcctctagtcatcatctcgtcacctgaaatggaagtcctttttccctcaccctccacttctttccaaaggagggcatcaaggaacttaacctgcctgcctggtgggtttctatttaagacatctttgtgattatatttaacctgcaattgtgctttggcttaatgtctagctcactgtacttgtaaatgattaatattcaataaaaccatttttaaagtaaaaagaaaaagataaagaaaaagaaaaacaagagaagaaaaagaaaaaaaagagagggagcccctaaaaagaagcctccgagacgacaagggggaaccactaaagatagaaacagaggaccaaacaaaggcggcaacaaaaaacgacacgagcgacaaacacggcggcgggcaaacaagcagaggaacacacgtgagagagaacaccatgtaggggacccacagggggagcacccagaacaacaccaacgagacaaacagcggacaggagacaaagtatgcgggcaagtgcggaacgaacata

SEQ ID NO: 26912 - DNA, 591 bp, Homo sapiens
  misc_feature (557)..(557): n is a, c, g, or t
cgcctactactactaaattcgcggccgcgtcgacattaagagggctttttttccccttctttccttctcttttgctgtaacaaagggttgaagaaattgccatctgtgtagttttcagtagctgtcaagtgtgtcttacttaccttcccccagacgtagtttaaaatggtaaacacagctgtgatttttagttaagtaaaagagttaatatgatatagatatggaaagctttatggcttcattaaaaagataaaccactacctaactgtggttgtatgttgtttccatcatactaactagatgaatggatgcgccagttttcatcttggtccttacacttgagaagttaaactgtggttcagtatttaaactgccagtgttatacgtctcatgctctgtgtgccaggtgaaggtactgtgtaaggaagacatttgcggtgcttcttgtcctataatgattcaagtatatagtagttcttgaaagagtgtgcatatattactcatctgatatatccattaacccactctcttaagcagatgagggcgacgcggccgcnaatttattaatagtaggccgccgctccttaggat

SEQ ID NO: 26913 - DNA, 8894 bp, Homo sapiens
cacttactacagatgggtgctaatgtccacgctcgtgatgatggaggtctcatcccgcttcataatgcctgttcttttggccatgctgaggttgtgagtctgttattgtgccaaggagctgatccaaatgccagggataactggaactatacacctctgcatgaagctgctattaaagggaagatcgatgtgtgcattgtgctgctgcagcacggagctgacccaaacattcggaacactgatgggaaatcagccctggacctggcagatccttcagcaaaagctgtccttacaggtgaatacaagaaagacgaactcctagaagctgctaggagtggtaatgaagaaaaactaatggctttactgactcctctaaatgtgaattgccatgcaagtgatgggcgaaagtcgactcctttacatctagcagcgggctacaacagagttcgaatagttcagcttcttcttcagcatggtgctgatgttcatgcaaaagacaaaggtggacttgtgcctcttcataatgcatgttcatatggacattatgaagtcacagaactgctactaaagcatggagcttgtgttaatgccatggatctctggcagtttactccactgcacgaggctgcttccaagaaccgtgtagaagtctgctctttgttacttagccatggcgctgatcctacgttagtcaactgccatggcaaaagtgctgtggatatggctccaactccggagcttagggagagattgacttatgaatttaaaggtcattctttactacaagcagccagagaagcagacttagctaaagttaaaaaaacactcgctctggaaatcattaatttcaaacaaccgcagtctcatgaaacagcactgcactgtgctgtggcctctctgcatcccaaacgtaaacaagtgacagaattgttacttagaaaaggagcaaatgttaatgaaaaaaataaagatttcatgactcccctgcatgttgcagccgaaagagcccataatgatgtcatggaagttctgcataagcatggcgccaagatgaatgcactggacacccttggtcagactgctttgcatagagccgccctagcaggccacctgcagacctgccgcctcctgctgagttacggctctgacccctccatcatctccttacaaggcttcacagcagcacagatgggcaatgaagcagtgcagcagattctgagtgagagtacacctatacgtacttctgatgttgattatcgactcttagaggcatctaaagctggagacttggaaactgtgaagcaactttgcagctctcaaaatgtgaattgtagagacttagagggccggcattccacgcccttacacttcgcagcaggctacaaccgcgtgtctgttgtagagtacctgctacaccacggtgccgatgtccatgccaaagacaagggtggcttggtgccccttcataatgcctgttcatatggacactatgaggtggctgagcttttagtaaggcatggggcttctgtcaatgtggcggacttatggaaatttacccctctccatgaagcagcagctaaaggaaagtatgaaatctgcaagctccttttaaaacatggagcagatccaactaaaaagaacagagatggaaatacacctttggatttggtaaaggaaggagacacagatattcaggacttactgaaaggggatgctgctttgttggatgctgccaagaagggctgcctggcaagagtgcagaagctctgtaccccagagaatatcaactgcagagacacccagggcagaaattcaacccctctgcacctggcagcaggctataataacctggaagtagctgaatatcttctagagcatggagctgatgttaatgcccaggacaagggtggtttaattcctcttcataatgcggcatcttatgggcatgttgacatagcggctttattgataaaatacaacacgtgtgtaaatgcaacagataagtgggcgtttactcccctccatgaagcagcccagaaaggaaggacgcagctgtgcgccctcctcctagcgcatggtgcagaccccaccatgaagaaccaggaaggccagacgcctctggatctggcaacagctgacgatatcagagctttgctgatagatgccatgcccccagaggccttacctacctgttttaaacctcaggctactgtagtgagtgcctctctgatctcaccagcatccaccccctcctgcctctcggctgccagcagcatagacaacctcactggccctttagcagagttggccgtaggaggagcctccaatgcaggggatggcgccgcgggaacagaaaggaaggaaggagaagttgctggtcttgacatgaatatcagccaatttctaaaaagccttggccttgaacaccttcgggatatctttgaaacagaacagattacactagatgtgttggctgatatgggtcatgaagagttgaaagaaataggcatcaatgcatatgggcaccgccacaaattaatcaaaggagtagaaagactcttaggtggacaacaaggcaccaatccttatttgacttttcactgtgttaatcagggaacgattttgctggatcttgctccagaagataaagaatatcagtcagtggaagaagagatgcaaagtactattcgagaacacagagatggtggtaatgctggcggcatcttcaacagatacaatgtcattcgaattcaaaaagttgtcaacaagaagttgagggagcggttctgccaccgacagaaggaagtgtctgaggagaatcacaaccatcacaatgagcgcatgttgtttcatggttctcctttcattaatgccattattcataaagggtttgatgagcgacatgcatacataggaggaatgtttggggccgggatttattttgctgaaaactcctcaaaaagcaaccaatatgtttatggaattggaggaggaacaggctgccctacacacaaggacaggtcatgctatatatgtcacagacaaatgctcttctgtagagtgacccttgggaaatcctttctgcagtttagcaccatgaaaatggcccacgcgcctccagggcaccactcagtcattggtagaccgagcgtcaatgggctggcatatgctgaatatgtcatctacagaggagaacaggcatacccagagtatcttatcacttaccagatcatgaagccagaagccccttcccagaccgcaacagccgcagagcagaagacctagtgaatgcctgctggtgaaggccagatcagatttcaacctgggactggattacagaggattgtttctaataacaacatcaatattctagaagtccctgacagcctagaaataagctgtttgtcttctataaagcattgctatagtgatgaatagtatgagtaactgatacatactcaactgctactgttccctttgaggaaatgtttacaggggcggccttttaacatatctcaggctcattttcattgcaattatccatttctaaaacaagattgcttcgatctagacttggaaatggaaaataagaaaaccaatgctttttcaaatgttcacaattcacacactacatttgttttgttatgcatgacgtgtctataacaaatatacacatacgacaggcaacaagcttgtttttgatttgccagacatgcatcattggctattgtttgtttgttttttgtttttttgtgttttttgggttactttgaaaatgagccagagccttcttgaggatattttgcacaaagtcacgctgacaaaatcattagcagtgcaacccaagcttctggctgagcaagattcagtttccactttttaaaatttttttattttgctctgtagctgcacttctcgttatcataaattgagatgaaaaggaaaaaacatcaagttttagtacctttttatgaattggcctatcttacaagagaagggcacaaacaccaacctgacttaggaacgcctaaattcagagaagtcaaagccggtgaaggccacttgctctttccaacacaagcctgccacagaggtcttcgggacagtactggagatgcaggttgacacgggcttgagttccaaggtgaaaaaactggggaggctgtgaaggaagagctgcattaaggagggtgaggagcgtgtggttctgtatcatggcagccccaatggatccaggggatgcctccaaaaaatacatgcttcccttcccttaatctgtactgttgggattgttacccctccaaattagctgccttatttcaaaagtcagtgaaattactgcacttgatgagggtcacaaaaataccacttgattgtttctttagttgagaatgctgggattcagactcgaatagtggatagatacacacaaatgcaaggacttttttgtttactccagatttggggtttattttgagtggcatgcttcaaatagttcataaagatccttgcattaaatttctgaaccatttcttcaaacttcttagtgtgtttagacaaggagaacaaaaattgaaaccaaagccctttctgttattttttcaatgaaggtgagaaagaaataccatacaattttctttgtgaaattactgtttattttcatcaacatttaccaagtgccattgacatttataaaaaaaatgatcctttatagttcttacacttgcccttttcaccttaactgaatatgaattgagtgcactaacttatttacttgatatactgtgcatctactctgctttgaagcgaaagaaatataaacacgaggaggaataggaaagacagtgtgacacaaacttgccattgcaattcaaagccctgaaaacgatgggtttaatgcaaggtgattaagctgtgacctcctttaatctcctgaagcaaaataaaatggttacatgcaaaacttctagaaatagactcttaaaatatatacattttgctttgattttggcttcaacccagtgctggaactaggcatccagactagtttgaatgtttgtagctgaatttttatgggtcctcaaaattaaatcgagaattagcctcagttgttgcttcttttgaagtttcagtgacccaagctgggtgtttgtgtcttggctacttgtttaatagcactagaattccaggtgaagctttgagagttgatattcattaagagggctttttttccccttctttccttctcttttgctgtaacaaagggttgaagaaattgccatctgtgtagttttcagtagctgtcaagtgtgtcttacttaccttcccccagacgtagtttaaaatggtaaacacagctgtgatttttagttaagtaaaagagttaatatgatatagatatggaaagctttatggcttcattaaaaagataaaccactacctaactgtggttgtatgttgtttccatcatactaactagatgaatggatgcgccagttttcatcttggtccttacacttgagaagttaaactgtggttcagtatttaaactgccagtgttatacgtctcatgctctgtgtgccaggtgaaggtactgtgtaaggaagacatttgcggtgcttcttgtcctataatgattcaagtatatagtagttcttgaaagagtgtgcatatattactcatctgcttaagagagtgggttaatggatatatcagaggagccaaatacatttttttcagaacttgaaaaccaaaggtcatcatgagtgcactcaaaagttaggacaagtttattacatttgggattttcatctgtagccgtatgaagaaccctttccaatataaaagcatggcattaaattaggctgaagtcttttattttttgtatatgtactatatagaaatactagcaagttaggatcatccaatatggcctaccccgaaatggcccctctgtttccctaaccacatggaagaaagaatctgaacgtctccaccggctctacccgagttccaaaactaaagggcttctccagacctgatggttccagtttacctgctgttggcctgctggatacttgactcaggcataaattaagtgccctggtcccgaactttctccctgtatttgacctccttccctctttcctaaattactagtctggaattaaaattagctccagcaatgacctttgactccattcattttctcctcatcttgggtcttaaaaaaggagaccagatacctcctagcttttgtatcacaaccaggaatgggtattaggcctcatgcgctttgctcagaacactgccgctttgttaacaaatgacagcatggaacccagagttttgattcgatgcaaaataacagcagtgcaaccaggattcttgttttccttttccttcttggagtttggaatttctagcttttcaagcagcataagtagaatcaacattaggatgttttcatgaaatagcatccttatacttctttgagcttgatgttagtggctagactgatttccctttgctctcaaaatacaaagtgcattgaagtatacagagaaatgcctgaatatggcaagcaaataatgtagattaacattctattattgtatccgttttacaaaaaataaaattttgatatatgccggagaacggcattagaatgcaataagttgtctaggtttttctgtttcagtgtctctcccaatggcacgaagggttattgggcattgtccccacccccgcctttttaacatgtgcactatctggattcctgtaaatggccttgcaaacagaagtggtgtgtattttcaagcacctttcccccattgtatccgaatccctcttgtgtgatatctgtgacaaatagccttcttcttgtgttttctgttggactaattgtctcacgtaaagctatagaccttactaatttggcaggtattcaaaactgccattaagataggatttcatgtcagatacgtatttaaagagtaaagtcaaatttgtttaatgtcagatcagtgacagaagtgaaaagaaagtaattgtgaaagtgatgtttgagctattgtacacatctagcatatggaaagcaaatgcactcgaaaactactattctagaacatgaggcttcttcagcaacttgtgcactctgccattaataaattaaatttttcccctctagaaagccttaactatggcggaaactttttaaccttttatattttaataaataaaacattgtagtcccatttcttagtgtttgaaaggtgtgtcagtgagtcggccatgtctccatgtgtttcagacctgttcatcttattttatgatggtatatttcataagtaatattcccttacatgcaatggagctgattaaaattaatccatttcaatttctccatattggaacttcctcagctaccagatttctggtttggagaagtgctggaaagatttcaaagcctattcagttgtgtatgtggggatacgacagcaactgtgataccttgtagaatatgagtgatatgcaagctgtgttttttaattgttttaaaatgtaaattatggttatgctaaagtgaaaacctagaggaagctaatgattttatatactttgcacgaccaaatatggtcgtagtatgacgagttttatacattgccagagagttctgcctcctctgaaataacattcgcactgtagattgcatttcggcttttcctcctttcacattcttttttgctttacacttcacgtcttcgcacctgccctacctcccatcctttcaaagaggtttctttcacgttccagaattcagattgttctgtgatttcttttacatcagtctacccatttctgcaggcagccctgaaagcccttgtgttgattcagagtgtttgcagagaaatgcagttgaaccctggtagtggggtgtccctcacacacccgcgcacccctcccaaagttcaggatgaaaggctagaaaacccattcaaagttaggaaagaacacagatctttgaggccgatagcctagacctagaagatgaccttgagtatgtaaacattgtctccgtgacacaaaacactgaaactcttcatgtgcatataacacctgcttctgctcccattgtttcaagctcatcttatctttgtagtagtaatgtttgtctttgatacctacaaactaaaaaggtacttttatcaaggtttctcaaaacatttacaaaaccagctttgagaaaatgttatgttgcctggcaacagcactcggagtagtaattgtgttttctcattgtgatgttggtctgtgtgagcaaccagtgtagtgactctttggttcattattcgtgttgtttttatttttagtctctgtgtgacccaacagtggcaggggttacaaccccctctcctttcttttttgtatttatctatttgtaggattgtcagatcaagtacaagatgcccagttaagtttgaatttcagagaaacaatttcacgttaagaatgtttcatgcaatatttggcatatatttacagtaaaagcattcattatttgtctgaaattcaaatttaactgagcatgctggtttttctcattgtttggtttttctaaatctggcaatcctacagctgtggtcatgggaaatcacctacagcatgttaaagtcctctagtcatcatctcgtcacctgaaatggaagtcctttttccctcaccctccacttctttccaaaggagggcatcaaggaacttaacctgcctgcctggtgggtttctatttaagacatctttgtgattatatttaacctgcaattgtgctttggcttaatgtctagctcactgtacttgtaaatgattaatattcaataaaaccatttttaaagta

SEQ ID NO: 26914 - DNA, 5933 bp, Homo sapiens
agcttaattgacagtattcgaagtagaaataacattcagttttctagattgtagggtttatacacatttatttacagttaagtaggtgaacctcaaattcttcaggcacctattaagaaactgagtctatatagaatattggtcacgattaacagcctttgaggcttccacattcggcaaggctttaatattgtgcctactagaagggtgatttgtttttcttcttgtccttcccaggcatacccagagtatcttatcacttaccagatcatgaagccagaagccccttcccagaccgcaacagccgcagagcagaagacctagtgaatgcctgctggtgaaggccagatcagatttcaacctgggactggattacagaggattgtttctaataacaacatcaatattctagaagtccctgacagcctagaaataagctgtttgtcttctataaagcattgctatagtgatgaatagtatgagtaactgatacatactcaactgctactgttccctttgaggaaatgtttacaggggcggccttttaacatatctcaggctcattttcattgcaattatccatttctaaaacaagattgcttcgatctagacttggaaatggaaaataagaaaaccaatgctttttcaaatgttcacaattcacacactacatttgttttgttatgcatgacgtgtctataacaaatatacacatacgacaggcaacaagcttgtttttgatttgccagacatgcatcattggctattgtttgtttgttttttgtttttttgtgttttttgggttactttgaaaatgagccagagccttcttgaggatattttgcacaaagtcacgctgacaaaatcattagcagtgcaacccaagcttctggctgagcaagattcagtttccactttttaaaatttttttattttgctctgtagctgcacttctcgttatcataaattgagatgaaaaggaaaaaacatcaagttttagtacctttttatgaattggcctatcttacaagagaagggcacaaacaccaacctgacttaggaacgcctaaattcagagaagtcaaagccggtgaaggccacttgctctttccaacacaagcctgccacagaggtcttcgggacagtactggagatgcaggttgacacgggcttgagttccaaggtgaaaaaactggggaggctgtgaaggaagagctgcattaaggagggtgaggagcgtgtggttctgtatcatggcagccccaatggatccaggggatgcctccaaaaaatacatgcttcccttcccttaatctgtactgttgggattgttacccctccaaattagctgccttatttcaaaagtcagtgaaattactgcacttgatgagggtcacaaaaataccacttgattgtttctttagttgagaatgctgggattcagactcgaatagtggatagatacacacaaatgcaaggacttttttgtttactccagatttggggtttattttgagtggcatgcttcaaatagttcataaagatccttgcattaaatttctgaaccatttcttcaaacttcttagtgtgtttagacaaggagaacaaaaattgaaaccaaagccctttctgttattttttcaatgaaggtgagaaagaaataccatacaattttctttgtgaaattactgtttattttcatcaacatttaccaagtgccattgacatttataaaaaaaatgatcctttatagttcttacacttgcccttttcaccttaactgaatatgaattgagtgcactaacttatttacttgatatactgtgcatctactctgctttgaagcgaaagaaatataaacacgaggaggaataggaaagacagtgtgacacaaacttgccattgcaattcaaagccctgaaaacgatgggtttaatgcaaggtgattaagctgtgacctcctttaatctcctgaagcaaaataaaatggttacatgcaaaacttctagaaatagactcttaaaatatatacattttgctttgattttggcttcaacccagtgctggaactaggcatccagactagtttgaatgtttgtagctgaatttttatgggtcctcaaaattaaatcgagaattagcctcagttgttgcttcttttgaagtttcagtgacccaagctgggtgtttgtgtcttggctacttgtttaatagcactagaattccaggtgaagctttgagagttgatattcattaagagggctttttttccccttctttccttctcttttgctgtaacaaagggttgaagaaattgccatctgtgtagttttcagtagctgtcaagtgtgtcttacttaccttcccccagacgtagtttaaaatggtaaacacagctgtgatttttagttaagtaaaagagttaatatgatatagatatggaaagctttatggcttcattaaaaagataaaccactacctaactgtggttgtatgttgtttccatcatactaactagatgaatggatgcgccagttttcatcttggtccttacacttgagaagttaaactgtggttcagtatttaaactgccagtgttatacgtctcatgctctgtgtgccaggtgaaggtactgtgtaaggaagacatttgcggtgcttcttgtcctataatgattcaagtatatagtagttcttgaaagagtgtgcatatattactcatctgcttaagagagtgggttaatggatatatcagaggagccaaatacatttttttcagaacttgaaaaccaaaggtcatcatgagtgcactcaaaagttaggacaagtttattacatttgggattttcatctgtagccgtatgaagaaccctttccaatataaaagcatggcattaaattaggctgaagtcttttattttttgtatatgtactatatagaaatactagcaagttaggatcatccaatatggcctaccccgaaatggcccctctgtttccctaaccacatggaagaaagaatctgaacgtctccaccggctctacccgagttccaaaactaaagggcttctccagacctgatggttccagtttacctgctgttggcctgctggatacttgactcaggcataaattaagtgccctggtcccgaactttctccctgtatttgacctccttccctctttcctaaattactagtctggaattaaaattagctccagcaatgacctttgactccattcattttctcctcatcttgggtcttaaaaaaggagaccagatacctcctagcttttgtatcacaaccaggaatgggtattaggcctcatgcgctttgctcagaacactgccgctttgttaacaaatgacagcatggaacccagagttttgattcgatgcaaaataacagcagtgcaaccaggattcttgttttccttttccttcttggagtttggaatttctagcttttcaagcagcataagtagaatcaacattaggatgttttcatgaaatagcatccttatacttctttgagcttgatgttagtggctagactgatttccctttgctctcaaaatacaaagtgcattgaagtatacagagaaatgcctgaatatggcaagcaaataatgtagattaacattctattattgtatccgttttacaaaaaataaaattttgatatatgccggagaacggcattagaatgcaataagttgtctaggtttttctgtttcagtgtctctcccaatggcacgaagggttattgggcattgtccccacccccgcctttttaacatgtgcactatctggattcctgtaaatggccttgcaaacagaagtggtgtgtattttcaagcacctttcccccattgtatccgaatccctcttgtgtgatatctgtgacaaatagccttcttcttgtgttttctgttggactaattgtctcacgtaaagctatagaccttactaatttggcaggtattcaaaactgccattaagataggatttcatgtcagatacgtatttaaagagtaaagtcaaatttgtttaatgtcagatcagtgacagaagtgaaaagaaagtaattgtgaaagtgatgtttgagctattgtacacatctagcatatggaaagcaaatgcactcgaaaactactattctagaacatgaggcttcttcagcaacttgtgcactctgccattaataaattaaatttttcccctctagaaagccttaactatggcggaaactttttaaccttttatattttaataaataaaacattgtagtcccatttcttagtgtttgaaaggtgtgtcagtgagtcggccatgtctccatgtgtttcagacctgttcatcttattttatgatggtatatttcataagtaatattcccttacatgcaatggagctgattaaaattaatccatttcaatttctccatattggaacttcctcagctaccagatttctggtttggagaagtgctggaaagatttcaaagcctattcagttgtgtatgtggggatacgacagcaactgtgataccttgtagaatatgagtgatatgcaagctgtgttttttaattgttttaaaatgtaaattatggttatgctaaagtgaaaacctagaggaagctaatgattttatatactttgcacgaccaaatatggtcgtagtatgacgagttttatacattgccagagagttctgcctcctctgaaataacattcgcactgtagattgcatttcggcttttcctcctttcacattcttttttgctttacacttcacgtcttcgcacctgccctacctcccatcctttcaaagaggtttctttcacgttccagaattcagattgttctgtgatttcttttacatcagtctacccatttctgcaggcagccctgaaagcccttgtgttgattcagagtgtttgcagagaaatgcagttgaaccctggtagtggggtgtccctcacacacccgcgcacccctcccaaagttcaggatgaaaggctagaaaacccattcaaagttaggaaagaacacagatctttgaggccgatagcctagacctagaagatgaccttgagtatgtaaacattgtctccgtgacacaaaacactgaaactcttcatgtgcatataacacctgcttctgctcccattgtttcaagctcatcttatctttgtagtagtaatgtttgtctttgatacctacaaactaaaaaggtacttttatcaaggtttctcaaaacatttacaaaaccagctttgagaaaatgttatgttgcctggcaacagcactcggagtagtaattgtgttttctcattgtgatgttggtctgtgtgagcaaccagtgtagtgactctttggttcattattcgtgttgtttttatttttagtctctgtgtgacccaacagtggcaggggttacaaccccctctcctttcttttttgtatttatctatttgtaggattgtcagatcaagtacaagatgcccagttaagtttgaatttcagagaaacaatttcacgttaagaatgtttcatgcaatatttggcatatatttacagtaaaagcattcattatttgtctgaaattcaaatttaactgagcatgctggtttttctcattgtttggtttttctaaatctggcaatcctacagctgtggtcatgggaaatcacctacagcatgttaaagtcctctagtcatcatctcgtcacctgaaatggaagtcctttttccctcaccctccacttctttccaaaggagggcatcaaggaacttaacctgcctgcctggtgggtttctatttaagacatctttgtgattatatttaacctgcaattgtgctttggcttaatgtctagctcactgtacttgtaaatgattaatattcaataaaaccatttttaaagta

SEQ ID NO: 26915 - DNA, 8840 bp, Homo sapiens
cacttactacagatgggtgctaatgtccacgctcgtgatgatggaggtctcatcccgcttcataatgcctgttcttttggccatgctgaggttgtgagtctgttattgtgccaaggagctgatccaaatgccagggataactggaactatacacctctgcatgaagctgctattaaagggaagatcgatgtgtgcattgtgctgctgcagcacggagctgacccaaacattcggaacactgatgggaaatcagccctggacctggcagatccttcagcaaaagctgtccttacaggtgaatacaagaaagacgaactcctagaagctgctaggagtggtaatgaagaaaaactaatggctttactgactcctctaaatgtgaattgccatgcaagtgatgggcgaaagtcgactcctttacatctagcagcgggctacaacagagttcgaatagttcagcttcttcttcagcatggtgctgatgttcatgcaaaagacaaaggtggacttgtgcctcttcataatgcatgttcatatggacattatgaagtcacagaactgctactaaagcatggagcttgtgttaatgccatggatctctggcagtttactccactgcacgaggctgcttccaagaaccgtgtagaagtctgctctttgttacttagccatggcgctgatcctacgttagtcaactgccatggcaaaagtgctgtggatatggctccaactccggagcttagggagagattgacttatgaatttaaaggtcattctttactacaagcagccagagaagcagacttagctaaagttaaaaaaacactcgctctggaaatcattaatttcaaacaaccgcagtctcatgaaacagcactgcactgtgctgtggcctctctgcatcccaaacgtaaacaagtgacagaattgttacttagaaaaggagcaaatgttaatgaaaaaaataaagatttcatgactcccctgcatgttgcagccgaaagagcccataatgatgtcatggaagttctgcataagcatggcgccaagatgaatgcactggacacccttggtcagactgctttgcatagagccgccctagcaggccacctgcagacctgccgcctcctgctgagttacggctctgacccctccatcatctccttacaaggcttcacagcagcacagatgggcaatgaagcagtgcagcagattctgagtgagagtacacctatacgtacttctgatgttgattatcgactcttagaggcatctaaagctggagacttggaaactgtgaagcaactttgcagctctcaaaatgtgaattgtagagacttagagggccggcattccacgcccttacacttcgcagcaggctacaaccgcgtgtctgttgtagagtacctgctacaccacggtgccgatgtccatgccaaagacaagggtggcttggtgccccttcataatgcctgttcatatggacactatgaggtggctgagcttttagtaaggcatggggcttctgtcaatgtggcggacttatggaaatttacccctctccatgaagcagcagctaaaggaaagtatgaaatctgcaagctccttttaaaacatggagcagatccaactaaaaagaacagagatggaaatacacctttggatttggtaaaggaaggagacacagatattcaggacttactgaaaggggatgctgctttgttggatgctgccaagaagggctgcctggcaagagtgcagaagctctgtaccccagagaatatcaactgcagagacacccagggcagaaattcaacccctctgcacctggcagcaggctataataacctggaagtagctgaatatcttctagagcatggagctgatgttaatgcccaggacaagggtggtttaattcctcttcataatgcggcatcttatgggcatgttgacatagcggctttattgataaaatacaacacgtgtgtaaatgcaacagataagtgggcgtttactcccctccatgaagcagcccagaaaggaaggacgcagctgtgcgccctcctcctagcgcatggtgcagaccccaccatgaagaaccaggaaggccagacgcctctggatctggcaacagctgacgatatcagagctttgctgatagatgccatgcccccagaggccttacctacctgttttaaacctcaggctactgtagtgagtgcctctctgatctcaccagcatccaccccctcctgcctctcggctgccagcagcatagacaacctcactggccctttagcagagttggccgtaggaggagcctccaatgcaggggatggcgccgcgggaacagaaaggaaggaaggagaagttgctggtcttgacatgaatatcagccaatttctaaaaagccttggccttgaacaccttcgggatatctttgaaacagaacagattacactagatgtgttggctgatatgggtcatgaagagttgaaagaaataggcatcaatgcatatgggcaccgccacaaattaatcaaaggagtagaaagactcttaggtggacaacaaggcaccaatccttatttgacttttcactgtgttaatcagggaacgattttgctggatcttgctccagaagataaagaatatcagtcagtggaagaagagatgcaaagtactattcgagaacacagagatggtggtaatgctggcggcatcttcaacagatacaatgtcattcgaattcaaaaagttgtcaacaagaagttgagggagcggttctgccaccgacagaaggaagtgtctgaggagaatcacaaccatcacaatgagcgcatgttgtttcatggttctcctttcattaatgccattattcataaagggtttgatgagcgacatgcatacataggaggaatgtttggggccgggatttattttgctgaaaactcctcaaaaagcaaccaatatgtttatggaattggaggaggaacaggctgccctacacacaaggacaggtcatgctatatatgtcacagacaaatgctcttctgtagagtgacccttgggaaatcctttctgcagtttagcaccatgaaaatggcccacgcgcctccagggcaccactcagtcattggtagaccgagcgtcaatgggctggcatatgctgaatatgtcatctacagaggagaacaggcatacccagagtatcttatcacttaccagatcatgaagccagaagccccttcccagaccgcaacagccgcagagcagaagacctagtgaatgcctgctggtgaaggccagatcagatttcaacctgggactggattacagaggattgtttctaataacaacatcaatattctagaagtccctgacagcctagaaataagctgtttgtcttctataaagcattgctatagtgatgaatagtatgagtaactgatacatactcaactgctactgttccctttgaggaaatgtttacaggggcggccttttaacatatctcaggctcattttcattgcaattatccatttctaaaacaagattgcttcgatctagacttggaaatggaaaataagaaaaccaatgctttttcaaatgttcacaattcacacactacatttgttttgttatgcatgacgtgtctataacaaatatacacatacgacaggcaacaagcttgtttttgatttgccagacatgcatcattggctattgtttgtttgttttttgtttttttgtgttttttgggttactttgaaaatgagccagagccttcttgaggatattttgcacaaagtcacgctgacaaaatcattagcagtgcaacccaagcttctggctgagcaagattcagtttccactttttaaaatttttttattttgctctgtagctgcacttctcgttatcataaattgagatgaaaaggaaaaaacatcaagttttagtacctttttatgaattggcctatcttacaagagaagggcacaaacaccaacctgacttaggaacgcctaaattcagagaagtcaaagccggtgaaggccacttgctctttccaacacaagcctgccacagaggtcttcgggacagtactggagatgcaggttgacacgggcttgagttccaaggtgaaaaaactggggaggctgtgaaggaagagctgcattaaggagggtgaggagcgtgtggttctgtatcatggcagccccaatggatccaggggatgcctccaaaaaatacatgcttcccttcccttaatctgtactgttgggattgttacccctccaaattagctgccttatttcaaaagtcagtgaaattactgcacttgatgagggtcacaaaaataccacttgattgtttctttagttgagaatgctgggattcagactcgaatagtggatagatacacacaaatgcaaggacttttttgtttactccagatttggggtttattttgagtggcatgcttcaaatagttcataaagatccttgcattaaatttctgaaccatttcttcaaacttcttagtgtgtttagacaaggagaacaaaaattgaaaccaaagccctttctgttattttttcaatgaaggtgagaaagaaataccatacaattttctttgtgaaattactgtttattttcatcaacatttaccaagtgccattgacatttataaaaaaaatgatcctttatagttcttacacttgcccttttcaccttaactgaatatgaattgagtgcactaacttatttacttgatatactgtgcatctactctgctttgaagcgaaagaaatataaacacgaggaggaataggaaagacagtgtgacacaaacttgccattgcaattcaaagccctgaaaacgatgggtttaatgcaaggtgattaagctgtgacctcctttaatctcctgaagcaaaataaaatggttacatgcaaaacttctagaaatagactcttaaaatatatacattttgctttgattttggcttcaacccagtgctggaactaggcatccagactagtttgaatgtttgtagctgaatttttatgggtcctcaaaattaaatcgagaattagcctcagttgttgcttcttttgaagtttcagtgacccaagctgggtgtttgtgtcttggctacttgtttaatagcactagaattccaggtgaagctttgagagttgatattcattaagagggctttttttccccttctttccttctcttttgctgtaacaaagggttgaagaaattgccatctgtgtagttttcagtagctgtcaagtgtgtcttacttaccttcccccagacgtagtttaaaatggtaaacacagctgtgatttttagttaagtaaaagagttaatatgatatagatatggaaagctttatggcttcattaaaaagataaaccactacctaactgtggttgtatgttgtttccatcatactaactagatgaatggatgcgccagttttcatcttggtccttacacttgagaagttaaactgtggttcagtatttaaactgccagtgttatacgtctcatgctctgtgtgccaggtgaaggtactgtgtaaggaagacatttgcggtgcttcttgtcctataatgattcaagtatatagtagttcttgaaagagtgtgcatatattactcatctgcttaagagagtgggttaatggatatatcagaggagccaaatacatttttttcagaacttgaaaaccaaaggtcatcatgagtgcactcaaaagttaggacaagtttattacatttgggattttcatctgtagccgtatgaagaaccctttccaatataaaagcatggcattaaattaggctgaagtcttttattttttgtatatgtactatatagaaatactagcaagttaggatcatccaatatggcctaccccgaaatggcccctctgtttccctaaccacatggaagaaagaatctgaacgtctccaccggctctacccgagttccaaaactaaagggcttctccagacctgatggttccagtttacctgctgttggcctgctggatacttgactcaggcataaattaagtgccctggtcccgaactttctccctgtatttgacctccttccctctttcctaaattactagtctggaattaaaattagctccagcaatgacctttgactccattcattttctcctcatcttgggtcttaaaaaaggagaccagatacctcctagcttttgtatcacaaccaggaatgggtattaggcctcatgcgctttgctcagaacactgccgctttgttaacaaatgacagcatggaacccagagttttgattcgatgcaaaataacagcagtgcaaccaggattcttgttttccttttccttcttggagtttggaatttctagcttttcaagcagcataagtagaatcaacattaggatgttttcatgaaatagcatccttatacttctttgagcttgatgttagtggctagactgatttccctttgctctcaaaatacaaagtgcattgaagtatacagagaaatgcctgaatatggcaagcaaataatgtagattaacattctattattgtatccgttttacaaaaaataaaattttgatatatgccggagaacggcattagaatgcaataagttgtctaggtttttctgtttcagtgtctctcccaatggcacgaagggttattgggcattgtccccacccccgcctttttaacatgtgcactatctggattcctgtaaatggccttgcaaacagaagtggtgtgtattttcaagcacctttcccccattgtatccgaatccctcttgtgtgatatctgtgacaaatagccttcttcttgtgttttctgttggactaattgtctcacgtaaagctatagaccttactaatttggcaggtattcaaaactgccattaagataggatttcatgtcagatacgtatttaaagagtaaagtcaaatttgtttaatgtcagatcagtgacagaagtgaaaagaaagtaattgtgaaagtgatgtttgagctattgtacacatctagcatatggaaagcaaatgcactcgaaaactactattctagaacatgaggcttcttcagcaacttgtgcactctgccattaataaattaaatttttcccctctagaaagccttaactatggcggaaactttttaaccttttatattttaataaataaaacattgtagtcccatttcttagtgtttgaaaggtgtgtcagtgagtcggccatgtctccatgtgtttcagacctgttcatcttattttatgatggtatatttcataagtaatattcccttacatgcaatggagctgattaaaattaatccatttcaatttctccatattggaacttcctcagctaccagatttctggtttggagaagtgctggaaagatttcaaagcctattcagttgtgtatgtggggatacgacagcaactgtgataccttgtagaatatgagtgatatgcaagctgtgttttttaattgttttaaaatgtaaattatggttatgctaaagtgaaaacctagaggaagctaatgattttatatactttgcacgaccaaatatggtcgtagtatgacgagttttatacattgccagagagttctgcctcctctgaaataacattcgcactgtagattgcatttcggcttttcctcctttcacattcttttttgctttacacttcacgtcttcgcacctgccctacctcccatcctttcaaagaggtttctttcacgttccagaattcagattgttctgtgatttcttttacatcagtctacccatttctgcaggcagccctgaaagcccttgtgttgattcagagtgtttgcagagaaatgcagttgaaccctggtagtggggtgtccctcacacacccgcgcacccctcccaaagttcaggatgaaaggctagaaaacccattcaaagttaggaaagaacacagatctttgaggccgatagcctagacctagaagatgaccttgagtatgtaaacattgtctccgtgacacaaaacactgaaactcttcatgtgcatataacacctgcttctgctcccattgtttcaagctcatcttatctttgtagtagtaatgtttgtctttgatacctacaaactaaaaaggtacttttatcaaggtttctcaaaacatttacaaaaccagctttgagtgtgatgttggtctgtgtgagcaaccagtgtagtgactctttggttcattattcgtgttgtttttatttttagtctctgtgtgacccaacagtggcaggggttacaaccccctctcctttcttttttgtatttatctatttgtaggattgtcagatcaagtacaagatgcccagttaagtttgaatttcagagaaacaatttcacgttaagaatgtttcatgcaatatttggcatatatttacagtaaaagcattcattatttgtctgaaattcaaatttaactgagcatgctggtttttctcattgtttggtttttctaaatctggcaatcctacagctgtggtcatgggaaatcacctacagcatgttaaagtcctctagtcatcatctcgtcacctgaaatggaagtcctttttccctcaccctccacttctttccaaaggagggcatcaaggaacttaacctgcctgcctggtgggtttctatttaagacatctttgtgattatatttaacctgcaattgtgctttggcttaatgtctagctcactgtacttgtaaatgattaatattcaataaaaccatttttaaagta

SEQ ID NO: 26916 - DNA, 8841 bp, Homo sapiens
cacttactacagatgggtgctaatgtccacgctcgtgatgatggaggtctcatcccgcttcataatgcctgttcttttggccatgctgaggttgtgagtctgttattgtgccaaggagctgatccaaatgccagggataactggaactatacacctctgcatgaagctgctattaaagggaagatcgatgtgtgcattgtgctgctgcagcacggagctgacccaaacattcggaacactgatgggaaatcagccctggacctggcagatccttcagcaaaagctgtccttacaggtgaatacaagaaagacgaactcctagaagctgctaggagtggtaatgaagaaaaactaatggctttactgactcctctaaatgtgaattgccatgcaagtgatgggcgaaagtcgactcctttacatctagcagcgggctacaacagagttcgaatagttcagcttcttcttcagcatggtgctgatgttcatgcaaaagacaaaggtggacttgtgcctcttcataatgcatgttcatatggacattatgaagtcacagaactgctactaaagcatggagcttgtgttaatgccatggatctctggcagtttactccactgcacgaggctgcttccaagaaccgtgtagaagtctgctctttgttacttagccatggcgctgatcctacgttagtcaactgccatggcaaaagtgctgtggatatggctccaactccggagcttagggagagattgacttatgaatttaaaggtcattctttactacaagcagccagagaagcagacttagctaaagttaaaaaaacactcgctctggaaatcattaatttcaaacaaccgcagtctcatgaaacagcactgcactgtgctgtggcctctctgcatcccaaacgtaaacaagtgacagaattgttacttagaaaaggagcaaatgttaatgaaaaaaataaagatttcatgactcccctgcatgttgcagccgaaagagcccataatgatgtcatggaagttctgcataagcatggcgccaagatgaatgcactggacacccttggtcagactgctttgcatagagccgccctagcaggccacctgcagacctgccgcctcctgctgagttacggctctgacccctccatcatctccttacaaggcttcacagcagcacagatgggcaatgaagcagtgcagcagattctgagtgagagtacacctatacgtacttctgatgttgattatcgactcttagaggcatctaaagctggagacttggaaactgtgaagcaactttgcagctctcaaaatgtgaattgtagagacttagagggccggcattccacgcccttacacttcgcagcaggctacaaccgcgtgtctgttgtagagtacctgctacaccacggtgccgatgtccatgccaaagacaagggtggcttggtgccccttcataatgcctgttcatatggacactatgaggtggctgagcttttagtaaggcatggggcttctgtcaatgtggcggacttatggaaatttacccctctccatgaagcagcagctaaaggaaagtatgaaatctgcaagctccttttaaaacatggagcagatccaactaaaaagaacagagatggaaatacacctttggatttggtaaaggaaggagacacagatattcaggacttactgaaaggggatgctgctttgttggatgctgccaagaagggctgcctggcaagagtgcagaagctctgtaccccagagaatatcaactgcagagacacccagggcagaaattcaacccctctgcacctggcagcaggctataataacctggaagtagctgaatatcttctagagcatggagctgatgttaatgcccaggacaagggtggtttaattcctcttcataatgcggcatcttatgggcatgttgacatagcggctttattgataaaatacaacacgtgtgtaaatgcaacagataagtgggcgtttactcccctccatgaagcagcccagaaaggaaggacgcagctgtgcgccctcctcctagcgcatggtgcagaccccaccatgaagaaccaggaaggccagacgcctctggatctggcaacagctgacgatatcagagctttgctgatagatgccatgcccccagaggccttacctacctgttttaaacctcaggctactgtagtgagtgcctctctgatctcaccagcatccaccccctcctgcctctcggctgccagcagcatagacaacctcactggccctttagcagagttggccgtaggaggagcctccaatgcaggggatggcgccgcgggaacagaaaggaaggaaggagaagttgctggtcttgacatgaatatcagccaatttctaaaaagccttggccttgaacaccttcgggatatctttgaaacagaacagattacactagatgtgttggctgatatgggtcatgaagagttgaaagaaataggcatcaatgcatatgggcaccgccacaaattaatcaaaggagtagaaagactcttaggtggacaacaaggcaccaatccttatttgacttttcactgtgttaatcagggaacgattttgctggatcttgctccagaagataaagaatatcagtcagtggaagaagagatgcaaagtactattcgagaacacagagatggtggtaatgctggcggcatcttcaacagatacaatgtcattcgaattcaaaaagttgtcaacaagaagttgagggagcggttctgccaccgacagaaggaagtgtctgaggagaatcacaaccatcacaatgagcgcatgttgtttcatggttctcctttcattaatgccattattcataaagggtttgatgagcgacatgcatacataggaggaatgtttggggccgggatttattttgctgaaaactcctcaaaaagcaaccaatatgtttatggaattggaggaggaacaggctgccctacacacaaggacaggtcatgctatatatgtcacagacaaatgctcttctgtagagtgacccttgggaaatcctttctgcagtttagcaccatgaaaatggcccacgcgcctccagggcaccactcagtcattggtagaccgagcgtcaatgggctggcatatgctgaatatgtcatctacagaggagaacaggcatacccagagtatcttatcacttaccagatcatgaagccagaagccccttcccagaccgcaacagccgcagagcagaagacctagtgaatgcctgctggtgaaggccagatcagatttcaacctgggactggattacagaggattgtttctaataacaacatcaatattctagaagtccctgacagcctagaaataagctgtttgtcttctataaagcattgctatagtgatgaatagtatgagtaactgatacatactcaactgctactgttccctttgaggaaatgtttacaggggcggccttttaacatatctcaggctcattttcattgcaattatccatttctaaaacaagattgcttcgatctagacttggaaatggaaaataagaaaaccaatgctttttcaaatgttcacaattcacacactacatttgttttgttatgcatgacgtgtctataacaaatatacacatacgacaggcaacaagcttgtttttgatttgccagacatgcatcattggctattgtttgtttgttttttgtttttttgtgttttttgggttactttgaaaatgagccagagccttcttgaggatattttgcacaaagtcacgctgacaaaatcattagcagtgcaacccaagcttctggctgagcaagattcagtttccactttttaaaatttttttattttgctctgtagctgcacttctcgttatcataaattgagatgaaaaggaaaaaacatcaagttttagtacctttttatgaattggcctatcttacaagagaagggcacaaacaccaacctgacttaggaacgcctaaattcagagaagtcaaagccggtgaaggccacttgctctttccaacacaagcctgccacagaggtcttcgggacagtactggagatgcaggttgacacgggcttgagttccaaggtgaaaaaactggggaggctgtgaaggaagagctgcattaaggagggtgaggagcgtgtggttctgtatcatggcagccccaatggatccaggggatgcctccaaaaaatacatgcttcccttcccttaatctgtactgttgggattgttacccctccaaattagctgccttatttcaaaagtcagtgaaattactgcacttgatgagggtcacaaaaataccacttgattgtttctttagttgagaatgctgggattcagactcgaatagtggatagatacacacaaatgcaaggacttttttgtttactccagatttggggtttattttgagtggcatgcttcaaatagttcataaagatccttgcattaaatttctgaaccatttcttcaaacttcttagtgtgtttagacaaggagaacaaaaattgaaaccaaagccctttctgttattttttcaatgaaggtgagaaagaaataccatacaattttctttgtgaaattactgtttattttcatcaacatttaccaagtgccattgacatttataaaaaaaatgatcctttatagttcttacacttgcccttttcaccttaactgaatatgaattgagtgcactaacttatttacttgatatactgtgcatctactctgctttgaagcgaaagaaatataaacacgaggaggaataggaaagacagtgtgacacaaacttgccattgcaattcaaagccctgaaaacgatgggtttaatgcaaggtgattaagctgtgacctcctttaatctcctgaagcaaaataaaatggttacatgcaaaacttctagaaatagactcttaaaatatatacattttgctttgattttggcttcaacccagtgctggaactaggcatccagactagtttgaatgtttgtagctgaatttttatgggtcctcaaaattaaatcgagaattagcctcagttgttgcttcttttgaagtttcagtgacccaagctgggtgtttgtgtcttggctacttgtttaatagcactagaattccaggtgaagctttgagagttgatattcattaagagggctttttttccccttctttccttctcttttgctgtaacaaagggttgaagaaattgccatctgtgtagttttcagtagctgtcaagtgtgtcttacttaccttcccccagacgtagtttaaaatggtaaacacagctgtgatttttagttaagtaaaagagttaatatgatatagatatggaaagctttatggcttcattaaaaagataaaccactacctaactgtggttgtatgttgtttccatcatactaactagatgaatggatgcgccagttttcatcttggtccttacacttgagaagttaaactgtggttcagtatttaaactgccagtgttatacgtctcatgctctgtgtgccaggtgaaggtactgtgtaaggaagacatttgcggtgcttcttgtcctataatgattcaagtatatagtagttcttgaaagagtgtgcatatattactcatctgcttaagagagtgggttaatggatatatcagaggagccaaatacatttttttcagaacttgaaaaccaaaggtcatcatgagtgcactcaaaagttaggacaagtttattacatttgggattttcatctgtagccgtatgaagaaccctttccaatataaaagcatggcattaaattaggctgaagtcttttattttttgtatatgtactatatagaaatactagcaagttaggatcatccaatatggcctaccccgaaatggcccctctgtttccctaaccacatggaagaaagaatctgaacgtctccaccggctctacccgagttccaaaactaaagggcttctccagacctgatggttccagtttacctgctgttggcctgctggatacttgactcaggcataaattaagtgccctggtcccgaactttctccctgtatttgacctccttccctctttcctaaattactagtctggaattaaaattagctccagcaatgacctttgactccattcattttctcctcatcttgggtcttaaaaaaggagaccagatacctcctagcttttgtatcacaaccaggaatgggtattaggcctcatgcgctttgctcagaacactgccgctttgttaacaaatgacagcatggaacccagagttttgattcgatgcaaaataacagcagtgcaaccaggattcttgttttccttttccttcttggagtttggaatttctagcttttcaagcagcataagtagaatcaacattaggatgttttcatgaaatagcatccttatacttctttgagcttgatgttagtggctagactgatttccctttgctctcaaaatacaaagtgcattgaagtatacagagaaatgcctgaatatggcaagcaaataatgtagattaacattctattattgtatccgttttacaaaaaataaaattttgatatatgccggagaacggcattagaatgcaataagttgtctaggtttttctgtttcagtgtctctcccaatggcacgaagggttattgggcattgtccccacccccgcctttttaacatgtgcactatctggattcctgtaaatggccttgcaaacagaagtggtgtgtattttcaagcacctttcccccattgtatccgaatccctcttgtgtgatatctgtgacaaatagccttcttcttgtgttttctgttggactaattgtctcacgtaaagctatagaccttactaatttggcaggtattcaaaactgccattaagataggatttcatgtcagatacgtatttaaagagtaaagtcaaatttgtttaatgtcagatcagtgacagaagtgaaaagaaagtaattgtgaaagtgatgtttgagctattgtacacatctagcatatggaaagcaaatgcactcgaaaactactattctagaacatgaggcttcttcagcaacttgtgcactctgccattaataaattaaatttttcccctctagaaagccttaactatggcggaaactttttaaccttttatattttaataaataaaacattgtagtcccatttcttagtgtttgaaaggtgtgtcagtgagtcggccatgtctccatgtgtttcagacctgttcatcttattttatgatggtatatttcataagtaatattcccttacatgcaatggagctgattaaaattaatccatttcaatttctccatattggaacttcctcagctaccagatttctggtttggagaagtgctggaaagatttcaaagcctattcagttgtgtatgtggggatacgacagcaactgtgataccttgtagaatatgagtgatatgcaagctgtgttttttaattgttttaaaatgtaaattatggttatgctaaagtcgtagtatgacgagttttatacattgccagagagttctgcctcctctgaaataacattcgcactgtagattgcatttcggcttttcctcctttcacattcttttttgctttacacttcacgtcttcgcacctgccctacctcccatcctttcaaagaggtttctttcacgttccagaattcagattgttctgtgatttcttttacatcagtctacccatttctgcaggcagccctgaaagcccttgtgttgattcagagtgtttgcagagaaatgcagttgaaccctggtagtggggtgtccctcacacacccgcgcacccctcccaaagttcaggatgaaaggctagaaaacccattcaaagttaggaaagaacacagatctttgaggccgatagcctagacctagaagatgaccttgagtatgtaaacattgtctccgtgacacaaaacactgaaactcttcatgtgcatataacacctgcttctgctcccattgtttcaagctcatcttatctttgtagtagtaatgtttgtctttgatacctacaaactaaaaaggtacttttatcaaggtttctcaaaacatttacaaaaccagctttgagaaaatgttatgttgcctggcaacagcactcggagtagtaattgtgttttctcattgtgatgttggtctgtgtgagcaaccagtgtagtgactctttggttcattattcgtgttgtttttatttttagtctctgtgtgacccaacagtggcaggggttacaaccccctctcctttcttttttgtatttatctatttgtaggattgtcagatcaagtacaagatgcccagttaagtttgaatttcagagaaacaatttcacgttaagaatgtttcatgcaatatttggcatatatttacagtaaaagcattcattatttgtctgaaattcaaatttaactgagcatgctggtttttctcattgtttggtttttctaaatctggcaatcctacagctgtggtcatgggaaatcacctacagcatgttaaagtcctctagtcatcatctcgtcacctgaaatggaagtcctttttccctcaccctccacttctttccaaaggagggcatcaaggaacttaacctgcctgcctggtgggtttctatttaagacatctttgtgattatatttaacctgcaattgtgctttggcttaatgtctagctcactgtacttgtaaatgattaatattcaataaaaccatttttaaagta

SEQ ID NO: 26917 - DNA, 9121 bp, Homo sapiens
cacttactacagatgggtgctaatgtccacgctcgtgatgatggaggtctcatcccgcttcataatgcctgttcttttggccatgctgaggttgtgagtctgttattgtgccaaggagctgatccaaatgccagggataactggaactatacacctctgcatgaagctgctattaaagggaagatcgatgtgtgcattgtgctgctgcagcacggagctgacccaaacattcggaacactgatgggaaatcagccctggacctggcagatccttcagcaaaagctgtccttacaggtgaatacaagaaagacgaactcctagaagctgctaggagtggtaatgaagaaaaactaatggctttactgactcctctaaatgtgaattgccatgcaagtgatgggcgaaagtcgactcctttacatctagcagcgggctacaacagagttcgaatagttcagcttcttcttcagcatggtgctgatgttcatgcaaaagacaaaggtggacttgtgcctcttcataatgcatgttcatatggacattatgaagtcacagaactgctactaaagcatggagcttgtgttaatgccatggatctctggcagtttactccactgcacgaggctgcttccaagaaccgtgtagaagtctgctctttgttacttagccatggcgctgatcctacgttagtcaactgccatggcaaaagtgctgtggatatggctccaactccggagcttagggagagattgacttatgaatttaaaggtcattctttactacaagcagccagagaagcagacttagctaaagttaaaaaaacactcgctctggaaatcattaatttcaaacaaccgcagtctcatgaaacagcactgcactgtgctgtggcctctctgcatcccaaacgtaaacaagtgacagaattgttacttagaaaaggagcaaatgttaatgaaaaaaataaagatttcatgactcccctgcatgttgcagccgaaagagcccataatgatgtcatggaagttctgcataagcatggcgccaagatgaatgcactggacacccttggtcagactgctttgcatagagccgccctagcaggccacctgcagacctgccgcctcctgctgagttacggctctgacccctccatcatctccttacaaggcttcacagcagcacagatgggcaatgaagcagtgcagcagattctgagtgagagtacacctatacgtacttctgatgttgattatcgactcttagaggcatctaaagctggagacttggaaactgtgaagcaactttgcagctctcaaaatgtgaattgtagagacttagagggccggcattccacgcccttacacttcgcagcaggctacaaccgcgtgtctgttgtagagtacctgctacaccacggtgccgatgtccatgccaaagacaagggtggcttggtgccccttcataatgcctgttcatatggacactatgaggtggctgagcttttagtaaggcatggggcttctgtcaatgtggcggacttatggaaatttacccctctccatgaagcagcagctaaaggaaagtatgaaatctgcaagctccttttaaaacatggagcagatccaactaaaaagaacagagatggaaatacacctttggatttggtaaaggaaggagacacagatattcaggacttactgaaaggggatgctgctttgttggatgctgccaagaagggctgcctggcaagagtgcagaagctctgtaccccagagaatatcaactgcagagacacccagggcagaaattcaacccctctgcacctggcagcaggctataataacctggaagtagctgaatatcttctagagcatggagctgatgttaatgcccaggacaagggtggtttaattcctcttcataatgcggcatcttatgggcatgttgacatagcggctttattgataaaatacaacacgtgtgtaaatgcaacagataagtgggcgtttactcccctccatgaagcagcccagaaaggaaggacgcagctgtgcgccctcctcctagcgcatggtgcagaccccaccatgaagaaccaggaaggccagacgcctctggatctggcaacagctgacgatatcagagctttgctgatagatgccatgcccccagaggccttacctacctgttttaaacctcaggctactgtagtgagtgcctctctgatctcaccagcatccaccccctcctgcctctcggctgccagcagcatagacaacctcactggccctttagcagagttggccgtaggaggagcctccaatgcaggggatggcgccgcgggaacagaaaggaaggaaggagaagttgctggtcttgacatgaatatcagccaatttctaaaaagccttggccttgaacaccttcgggatatctttgaaacagaacagattacactagatgtgttggctgatatgggtcatgaagagttgaaagaaataggcatcaatgcatatgggcaccgccacaaattaatcaaaggagtagaaagactcttaggtggacaacaaggcaccaatccttatttgacttttcactgtgttaatcagggaacgattttgctggatcttgctccagaagataaagaatatcagtcagtggaagaagagatgcaaagtactattcgagaacacagagatggtggtaatgctggcggcatcttcaacagatacaatgtcattcgaattcaaaaagttgtcaacaagaagttgagggagcggttctgccaccgacagaaggaagtgtctgaggagaatcacaaccatcacaatgagcgcatgttgtttcatggttctcctttcattaatgccattattcataaagggtttgatgagcgacatgcatacataggaggaatgtttggggccgggatttattttgctgaaaactcctcaaaaagcaaccaatatgtttatggaattggaggaggaacaggctgccctacacacaaggacaggtcatgctatatatgtcacagacaaatgctcttctgtagagtgacccttgggaaatcctttctgcagtttagcaccatgaaaatggcccacgcgcctccagggcaccactcagtcattggtagaccgagcgtcaatgggctggcatatgctgaatatgtcatctacagaggagaacaggcatacccagagtatcttatcacttaccagatcatgaagccagaagccccttcccagaccgcaacagccgcagagcagaagacctagtgaatgcctgctggtgaaggccagatcagatttcaacctgggactggattacagaggattgtttctaataacaacatcaatattctagaagtccctgacagcctagaaataagctgtttgtcttctataaagcattgctatagtgatgaatagtatgagtaactgatacatactcaactgctactgttccctttgaggaaatgtttacaggggcggccttttaacatatctcaggctcattttcattgcaattatccatttctaaaacaagattgcttcgatctagacttggaaatggaaaataagaaaaccaatgctttttcaaatgttcacaattcacacactacatttgttttgttatgcatgacgtgtctataacaaatatacacatacgacaggcaacaagcttgtttttgatttgccagacatgcatcattggctattgtttgtttgttttttgtttttttgtgttttttgggttactttgaaaatgagccagagccttcttgaggatattttgcacaaagtcacgctgacaaaatcattagcagtgcaacccaagcttctggctgagcaagattcagtttccactttttaaaatttttttattttgctctgtagctgcacttctcgttatcataaattgagatgaaaaggaaaaaacatcaagttttagtacctttttatgaattggcctatcttacaagagaagggcacaaacaccaacctgacttaggaacgcctaaattcagagaagtcaaagccggtgaaggccacttgctctttccaacacaagcctgccacagaggtcttcgggacagtactggagatgcaggttgacacgggcttgagttccaaggtgaaaaaactggggaggctgtgaaggaagagctgcattaaggagggtgaggagcgtgtggttctgtatcatggcagccccaatggatccaggggatgcctccaaaaaatacatgcttcccttcccttaatctgtactgttgggattgttacccctccaaattagctgccttatttcaaaagtcagtgaaattactgcacttgatgagggtcacaaaaataccacttgattgtttctttagttgagaatgctgggattcagactcgaatagtggatagatacacacaaatgcaaggacttttttgtttactccagatttggggtttattttgagtggcatgcttcaaatagttcataaagatccttgcattaaatttctgaaccatttcttcaaacttcttagtgtgtttagacaaggagaacaaaaattgaaaccaaagccctttctgttattttttcaatgaaggtgagaaagaaataccatacaattttctttgtgaaattactgtttattttcatcaacatttaccaagtgccattgacatttataaaaaaaatgatcctttatagttcttacacttgcccttttcaccttaactgaatatgaattgagtgcactaacttatttacttgatatactgtgcatctactctgctttgaagcgaaagaaatataaacacgaggaggaataggaaagacagtgtgacacaaacttgccattgcaattcaaagccctgaaaacgatgggtttaatgcaaggtgattaagctgtgacctcctttaatctcctgaagcaaaataaaatggttacatgcaaaacttctagaaatagactcttaaaatatatacattttgctttgattttggcttcaacccagtgctggaactaggcatccagactagtttgaatgtttgtagctgaatttttatgggtcctcaaaattaaatcgagaattagcctcagttgttgcttcttttgaagtttcagtgacccaagctgggtgtttgtgtcttggctacttgtttaatagcactagaattccaggtgaagctttgagagttgatattcattaagagggctttttttccccttctttccttctcttttgctgtaacaaagggttgaagaaattgccatctgtgtagttttcagtagctgtcaagtgtgtcttacttaccttcccccagacgtagtttaaaatggtaaacacagctgtgatttttagttaagtaaaagagttaatatgatatagatatggaaagctttatggcttcattaaaaagataaaccactacctaactgtggttgtatgttgtttccatcatactaactagatgaatggatgcgccagttttcatcttggtccttacacttgagaagttaaactgtggttcagtatttaaactgccagtgttatacgtctcatgctctgtgtgccaggtgaaggtactgtgtaaggaagacatttgcggtgcttcttgtcctataatgattcaagtatatagtagttcttgaaagagtgtgcatatattactcatctgcttaagagagtgggttaatggatatatcagaggagccaaatacatttttttcagaacttgaaaaccaaaggtcatcatgagtgcactcaaaagttaggacaagtttattacatttgggattttcatctgtagccgtatgaagaaccctttccaatataaaagcatggcattaaattaggctgaagtcttttattttttgtatatgtactatatagaaatactagcaagttaggatcatccaatatggcctaccccgaaatggcccctctgtttccctaaccacatggaagaaagaatctgaacgtctccaccggctctacccgagttccaaaactaaagggcttctccagacctgatggttccagtttacctgctgttggcctgctggatacttgactcaggcataaattaagtgccctggtcccgaactttctccctgtatttgacctccttccctctttcctaaattactagtctggaattaaaattagctccagcaatgacctttgactccattcattttctcctcatcttgggtcttaaaaaaggagaccagatacctcctagcttttgtatcacaaccaggaatgggtattaggcctcatgcgctttgctcagaacactgccgctttgttaacaaatgacagcatggaacccagagttttgattcgatgcaaaataacagcagtgcaaccaggattcttgttttccttttccttcttggagtttggaatttctagcttttcaagcagcataagtagaatcaacattaggatgttttcatgaaatagcatccttatacttctttgagcttgatgttagtggctagactgatttccctttgctctcaaaatacaaagtgcattgaagtatacagagaaatgcctgaatatggcaagcaaataatgtagattaacattctattattgtatccgttttacaaaaaataaaattttgatatatgccggagaacggcattagaatgcaataagttgtctaggtttttctgtttcagtgtctctcccaatggcacgaagggttattgggcattgtccccacccccgcctttttaacatgtgcactatctggattcctgtaaatggccttgcaaacagaagtggtgtgtattttcaagcacctttcccccattgtatccgaatccctcttgtgtgatatctgtgacaaatagccttcttcttgtgttttctgttggactaattgtctcacgtaaagctatagaccttactaatttggcaggtattcaaaactgccattaagataggatttcatgtcagatacgtatttaaagagtaaagtcaaatttgtttaatgtcagatcagtgacagaagtgaaaagaaagtaattgtgaaagtgatgtttgagctattgtacacatctagcatatggaaagcaaatgcactcgaaaactactattctagaacatgaggcttcttcagcaacttgtgcactctgccattaataaattaaatttttcccctctagaaagccttaactatggcggaaactttttaaccttttatattttaataaataaaacattgtagtcccatttcttagtgtttgaaaggtgtgtcagtgagtcggccatgtctccatgtgtttcagacctgttcatcttattttatgatggtatatttcataagtaatattcccttacatgcaatggagctgattaaaattaatccatttcaatttctccatattggaacttcctcagctaccagatttctggtttggagaagtgctggaaagatttcaaagcctattcagttgtgtatgtggggatacgacagcaactgtgataccttgtagaatatgagtgatatgcaagctgtgttttttaattgttttaaaatgtaaattatggttatgctaaagtgaaaacctagaggaagctaatgattttatatactttgcacgaccaaatatggtcgtagtatgacgagttttatacattgccagagagttctgcctcctctgaaataacattcgcactgtagattgcatttcggcttttcctcctttcacattcttttttgctttacacttcacgtcttcgcacctgccctacctcccatcctttcaaagaggtttctttcacgttccagaattcagattgttctgtgatttcttttacatcagtctacccatttctgcaggcagccctgaaagcccttgtgttgattcagagtgtttgcagagaaatgcagttgaaccctggtagtggggtgtccctcacacacccgcgcacccctcccaaagttcaggatgaaaggctagaaaacccattcaaagttaggaaagaacacagatctttgaggccgatagcctagacctagaagatgaccttgagtatgtaaacattgtctccgtgacacaaaacactgaaactcttcatgtgcatataacacctgcttctgctcccattgtttcaagctcatcttatctttgtagtagtaatgtttgtctttgatacctacaaactaaaaaggtacttttatcaaggtttctcaaaacatttacaaaaccagctttgagaaaatgttatgttgcctggcaacagcactcggagtagtaattgtgttttctcattgtgatgttggtctgtgtgagcaaccagtgtagtgactctttggttcattattcgtgttgtttttatttttagtctctgtgtgacccaacagtggcaggggttacaaccccctctcctttcttttttgtatttatctatttgtaggattgtcagatcaagtacaagatgcccagttaagtttgaatttcagagaaacaatttcacgttaagaatgtttcatgcaatatttggcatatatttacagtaaaagcattcattatttgtctgaaattcaaatttaactgagcatgctggtttttctcattgtttggtttttctaaatctggcaatcctacagctgtggtcatgggaaatcacctacagcatgttaaagtcctctagtcatcatctcgtcacctgaaatggaagtcctttttccctcaccctccacttctttccaaaggagggcatcaaggaacttaacctgcctgcctggtgggtttctatttaagacatctttgtgattatatttaacctgcaattgtgctttggcttaatgtctagctcactgtacttgtaaatgattaatattcaataaaaccatttttaaagtaacaaaaaaaattaacataaaaacaaccaaaaactttgttgcgcggccctggcccatgaaaaagcttttaaacaccatctcggtgggccgcggcccagacgttaaggaacggccactagggtcccagaaacccggccggaatagtggtggtgtccccaataaaaagcggggcacggcggtctgaacatcaagggctgaggcaaggctctaaggggcaggacgataatg

SEQ ID NO: 26918 - DNA, 9143 bp, Homo sapiens
cacttactacagatgggtgctaatgtccacgctcgtgatgatggaggtctcatcccgcttcataatgcctgttcttttggccatgctgaggttgtgagtctgttattgtgccaaggagctgatccaaatgccagggataactggaactatacacctctgcatgaagctgctattaaagggaagatcgatgtgtgcattgtgctgctgcagcacggagctgacccaaacattcggaacactgatgggaaatcagccctggacctggcagatccttcagcaaaagctgtccttacaggtgaatacaagaaagacgaactcctagaagctgctaggagtggtaatgaagaaaaactaatggctttactgactcctctaaatgtgaattgccatgcaagtgatgggcgaaagtcgactcctttacatctagcagcgggctacaacagagttcgaatagttcagcttcttcttcagcatggtgctgatgttcatgcaaaagacaaaggtggacttgtgcctcttcataatgcatgttcatatggacattatgaagtcacagaactgctactaaagcatggagcttgtgttaatgccatggatctctggcagtttactccactgcacgaggctgcttccaagaaccgtgtagaagtctgctctttgttacttagccatggcgctgatcctacgttagtcaactgccatggcaaaagtgctgtggatatggctccaactccggagcttagggagagattgacttatgaatttaaaggtcattctttactacaagcagccagagaagcagacttagctaaagttaaaaaaacactcgctctggaaatcattaatttcaaacaaccgcagtctcatgaaacagcactgcactgtgctgtggcctctctgcatcccaaacgtaaacaagtgacagaattgttacttagaaaaggagcaaatgttaatgaaaaaaataaagatttcatgactcccctgcatgttgcagccgaaagagcccataatgatgtcatggaagttctgcataagcatggcgccaagatgaatgcactggacacccttggtcagactgctttgcatagagccgccctagcaggccacctgcagacctgccgcctcctgctgagttacggctctgacccctccatcatctccttacaaggcttcacagcagcacagatgggcaatgaagcagtgcagcagattctgagtgagagtacacctatacgtacttctgatgttgattatcgactcttagaggcatctaaagctggagacttggaaactgtgaagcaactttgcagctctcaaaatgtgaattgtagagacttagagggccggcattccacgcccttacacttcgcagcaggctacaaccgcgtgtctgttgtagagtacctgctacaccacggtgccgatgtccatgccaaagacaagggtggcttggtgccccttcataatgcctgttcatatggacactatgaggtggctgagcttttagtaaggcatggggcttctgtcaatgtggcggacttatggaaatttacccctctccatgaagcagcagctaaaggaaagtatgaaatctgcaagctccttttaaaacatggagcagatccaactaaaaagaacagagatggaaatacacctttggatttggtaaaggaaggagacacagatattcaggacttactgaaaggggatgctgctttgttggatgctgccaagaagggctgcctggcaagagtgcagaagctctgtaccccagagaatatcaactgcagagacacccagggcagaaattcaacccctctgcacctggcagcaggctataataacctggaagtagctgaatatcttctagagcatggagctgatgttaatgcccaggacaagggtggtttaattcctcttcataatgcggcatcttatgggcatgttgacatagcggctttattgataaaatacaacacgtgtgtaaatgcaacagataagtgggcgtttactcccctccatgaagcagcccagaaaggaaggacgcagctgtgcgccctcctcctagcgcatggtgcagaccccaccatgaagaaccaggaaggccagacgcctctggatctggcaacagctgacgatatcagagctttgctgatagatgccatgcccccagaggccttacctacctgttttaaacctcaggctactgtagtgagtgcctctctgatctcaccagcatccaccccctcctgcctctcggctgccagcagcatagacaacctcactggccctttagcagagttggccgtaggaggagcctccaatgcaggggatggcgccgcgggaacagaaaggaaggaaggagaagttgctggtcttgacatgaatatcagccaatttctaaaaagccttggccttgaacaccttcgggatatctttgaaacagaacagattacactagatgtgttggctgatatgggtcatgaagagttgaaagaaataggcatcaatgcatatgggcaccgccacaaattaatcaaaggagtagaaagactcttaggtggacaacaaggcaccaatccttatttgacttttcactgtgttaatcagggaacgattttgctggatcttgctccagaagataaagaatatcagtcagtggaagaagagatgcaaagtactattcgagaacacagagatggtggtaatgctggcggcatcttcaacagatacaatgtcattcgaattcaaaaagttgtcaacaagaagttgagggagcggttctgccaccgacagaaggaagtgtctgaggagaatcacaaccatcacaatgagcgcatgttgtttcatggttctcctttcattaatgccattattcataaagggtttgatgagcgacatgcatacataggaggaatgtttggggccgggatttattttgctgaaaactcctcaaaaagcaaccaatatgtttatggaattggaggaggaacaggctgccctacacacaaggacaggtcatgctatatatgtcacagacaaatgctcttctgtagagtgacccttgggaaatcctttctgcagtttagcaccatgaaaatggcccacgcgcctccagggcaccactcagtcattggtagaccgagcgtcaatgggctggcatatgctgaatatgtcatctacagaggagaacaggcatacccagagtatcttatcacttaccagatcatgaagccagaagccccttcccagaccgcaacagccgcagagcagaagacctagtgaatgcctgctggtgaaggccagatcagatttcaacctgggactggattacagaggattgtttctaataacaacatcaatattctagaagtccctgacagcctagaaataagctgtttgtcttctataaagcattgctatagtgatgaatagtatgagtaactgatacatactcaactgctactgttccctttgaggaaatgtttacaggggcggccttttaacatatctcaggctcattttcattgcaattatccatttctaaaacaagattgcttcgatctagacttggaaatggaaaataagaaaaccaatgctttttcaaatgttcacaattcacacactacatttgttttgttatgcatgacgtgtctataacaaatatacacatacgacaggcaacaagcttgtttttgatttgccagacatgcatcattggctattgtttgtttgttttttgtttttttgtgttttttgggttactttgaaaatgagccagagccttcttgaggatattttgcacaaagtcacgctgacaaaatcattagcagtgcaacccaagcttctggctgagcaagattcagtttccactttttaaaatttttttattttgctctgtagctgcacttctcgttatcataaattgagatgaaaaggaaaaaacatcaagttttagtacctttttatgaattggcctatcttacaagagaagggcacaaacaccaacctgacttaggaacgcctaaattcagagaagtcaaagccggtgaaggccacttgctctttccaacacaagcctgccacagaggtcttcgggacagtactggagatgcaggttgacacgggcttgagttccaaggtgaaaaaactggggaggctgtgaaggaagagctgcattaaggagggtgaggagcgtgtggttctgtatcatggcagccccaatggatccaggggatgcctccaaaaaatacatgcttcccttcccttaatctgtactgttgggattgttacccctccaaattagctgccttatttcaaaagtcagtgaaattactgcacttgatgagggtcacaaaaataccacttgattgtttctttagttgagaatgctgggattcagactcgaatagtggatagatacacacaaatgcaaggacttttttgtttactccagatttggggtttattttgagtggcatgcttcaaatagttcataaagatccttgcattaaatttctgaaccatttcttcaaacttcttagtgtgtttagacaaggagaacaaaaattgaaaccaaagccctttctgttattttttcaatgaaggtgagaaagaaataccatacaattttctttgtgaaattactgtttattttcatcaacatttaccaagtgccattgacatttataaaaaaaatgatcctttatagttcttacacttgcccttttcaccttaactgaatatgaattgagtgcactaacttatttacttgatatactgtgcatctactctgctttgaagcgaaagaaatataaacacgaggaggaataggaaagacagtgtgacacaaacttgccattgcaattcaaagccctgaaaacgatgggtttaatgcaaggtgattaagctgtgacctcctttaatctcctgaagcaaaataaaatggttacatgcaaaacttctagaaatagactcttaaaatatatacattttgctttgattttggcttcaacccagtgctggaactaggcatccagactagtttgaatgtttgtagctgaatttttatgggtcctcaaaattaaatcgagaattagcctcagttgttgcttcttttgaagtttcagtgacccaagctgggtgtttgtgtcttggctacttgtttaatagcactagaattccaggtgaagctttgagagttgatattcattaagagggctttttttccccttctttccttctcttttgctgtaacaaagggttgaagaaattgccatctgtgtagttttcagtagctgtcaagtgtgtcttacttaccttcccccagacgtagtttaaaatggtaaacacagctgtgatttttagttaagtaaaagagttaatatgatatagatatggaaagctttatggcttcattaaaaagataaaccactacctaactgtggttgtatgttgtttccatcatactaactagatgaatggatgcgccagttttcatcttggtccttacacttgagaagttaaactgtggttcagtatttaaactgccagtgttatacgtctcatgctctgtgtgccaggtgaaggtactgtgtaaggaagacatttgcggtgcttcttgtcctataatgattcaagtatatagtagttcttgaaagagtgtgcatatattactcatctgcttaagagagtgggttaatggatatatcagaggagccaaatacatttttttcagaacttgaaaaccaaaggtcatcatgagtgcactcaaaagttaggacaagtttattacatttgggattttcatctgtagccgtatgaagaaccctttccaatataaaagcatggcattaaattaggctgaagtcttttattttttgtatatgtactatatagaaatactagcaagttaggatcatccaatatggcctaccccgaaatggcccctctgtttccctaaccacatggaagaaagaatctgaacgtctccaccggctctacccgagttccaaaactaaagggcttctccagacctgatggttccagtttacctgctgttggcctgctggatacttgactcaggcataaattaagtgccctggtcccgaactttctccctgtatttgacctccttccctctttcctaaattactagtctggaattaaaattagctccagcaatgacctttgactccattcattttctcctcatcttgggtcttaaaaaaggagaccagatacctcctagcttttgtatcacaaccaggaatgggtattaggcctcatgcgctttgctcagaacactgccgctttgttaacaaatgacagcatggaacccagagttttgattcgatgcaaaataacagcagtgcaaccaggattcttgttttccttttccttcttggagtttggaatttctagcttttcaagcagcataagtagaatcaacattaggatgttttcatgaaatagcatccttatacttctttgagcttgatgttagtggctagactgatttccctttgctctcaaaatacaaagtgcattgaagtatacagagaaatgcctgaatatggcaagcaaataatgtagattaacattctattattgtatccgttttacaaaaaataaaattttgatatatgccggagaacggcattagaatgcaataagttgtctaggtttttctgtttcagtgtctctcccaatggcacgaagggttattgggcattgtccccacccccgcctttttaacatgtgcactatctggattcctgtaaatggccttgcaaacagaagtggtgtgtattttcaagcacctttcccccattgtatccgaatccctcttgtgtgatatctgtgacaaatagccttcttcttgtgttttctgttggactaattgtctcacgtaaagctatagaccttactaatttggcaggtattcaaaactgccattaagataggatttcatgtcagatacgtatttaaagagtaaagtcaaatttgtttaatgtcagatcagtgacagaagtgaaaagaaagtaattgtgaaagtgatgtttgagctattgtacacatctagcatatggaaagcaaatgcactcgaaaactactattctagaacatgaggcttcttcagcaacttgtgcactctgccattaataaattaaatttttcccctctagaaagccttaactatggcggaaactttttaaccttttatattttaataaataaaacattgtagtcccatttcttagtgtttgaaaggtgtgtcagtgagtcggccatgtctccatgtgtttcagacctgttcatcttattttatgatggtatatttcataagtaatattcccttacatgcaatggagctgattaaaattaatccatttcaatttctccatattggaacttcctcagctaccagatttctggtttggagaagtgctggaaagatttcaaagcctattcagttgtgtatgtggggatacgacagcaactgtgataccttgtagaatatgagtgatatgcaagctgtgttttttaattgttttaaaatgtaaattatggttatgctaaagtgaaaacctagaggaagctaatgattttatatactttgcacgaccaaatatggtcgtagtatgacgagttttatacattgccagagagttctgcctcctctgaaataacattcgcactgtagattgcatttcggcttttcctcctttcacattcttttttgctttacacttcacgtcttcgcacctgccctacctcccatcctttcaaagaggtttctttcacgttccagaattcagattgttctgtgatttcttttacatcagtctacccatttctgcaggcagccctgaaagcccttgtgttgattcagagtgtttgcagagaaatgcagttgaaccctggtagtggggtgtccctcacacacccgcgcacccctcccaaagttcaggatgaaaggctagaaaacccattcaaagttaggaaagaacacagatctttgaggccgatagcctagacctagaagatgaccttgagtatgtaaacattgtctccgtgacacaaaacactgaaactcttcatgtgcatataacacctgcttctgctcccattgtttcaagctcatcttatctttgtagtagtaatgtttgtctttgatacctacaaactaaaaaggtacttttatcaaggtttctcaaaacatttacaaaaccagctttgagaaaatgttatgttgcctggcaacagcactcggagtagtaattgtgttttctcattgtgatgttggtctgtgtgagcaaccagtgtagtgactctttggttcattattcgtgttgtttttatttttagtctctgtgtgacccaacagtggcaggggttacaaccccctctcctttcttttttgtatttatctatttgtaggattgtcagatcaagtacaagatgcccagttaagtttgaatttcagagaaacaatttcacgttaagaatgtttcatgcaatatttggcatatatttacagtaaaagcattcattatttgtctgaaattcaaatttaactgagcatgctggtttttctcattgtttggtttttctaaatctggcaatcctacagctgtggtcatgggaaatcacctacagcatcaccctccacttctttccaaaggagggcatcaaggaacttaacctgcctgcctggtgggtttctatttaagacatctttgtgattatatttaacctgcaattgtgctttggcttaatgtctagctcactgtacttgtaaatgattaatattcaataaaaccatttttaaagtaaaaagaaaaagataaagaaaaagaaaaacaagagaagaaaaagaaaaaaaagagagggagcccctaaaaagaagcctccgagacgacaagggggaaccactaaagatagaaacagaggaccaaacaaaggcggcaacaaaaaacgacacgagcgacaaacacggcggcgggcaaacaagcagaggaacacacgtgagagagaacaccatgtaggggacccacagggggagcacccagaacaacaccaacgagacaaacagcggacaggagacaaagtatgcgggcaagtgcggaacgaacata

SEQ ID NO: 26919 - DNA, 7838 bp, Homo sapiens
cacttactacagatgggtgctaatgtccacgctcgtgatgatggaggtctcatcccgcttcataatgcctgttcttttggccatgctgaggttgtgagtctgttattgtgccaaggagctgatccaaatgccagggataactggaactatacacctctgcatgaagctgctattaaagggaagatcgatgtgtgcattgtgctgctgcagcacggagctgacccaaacattcggaacactgatgggaaatcagccctggacctggcagatccttcagcaaaagctgtccttacaggtgaatacaagaaagacgaactcctagaagctgctaggagtggtaatgaagaaaaactaatggctttactgactcctctaaatgtgaattgccatgcaagtgatgggcgaaagtcgactcctttacatctagcagcgggctacaacagagttcgaatagttcagcttcttcttcagcatggtgctgatgttcatgcaaaagacaaaggtggacttgtgcctcttcataatgcatgttcatatggacattatgaagtcacagaactgctactaaagcatggagcttgtgttaatgccatggatctctggcagtttactccactgcacgaggctgcttccaagaaccgtgtagaagtctgctctttgttacttagccatggcgctgatcctacgttagtcaactgccatggcaaaagtgctgtggatatggctccaactccggagcttagggagagattgacttatgaatttaaaggtcattctttactacaagcagccagagaagcagacttagctaaagttaaaaaaacactcgctctggaaatcattaatttcaaacaaccgcagtctcatgaaacagcactgcactgtgctgtggcctctctgcatcccaaacgtaaacaagtgacagaattgttacttagaaaaggagcaaatgttaatgaaaaaaataaagatttcatgactcccctgcatgttgcagccgaaagagcccataatgatgtcatggaagttctgcataagcatggcgccaagatgaatgcactggacacccttggtcagactgctttgcatagagccgccctagcaggccacctgcagacctgccgcctcctgctgagttacggctctgacccctccatcatctccttacaaggcttcacagcagcacagatgggcaatgaagcagtgcagcagattctgagtgagagtacacctatacgtacttctgatgttgattatcgactcttagaggcatctaaagctggagacttggaaactgtgaagcaactttgcagctctcaaaatgtgaattgtagagacttagagggccggcattccacgcccttacacttcgcagcaggctacaaccgcgtgtctgttgtagagtacctgctacaccacggtgccgatgtccatgccaaagacaagggtggcttggtgccccttcataatgcctgttcatatggacactatgaggtggctgagcttttagtaaggcatggggcttctgtcaatgtggcggacttatggaaatttacccctctccatgaagcagcagctaaaggaaagtatgaaatctgcaagctccttttaaaacatggagcagatccaactaaaaagaacagagatggaaatacacctttggatttggtaaaggaaggagacacagatattcaggacttactgaaaggggatgctgctttgttggatgctgccaagaagggctgcctggcaagagtgcagaagctctgtaccccagagaatatcaactgcagagacacccagggcagaaattcaacccctctgcacctggcagcaggctataataacctggaagtagctgaatatcttctagagcatggagctgatgttaatgcccaggacaagggtggtttaattcctcttcataatgcggcatcttatgggcatgttgacatagcggctttattgataaaatacaacacgtgtgtaaatgcaacagataagtgggcgtttactcccctccatgaagcagcccagaaaggaaggacgcagctgtgcgccctcctcctagcgcatggtgcagaccccaccatgaagaaccaggaaggccagacgcctctggatctggcaacagctgacgatatcagagctttgctgatagatgccatgcccccagaggccttacctacctgttttaaacctcaggctactgtagtgagtgcctctctgatctcaccagcatccaccccctcctgcctctcggctgccagcagcatagacaacctcactggccctttagcagagttggccgtaggaggagcctccaatgcaggggatggcgccgcgggaacagaaaggaaggaaggagaagttgctggtcttgacatgaatatcagccaatttctaaaaagccttggccttgaacaccttcgggatatctttgaaacagaacagattacactagatgtgttggctgatatgggtcatgaagagttgaaagaaataggcatcaatgcatatgggcaccgccacaaattaatcaaaggagtagaaagactcttaggtggacaacaaggcaccaatccttatttgacttttcactgtgttaatcagggaacgattttgctggatcttgctccagaagataaagaatatcagtcagtggaagaagagatgcaaagtactattcgagaacacagagatggtggtaatgctggcggcatcttcaacagatacaatgtcattcgaattcaaaaagttgtcaacaagaagttgagggagcggttctgccaccgacagaaggaagtgtctgaggagaatcacaaccatcacaatgagcgcatgttgtttcatggttctcctttcattaatgccattattcataaagggtttgatgagcgacatgcatacataggaggaatgtttggggccgggatttattttgctgaaaactcctcaaaaagcaaccaatatgtttatggaattggaggaggaacaggctgccctacacacaaggacaggtcatgctatatatgtcacagacaaatgctcttctgtagagtgacccttgggaaatcctttctgcagtttagcaccatgaaaatggcccacgcgcctccagggcaccactcagtcattggtagaccgagcgtcaatgggctggcatatgctgaatatgtcatctacagaggagaacaggcatacccagagtatcttatcacttaccagatcatgaagccagaagccccttcccagaccgcaacagccgcagagcagaagacctagtgaatgcctgctggtgaaggccagatcagatttcaacctgggactggattacagaggattgtttctaataacaacatcaatattctagaagtccctgacagcctagaaataagctgtttgtcttctataaagcattgctatagtgatgaatagtatgagtaactgatacatactcaactgctactgttccctttgaggaaatgtttacaggggcggccttttaacatatctcaggctcattttcattgcaattatccatttctaaaacaagattgcttcgatctagacttggaaatggaaaataagaaaaccaatgctttttcaaatgttcacaattcacacactacatttgttttgttatgcatgacgtgtctataacaaatatacacatacgacaggcaacaagcttgtttttgatttgccagacatgcatcattggctattgtttgtttgttttttgtttttttgtgttttttgggttactttgaaaatgagccagagccttcttgaggatattttgcacaaagtcacgctgacaaaatcattagcagtgcaacccaagcttctggctgagcaagattcagtttccactttttaaaatttttttattttgctctgtagctgcacttctcgttatcataaattgagatgaaaaggaaaaaacatcaagttttagtacctttttatgaattggcctatcttacaagagaagggcacaaacaccaacctgacttaggaacgcctaaattcagagaagtcaaagccggtgaaggccacttgctctttccaacacaagcctgccacagaggtcttcgggacagtactggagatgcaggttgacacgggcttgagttccaaggtgaaaaaactggggaggctgtgaaggaagagctgcattaaggagggtgaggagcgtgtggttctgtatcatggcagccccaatggatccaggggatgcctccaaaaaatacatgcttcccttcccttaatctgtactgttgggattgttacccctccaaattagctgccttatttcaaaagtcagtgaaattactgcacttgatgagggtcacaaaaataccacttgattgtttctttagttgagaatgctgggattcagactcgaatagtggatagatacacacaaatgcaaggacttttttgtttactccagatttggggtttattttgagtggcatgcttcaaatagttcataaagatccttgcattaaatttctgaaccatttcttcaaacttcttagtgtgtttagacaaggagaacaaaaattgaaaccaaagccctttctgttattttttcaatgaaggtgagaaagaaataccatacaattttctttgtgaaattactgtttattttcatcaacatttaccaagtgccattgacatttataaaaaaaatgatcctttatagttcttacacttgcccttttcaccttaactgaatatgaattgagtgcactaacttatttacttgatatactgtgcatctactctgctttgaagcgaaagaaatataaacacgaggaggaataggaaagacagtgtgacacaaacttgccattgcaattcaaagccctgaaaacgatgggtttaatgcaaggtgattaagctgtgacctcctttaatctcctgaagcaaaataaaatggttacatgcaaaacttctagaaatagactcttaaaatatatacattttgctttgattttggcttcaacccagtgctggaactaggcatccagactagtttgaatgtttgtagctgaatttttatgggtcctcaaaattaaatcgagaattagcctcagttgttgcttcttttgaagtttcagtgacccaagctgggtgtttgtgtcttggctacttgtttaatagcactagaattccaggtgaagctttgagagttgatattcattaagagggctttttttccccttctttccttctcttttgctgtaacaaagggttgaagaaattgccatctgtgtagttttcagtagctgtcaagtgtgtcttacttaccttcccccagacgtagtttaaaatggtaaacacagctgtgatttttagttaagtaaaagagttaatatgatatagatatggaaagctttatggcttcattaaaaagataaaccactacctaactgtggttgtatgttgtttccatcatactaactagatgaatggatgcgccagttttcatcttggtccttacacttgagaagttaaactgtggttcagtatttaaactgccagtgttatacgtctcatgctctgtgtgccaggtgaaggtactgtgtaaggaagacatttgcggtgcttcttgtcctataatgattcaagtatatagtagttcttgaaagagtgtgcatatattactcatctgcttaagagagtgggttaatggatatatcagaggagccaaatacatttttttcagaacttgaaaaccaaaggtcatcatgagtgcactcaaaagttaggacaagtttattacatttgggattttcatctgtagccgtatgaagaaccctttccaatataaaagcatggcattaaattaggctgaagtcttttattttttgtatatgtactatatagaaatactagcaagttaggatcatccaatatggcctaccccgaaatggcccctctgtttccctaaccacatggaagaaagaatctgaacgtctccaccggctctacccgagttccaaaactaaagggcttctccagacctgatggttccagtttacctgctgttggcctgctggatacttgactcaggcataaattaagtgccctggtcccgaactttctccctgtatttgacctccttccctctttcctaaattactagtctggaattaaaattagctccagcaatgacctttgactccattcattttctcctcatcttgggtcttaaaaaaggagaccagatacctcctagcttttgtatcacaaccaggaatgggtattaggcctcatgcgctttgctcagaacactgccgctttgttaacaaatgacagcatggaacccagagttttgattcgatgcaaaataacagcagtgcaaccaggattcttgttttccttttccttcttggagtttggaatttctagcttttcaagcagcataagtagaatcaacattaggatgttttcatgaaatagcatccttatacttctttgagcttgatgttagtggctagactgatttccctttgctctcaaaatacaaagtgcattgaagtatacagagaaatgcctgaatatggcaagcaaataatgtagattaacattctattattgtatccgttttacaaaaaataaaattttgatatatgccggagaacggcattagaatgcaataagttgtctaggtttttctgtttcagtgtctctcccaatggcacgaagggttattgggcattgtccccacccccgcctttttaacatgtgcactatctggattcctgtaaatggccttgcaaacagaagtggtgtgtattttcaagcacctttcccccattgtatccgaatccctcttgtgtgatatctgtgacaaatagccttcttcttgtgttttctgttggactaattgtctcacgtaaagctatagaccttactaatttggcaggtattcaaaactgccattaagataggatttcatgtcagatacgtatttaaagagtaaagtcaaatttgtttaatgtcagatcagtgacagaagtgaaaagaaagtaattgtgaaagtgatgtttgagctattgtacacatctagcatatggaaagcaaatgcactcgaaaactactattctagaacatgaggcttcttcagcaacttgtgcactctgccattaataaattaaatttttcccctctagaaagccttaactatggcggaaactttttaaccttttatattttaataaataaaacattgtagtcccatttcttagtgtttgaaaggtgtgtcagtgagtcggccatgtctccatgtgtttcagacctgttcatcttattttatgatggtatatttcataagtaatattcccttacatgcaatggagctgattaaaattaatccatttcaatttctccatattggaacttcctcagctaccagatttctggtttggagaagtgctggaaagatttcaaagcctattcagttgtgtatgtggggatacgacagcaactgtgataccttgtagaatatgagtgatatgcaagctgtgttttttaattgttttaaaatgtaaattatggttatgctaaagtgaaaacctagaggaagctaatgattttatatactttgcacgaccaaatatggtcgtagtatgacgagttttatacattgccagagagttctgcctcctctgaaataacattcgcactgtagattgcatttcggcttttcctcctttcacattcttttttgctttacacttcacgtcttcgcacctatcacacccatccttaaaaaagaaataatagtagaaaaaaactcaaggggggccccggtcccaatc

SEQ ID NO: 26920 - DNA, 6649 bp, Homo sapiens
cacttactacagatgggtgctaatgtccacgctcgtgatgatggaggtctcatcccgcttcataatgcctgttcttttggccatgctgaggttgtgagtctgttattgtgccaaggagctgatccaaatgccagggataactggaactatacacctctgcatgaagctgctattaaagggaagatcgatgtgtgcattgtgctgctgcagcacggagctgacccaaacattcggaacactgatgggaaatcagccctggacctggcagatccttcagcaaaagctgtccttacaggtgaatacaagaaagacgaactcctagaagctgctaggagtggtaatgaagaaaaactaatggctttactgactcctctaaatgtgaattgccatgcaagtgatgggcgaaagtcgactcctttacatctagcagcgggctacaacagagttcgaatagttcagcttcttcttcagcatggtgctgatgttcatgcaaaagacaaaggtggacttgtgcctcttcataatgcatgttcatatggacattatgaagtcacagaactgctactaaagcatggagcttgtgttaatgccatggatctctggcagtttactccactgcacgaggctgcttccaagaaccgtgtagaagtctgctctttgttacttagccatggcgctgatcctacgttagtcaactgccatggcaaaagtgctgtggatatggctccaactccggagcttagggagagattgacttatgaatttaaaggtcattctttactacaagcagccagagaagcagacttagctaaagttaaaaaaacactcgctctggaaatcattaatttcaaacaaccgcagtctcatgaaacagcactgcactgtgctgtggcctctctgcatcccaaacgtaaacaagtgacagaattgttacttagaaaaggagcaaatgttaatgaaaaaaataaagatttcatgactcccctgcatgttgcagccgaaagagcccataatgatgtcatggaagttctgcataagcatggcgccaagatgaatgcactggacacccttggtcagactgctttgcatagagccgccctagcaggccacctgcagacctgccgcctcctgctgagttacggctctgacccctccatcatctccttacaaggcttcacagcagcacagatgggcaatgaagcagtgcagcagattctgagtgagagtacacctatacgtacttctgatgttgattatcgactcttagaggcatctaaagctggagacttggaaactgtgaagcaactttgcagctctcaaaatgtgaattgtagagacttagagggccggcattccacgcccttacacttcgcagcaggctacaaccgcgtgtctgttgtagagtacctgctacaccacggtgccgatgtccatgccaaagacaagggtggcttggtgccccttcataatgcctgttcatatggacactatgaggtggctgagcttttagtaaggcatggggcttctgtcaatgtggcggacttatggaaatttacccctctccatgaagcagcagctaaaggaaagtatgaaatctgcaagctccttttaaaacatggagcagatccaactaaaaagaacagagatggaaatacacctttggatttggtaaaggaaggagacacagatattcaggacttactgaaaggggatgctgctttgttggatgctgccaagaagggctgcctggcaagagtgcagaagctctgtaccccagagaatatcaactgcagagacacccagggcagaaattcaacccctctgcacctggcagcaggctataataacctggaagtagctgaatatcttctagagcatggagctgatgttaatgcccaggacaagggtggtttaattcctcttcataatgcggcatcttatgggcatgttgacatagcggctttattgataaaatacaacacgtgtgtaaatgcaacagataagtgggcgtttactcccctccatgaagcagcccagaaaggaaggacgcagctgtgcgccctcctcctagcgcatggtgcagaccccaccatgaagaaccaggaaggccagacgcctctggatctggcaacagctgacgatatcagagctttgctgatagatgccatgcccccagaggccttacctacctgttttaaacctcaggctactgtagtgagtgcctctctgatctcaccagcatccaccccctcctgcctctcggctgccagcagcatagacaacctcactggccctttagcagagttggccgtaggaggagcctccaatgcaggggatggcgccgcgggaacagaaaggaaggaaggagaagttgctggtcttgacatgaatatcagccaatttctaaaaagccttggccttgaacaccttcgggatatctttgaaacagaacagattacactagatgtgttggctgatatgggtcatgaagagttgaaagaaataggcatcaatgcatatgggcaccgccacaaattaatcaaaggagtagaaagactcttaggtggacaacaaggcaccaatccttatttgacttttcactgtgttaatcagggaacgattttgctggatcttgctccagaagataaagaatatcagtcagtggaagaagagatgcaaagtactattcgagaacacagagatggtggtaatgctggcggcatcttcaacagatacaatgtcattcgaattcaaaaagttgtcaacaagaagttgagggagcggttctgccaccgacagaaggaagtgtctgaggagaatcacaaccatcacaatgagcgcatgttgtttcatggttctcctttcattaatgccattattcataaagggtttgatgagcgacatgcatacataggaggaatgtttggggccgggatttattttgctgaaaactcctcaaaaagcaaccaatatgtttatggaattggaggaggaacaggctgccctacacacaaggacaggtcatgctatatatgtcacagacaaatgctcttctgtagagtgacccttgggaaatcctttctgcagtttagcaccatgaaaatggcccacgcgcctccagggcaccactcagtcattggtagaccgagcgtcaatgggctggcatatgctgaatatgtcatctacagaggagaacaggcatacccagagtatcttatcacttaccagatcatgaagccagaagccccttcccagaccgcaacagccgcagagcagaagacctagtgaatgcctgctggtgaaggccagatcagatttcaacctgggactggattacagaggattgtttctaataacaacatcaatattctagaagtccctgacagcctagaaataagctgtttgtcttctataaagcattgctatagtgatgaatagtatgagtaactgatacatactcaactgctactgttccctttgaggaaatgtttacaggggcggccttttaacatatctcaggctcattttcattgcaattatccatttctaaaacaagattgcttcgatctagacttggaaatggaaaataagaaaaccaatgctttttcaaatgttcacaattcacacactacatttgttttgttatgcatgacgtgtctataacaaatatacacatacgacaggcaacaagcttgtttttgatttgccagacatgcatcattggctattgtttgtttgttttttgtttttttgtgttttttgggttactttgaaaatgagccagagccttcttgaggatattttgcacaaagtcacgctgacaaaatcattagcagtgcaacccaagcttctggctgagcaagattcagtttccactttttaaaatttttttattttgctctgtagctgcacttctcgttatcataaattgagatgaaaaggaaaaaacatcaagttttagtacctttttatgaattggcctatcttacaagagaagggcacaaacaccaacctgacttaggaacgcctaaattcagagaagtcaaagccggtgaaggccacttgctctttccaacacaagcctgccacagaggtcttcgggacagtactggagatgcaggttgacacgggcttgagttccaaggtgaaaaaactggggaggctgtgaaggaagagctgcattaaggagggtgaggagcgtgtggttctgtatcatggcagccccaatggatccaggggatgcctccaaaaaatacatgcttcccttcccttaatctgtactgttgggattgttacccctccaaattagctgccttatttcaaaagtcagtgaaattactgcacttgatgagggtcacaaaaataccacttgattgtttctttagttgagaatgctgggattcagactcgaatagtggatagatacacacaaatgcaaggacttttttgtttactccagatttggggtttattttgagtggcatgcttcaaatagttcataaagatccttgcattaaatttctgaaccatttcttcaaacttcttagtgtgtttagacaaggagaacaaaaattgaaaccaaagccctttctgttattttttcaatgaaggtgagaaagaaataccatacaattttctttgtgaaattactgtttattttcatcaacatttaccaagtgccattgacatttataaaaaaaatgatcctttatagttcttacacttgcccttttcaccttaactgaatatgaattgagtgcactaacttatttacttgatatactgtgcatctactctgctttgaagcgaaagaaatataaacacgaggaggaataggaaagacagtgtgacacaaacttgccattgcaattcaaagccctgaaaacgatgggtttaatgcaaggtgattaagctgtgacctcctttaatctcctgaagcaaaataaaatggttacatgcaaaacttctagaaatagactcttaaaatatatacattttgctttgattttggcttcaacccagtgctggaactaggcatccagactagtttgaatgtttgtagctgaatttttatgggtcctcaaaattaaatcgagaattagcctcagttgttgcttcttttgaagtttcagtgacccaagctgggtgtttgtgtcttggctacttgtttaatagcactagaattccaggtgaagctttgagagttgatattcattaagagggctttttttccccttctttccttctcttttgctgtaacaaagggttgaagaaattgccatctgtgtagttttcagtagctgtcaagtgtgtcttacttaccttcccccagacgtagtttaaaatggtaaacacagctgtgatttttagttaagtaaaagagttaatatgatatagatatggaaagctttatggcttcattaaaaagataaaccactacctaactgtggttgtatgttgtttccatcatactaactagatgaatggatgcgccagttttcatcttggtccttacacttgagaagttaaactgtggttcagtatttaaactgccagtgttatacgtctcatgctctgtgtgccaggtgaaggtactgtgtaaggaagacatttgcggtgcttcttgtcctataatgattcaagtatatagtagttcttgaaagagtgtgcatatattactcatctgcttaagagagtgggttaatggatatatcagaggagccaaatacatttttttcagaacttgaaaaccaaaggtcatcatgagtgcactcaaaagttaggacaagtttattacatttgggattttcatctgtagccgtatgaagaaccctttccaatataaaagcatggcattaaattaggctgaagtcttttattttttgtatatgtactatatagaaatactagcaagttaggatcatccaatatggcctaccccgaaatggcccctctgtttccctaaccacatggaagaaagaatctgaacgtctccaccggctctacccgagttccaaaactaaagggcttctccagacctgatggttccagtttacctgctgttggcctgctggatacttgactcaggcataaattaagtgccctggtcccgaactttctccctgtatttgacctccttccctctttcctaaattactagtctggaattaaaattagctccagcaatgacctttgactccattcattttctcctcatcttgggtcttaaaaaaggagaccagatacctcctagcttttgtatcacaaccaggaatgggtattaggcctcatgcgctttgctcagaacactgccgctttgttaacaaatgacagcatggaacccagagttttgattcgatgcaaaataacagcagtgcaaccaggattcttgttttccttttccttcttggagtttggaatttctagcttttcaagcagcataagtagaatcaacattaggatgttttcatgaaatagcatccttatacttctttgagcttgatgttagtggctagactgatttccctttgctctcaaaatacaaagtgcattgaagtatacagagaaatgcctgaatatggcaagcaaataatgtagattaacattctatggcgtgtcgtttatcctctagagtcagctatgacgatgg

SEQ ID NO: 26921 - DNA, 5770 bp, Homo sapiens
  misc_feature (5736)..(5736): n is a, c, g, or t
cacttactacagatgggtgctaatgtccacgctcgtgatgatggaggtctcatcccgcttcataatgcctgttcttttggccatgctgaggttgtgagtctgttattgtgccaaggagctgatccaaatgccagggataactggaactatacacctctgcatgaagctgctattaaagggaagatcgatgtgtgcattgtgctgctgcagcacggagctgacccaaacattcggaacactgatgggaaatcagccctggacctggcagatccttcagcaaaagctgtccttacaggtgaatacaagaaagacgaactcctagaagctgctaggagtggtaatgaagaaaaactaatggctttactgactcctctaaatgtgaattgccatgcaagtgatgggcgaaagtcgactcctttacatctagcagcgggctacaacagagttcgaatagttcagcttcttcttcagcatggtgctgatgttcatgcaaaagacaaaggtggacttgtgcctcttcataatgcatgttcatatggacattatgaagtcacagaactgctactaaagcatggagcttgtgttaatgccatggatctctggcagtttactccactgcacgaggctgcttccaagaaccgtgtagaagtctgctctttgttacttagccatggcgctgatcctacgttagtcaactgccatggcaaaagtgctgtggatatggctccaactccggagcttagggagagattgacttatgaatttaaaggtcattctttactacaagcagccagagaagcagacttagctaaagttaaaaaaacactcgctctggaaatcattaatttcaaacaaccgcagtctcatgaaacagcactgcactgtgctgtggcctctctgcatcccaaacgtaaacaagtgacagaattgttacttagaaaaggagcaaatgttaatgaaaaaaataaagatttcatgactcccctgcatgttgcagccgaaagagcccataatgatgtcatggaagttctgcataagcatggcgccaagatgaatgcactggacacccttggtcagactgctttgcatagagccgccctagcaggccacctgcagacctgccgcctcctgctgagttacggctctgacccctccatcatctccttacaaggcttcacagcagcacagatgggcaatgaagcagtgcagcagattctgagtgagagtacacctatacgtacttctgatgttgattatcgactcttagaggcatctaaagctggagacttggaaactgtgaagcaactttgcagctctcaaaatgtgaattgtagagacttagagggccggcattccacgcccttacacttcgcagcaggctacaaccgcgtgtctgttgtagagtacctgctacaccacggtgccgatgtccatgccaaagacaagggtggcttggtgccccttcataatgcctgttcatatggacactatgaggtggctgagcttttagtaaggcatggggcttctgtcaatgtggcggacttatggaaatttacccctctccatgaagcagcagctaaaggaaagtatgaaatctgcaagctccttttaaaacatggagcagatccaactaaaaagaacagagatggaaatacacctttggatttggtaaaggaaggagacacagatattcaggacttactgaaaggggatgctgctttgttggatgctgccaagaagggctgcctggcaagagtgcagaagctctgtaccccagagaatatcaactgcagagacacccagggcagaaattcaacccctctgcacctggcagcaggctataataacctggaagtagctgaatatcttctagagcatggagctgatgttaatgcccaggacaagggtggtttaattcctcttcataatgcggcatcttatgggcatgttgacatagcggctttattgataaaatacaacacgtgtgtaaatgcaacagataagtgggcgtttactcccctccatgaagcagcccagaaaggaaggacgcagctgtgcgccctcctcctagcgcatggtgcagaccccaccatgaagaaccaggaaggccagacgcctctggatctggcaacagctgacgatatcagagctttgctgatagatgccatgcccccagaggccttacctacctgttttaaacctcaggctactgtagtgagtgcctctctgatctcaccagcatccaccccctcctgcctctcggctgccagcagcatagacaacctcactggccctttagcagagttggccgtaggaggagcctccaatgcaggggatggcgccgcgggaacagaaaggaaggaaggagaagttgctggtcttgacatgaatatcagccaatttctaaaaagccttggccttgaacaccttcgggatatctttgaaacagaacagattacactagatgtgttggctgatatgggtcatgaagagttgaaagaaataggcatcaatgcatatgggcaccgccacaaattaatcaaaggagtagaaagactcttaggtggacaacaaggcaccaatccttatttgacttttcactgtgttaatcagggaacgattttgctggatcttgctccagaagataaagaatatcagtcagtggaagaagagatgcaaagtactattcgagaacacagagatggtggtaatgctggcggcatcttcaacagatacaatgtcattcgaattcaaaaagttgtcaacaagaagttgagggagcggttctgccaccgacagaaggaagtgtctgaggagaatcacaaccatcacaatgagcgcatgttgtttcatggttctcctttcattaatgccattattcataaagggtttgatgagcgacatgcatacataggaggaatgtttggggccgggatttattttgctgaaaactcctcaaaaagcaaccaatatgtttatggaattggaggaggaacaggctgccctacacacaaggacaggtcatgctatatatgtcacagacaaatgctcttctgtagagtgacccttgggaaatcctttctgcagtttagcaccatgaaaatggcccacgcgcctccagggcaccactcagtcattggtagaccgagcgtcaatgggctggcatatgctgaatatgtcatctacagaggagaacaggcatacccagagtatcttatcacttaccagatcatgaagccagaagccccttcccagaccgcaacagccgcagagcagaagacctagtgaatgcctgctggtgaaggccagatcagatttcaacctgggactggattacagaggattgtttctaataacaacatcaatattctagaagtccctgacagcctagaaataagctgtttgtcttctataaagcattgctatagtgatgaatagtatgagtaactgatacatactcaactgctactgttccctttgaggaaatgtttacaggggcggccttttaacatatctcaggctcattttcattgcaattatccatttctaaaacaagattgcttcgatctagacttggaaatggaaaataagaaaaccaatgctttttcaaatgttcacaattcacacactacatttgttttgttatgcatgacgtgtctataacaaatatacacatacgacaggcaacaagcttgtttttgatttgccagacatgcatcattggctattgtttgtttgttttttgtttttttgtgttttttgggttactttgaaaatgagccagagccttcttgaggatattttgcacaaagtcacgctgacaaaatcattagcagtgcaacccaagcttctggctgagcaagattcagtttccactttttaaaatttttttattttgctctgtagctgcacttctcgttatcataaattgagatgaaaaggaaaaaacatcaagttttagtacctttttatgaattggcctatcttacaagagaagggcacaaacaccaacctgacttaggaacgcctaaattcagagaagtcaaagccggtgaaggccacttgctctttccaacacaagcctgccacagaggtcttcgggacagtactggagatgcaggttgacacgggcttgagttccaaggtgaaaaaactggggaggctgtgaaggaagagctgcattaaggagggtgaggagcgtgtggttctgtatcatggcagccccaatggatccaggggatgcctccaaaaaatacatgcttcccttcccttaatctgtactgttgggattgttacccctccaaattagctgccttatttcaaaagtcagtgaaattactgcacttgatgagggtcacaaaaataccacttgattgtttctttagttgagaatgctgggattcagactcgaatagtggatagatacacacaaatgcaaggacttttttgtttactccagatttggggtttattttgagtggcatgcttcaaatagttcataaagatccttgcattaaatttctgaaccatttcttcaaacttcttagtgtgtttagacaaggagaacaaaaattgaaaccaaagccctttctgttattttttcaatgaaggtgagaaagaaataccatacaattttctttgtgaaattactgtttattttcatcaacatttaccaagtgccattgacatttataaaaaaaatgatcctttatagttcttacacttgcccttttcaccttaactgaatatgaattgagtgcactaacttatttacttgatatactgtgcatctactctgctttgaagcgaaagaaatataaacacgaggaggaataggaaagacagtgtgacacaaacttgccattgcaattcaaagccctgaaaacgatgggtttaatgcaaggtgattaagctgtgacctcctttaatctcctgaagcaaaataaaatggttacatgcaaaacttctagaaatagactcttaaaatatatacattttgctttgattttggcttcaacccagtgctggaactaggcatccagactagtttgaatgtttgtagctgaatttttatgggtcctcaaaattaaatcgagaattagcctcagttgttgcttcttttgaagtttcagtgacccaagctgggtgtttgtgtcttggctacttgtttaatagcactagaattccaggtgaagctttgagagttgatattcattaagagggctttttttccccttctttccttctcttttgctgtaacaaagggttgaagaaattgccatctgtgtagttttcagtagctgtcaagtgtgtcttacttaccttcccccagacgtagtttaaaatggtaaacacagctgtgatttttagttaagtaaaagagttaatatgatatagatatggaaagctttatggcttcattaaaaagataaaccactacctaactgtggttgtatgttgtttccatcatactaactagatgaatggatgcgccagttttcatcttggtccttacacttgagaagttaaactgtggttcagtatttaaactgccagtgttatacgtctcatgctctgtgtgccaggtgaaggtactgtgtaaggaagacatttgcggtgcttcttgtcctataatgattcaagtatatagtagttcttgaaagagtgtgcatatattactcatctgatatatccattaacccactctcttaagcagatgagggcgacgcggccgcnaatttattaatagtaggccgccgctccttaggat

SEQ ID NO: 26922 - DNA, 6199 bp, Homo sapiens
cacttactacagatgggtgctaatgtccacgctcgtgatgatggaggtctcatcccgcttcataatgcctgttcttttggccatgctgaggttgtgagtctgttattgtgccaaggagctgatccaaatgccagggataactggaactatacacctctgcatgaagctgctattaaagggaagatcgatgtgtgcattgtgctgctgcagcacggagctgacccaaacattcggaacactgatgggaaatcagccctggacctggcagatccttcagcaaaagctgtccttacaggtgaatacaagaaagacgaactcctagaagctgctaggagtggtaatgaagaaaaactaatggctttactgactcctctaaatgtgaattgccatgcaagtgatgggcgaaagtcgactcctttacatctagcagcgggctacaacagagttcgaatagttcagcttcttcttcagcatggtgctgatgttcatgcaaaagacaaaggtggacttgtgcctcttcataatgcatgttcatatggacattatgaagtcacagaactgctactaaagcatggagcttgtgttaatgccatggatctctggcagtttactccactgcacgaggctgcttccaagaaccgtgtagaagtctgctctttgttacttagccatggcgctgatcctacgttagtcaactgccatggcaaaagtgctgtggatatggctccaactccggagcttagggagagattgacttatgaatttaaaggtcattctttactacaagcagccagagaagcagacttagctaaagttaaaaaaacactcgctctggaaatcattaatttcaaacaaccgcagtctcatgaaacagcactgcactgtgctgtggcctctctgcatcccaaacgtaaacaagtgacagaattgttacttagaaaaggagcaaatgttaatgaaaaaaataaagatttcatgactcccctgcatgttgcagccgaaagagcccataatgatgtcatggaagttctgcataagcatggcgccaagatgaatgcactggacacccttggtcagactgctttgcatagagccgccctagcaggccacctgcagacctgccgcctcctgctgagttacggctctgacccctccatcatctccttacaaggcttcacagcagcacagatgggcaatgaagcagtgcagcagattctgagtgagagtacacctatacgtacttctgatgttgattatcgactcttagaggcatctaaagctggagacttggaaactgtgaagcaactttgcagctctcaaaatgtgaattgtagagacttagagggccggcattccacgcccttacacttcgcagcaggctacaaccgcgtgtctgttgtagagtacctgctacaccacggtgccgatgtccatgccaaagacaagggtggcttggtgccccttcataatgcctgttcatatggacactatgaggtggctgagcttttagtaaggcatggggcttctgtcaatgtggcggacttatggaaatttacccctctccatgaagcagcagctaaaggaaagtatgaaatctgcaagctccttttaaaacatggagcagatccaactaaaaagaacagagatggaaatacacctttggatttggtaaaggaaggagacacagatattcaggacttactgaaaggggatgctgctttgttggatgctgccaagaagggctgcctggcaagagtgcagaagctctgtaccccagagaatatcaactgcagagacacccagggcagaaattcaacccctctgcacctggcagcaggctataataacctggaagtagctgaatatcttctagagcatggagctgatgttaatgcccaggacaagggtggtttaattcctcttcataatgcggcatcttatgggcatgttgacatagcggctttattgataaaatacaacacgtgtgtaaatgcaacagataagtgggcgtttactcccctccatgaagcagcccagaaaggaaggacgcagctgtgcgccctcctcctagcgcatggtgcagaccccaccatgaagaaccaggaaggccagacgcctctggatctggcaacagctgacgatatcagagctttgctgatagatgccatgcccccagaggccttacctacctgttttaaacctcaggctactgtagtgagtgcctctctgatctcaccagcatccaccccctcctgcctctcggctgccagcagcatagacaacctcactggccctttagcagagttggccgtaggaggagcctccaatgcaggggatggcgccgcgggaacagaaaggaaggaaggagaagttgctggtcttgacatgaatatcagccaatttctaaaaagccttggccttgaacaccttcgggatatctttgaaacagaacagattacactagatgtgttggctgatatgggtcatgaagagttgaaagaaataggcatcaatgcatatgggcaccgccacaaattaatcaaaggagtagaaagactcttaggtggacaacaaggcaccaatccttatttgacttttcactgtgttaatcagggaacgattttgctggatcttgctccagaagataaagaatatcagtcagtggaagaagagatgcaaagtactattcgagaacacagagatggtggtaatgctggcggcatcttcaacagatacaatgtcattcgaattcaaaaagttgtcaacaagaagttgagggagcggttctgccaccgacagaaggaagtgtctgaggagaatcacaaccatcacaatgagcgcatgttgtttcatggttctcctttcattaatgccattattcataaagggtttgatgagcgacatgcatacataggaggaatgtttggggccgggatttattttgctgaaaactcctcaaaaagcaaccaatatgtttatggaattggaggaggaacaggctgccctacacacaaggacaggtcatgctatatatgtcacagacaaatgctcttctgtagagtgacccttgggaaatcctttctgcagtttagcaccatgaaaatggcccacgcgcctccagggcaccactcagtcattggtagaccgagcgtcaatgggctggcatatgctgaatatgtcatctacagaggagaacaggcatacccagagtatcttatcacttaccagatcatgaagccagaagccccttcccagaccgcaacagccgcagagcagaagacctagtgaatgcctgctggtgaaggccagatcagatttcaacctgggactggattacagaggattgtttctaataacaacatcaatattctagaagtccctgacagcctagaaataagctgtttgtcttctataaagcattgctatagtgatgaatagtatgagtaactgatacatactcaactgctactgttccctttgaggaaatgtttacaggggcggccttttaacatatctcaggctcattttcattgcaattatccatttctaaaacaagattgcttcgatctagacttggaaatggaaaataagaaaaccaatgctttttcaaatgttcacaattcacacactacatttgttttgttatgcatgacgtgtctataacaaatatacacatacgacaggcaacaagcttgtttttgatttgccagacatgcatcattggctattgtttgtttgttttttgtttttttgtgttttttgggttactttgaaaatgagccagagccttcttgaggatattttgcacaaagtcacgctgacaaaatcattagcagtgcaacccaagcttctggctgagcaagattcagtttccactttttaaaatttttttattttgctctgtagctgcacttctcgttatcataaattgagatgaaaaggaaaaaacatcaagttttagtacctttttatgaattggcctatcttacaagagaagggcacaaacaccaacctgacttaggaacgcctaaattcagagaagtcaaagccggtgaaggccacttgctctttccaacacaagcctgccacagaggtcttcgggacagtactggagatgcaggttgacacgggcttgagttccaaggtgaaaaaactggggaggctgtgaaggaagagctgcattaaggagggtgaggagcgtgtggttctgtatcatggcagccccaatggatccaggggatgcctccaaaaaatacatgcttcccttcccttaatctgtactgttgggattgttacccctccaaattagctgccttatttcaaaagtcagtgaaattactgcacttgatgagggtcacaaaaataccacttgattgtttctttagttgagaatgctgggattcagactcgaatagtggatagatacacacaaatgcaaggacttttttgtttactccagatttggggtttattttgagtggcatgcttcaaatagttcataaagatccttgcattaaatttctgaaccatttcttcaaacttcttagtgtgtttagacaaggagaacaaaaattgaaaccaaagccctttctgttattttttcaatgaaggtgagaaagaaataccatacaattttctttgtgaaattactgtttattttcatcaacatttaccaagtgccattgacatttataaaaaaaatgatcctttatagttcttacacttgcccttttcaccttaactgaatatgaattgagtgcactaacttatttacttgatatactgtgcatctactctgctttgaagcgaaagaaatataaacacgaggaggaataggaaagacagtgtgacacaaacttgccattgcaattcaaagccctgaaaacgatgggtttaatgcaaggtgattaagctgtgacctcctttaatctcctgaagcaaaataaaatggttacatgcaaaacttctagaaatagactcttaaaatatatacattttgctttgattttggcttcaacccagtgctggaactaggcatccagactagtttgaatgtttgtagctgaatttttatgggtcctcaaaattaaatcgagaattagcctcagttgttgcttcttttgaagtttcagtgacccaagctgggtgtttgtgtcttggctacttgtttaatagcactagaattccaggtgaagctttgagagttgatattcattaagagggctttttttccccttctttccttctcttttgctgtaacaaagggttgaagaaattgccatctgtgtagttttcagtagctgtcaagtgtgtcttacttaccttcccccagacgtagtttaaaatggtaaacacagctgtgatttttagttaagtaaaagagttaatatgatatagatatggaaagctttatggcttcattaaaaagataaaccactacctaactgtggttgtatgttgtttccatcatactaactagatgaatggatgcgccagttttcatcttggtccttacacttgagaagttaaactgtggttcagtatttaaactgccagtgttatacgtctcatgctctgtgtgccaggtgaaggtactgtgtaaggaagacatttgcggtgcttcttgtcctataatgattcaagtatatagtagttcttgaaagagtgtgcatatattactcatctgcttaagagagtgggttaatggatatatcagaggagccaaatacatttttttcagaacttgaaaaccaaaggtcatcatgagtgcactcaaaagttaggacaagtttattacatttgggattttcatctgtagccgtatgaagaaccctttccaatataaaagcatggcattaaattaggctgaagtcttttattttttgtatatgtactatatagaaatactagcaagttaggatcatccaatatggcctaccccgaaatggcccctctgtttccctaaccacatggaagaaagaatctgaacgtctccaccggctctacccgagttccaaaactaaagggcttctccagacctgatggttccagtttacctgctgttggcctgctggatacttgactcaggcataaattaagtgccctggtcccgaactttctccctgtatttgacctccttccctttctatcgttctctctttgcatggatttttttgaaaaaaaataaattgctcaaata

SEQ ID NO: 26923 - DNA, 585 bp, Homo sapiens
cgatatttgtggttctggcaatcctcccatttcagcctcccgagcagcgggggactacagacatgtacaaccatgttgagtttatttttttttcttagtttatagagatgggtttcaccatgttggcccaggctggtcttgaactcctgacctcaagtgatctgcccgcctccacctcccaaagtgttgagattacagacgtgagccaatgtgcctggcctattcccttctctctttatgctaccacaaataattaccttctgtttattgtaagtgatgcatgtctaacaatttgtacaatacattttgaatatatttttccttccattattgtcttttcccaagaccatagggttgccttctctacatttgttctcttagaattcagctcccttttccctataatcttctaatgtagaatatttaatagaatgccagaacgtcactcagtgggtactactacctcttatttttcaacttttcagtttcttaagtttagcgttttttgaatatgtaaagtgaatgtatgcgatacattaattcgttttataaatttaaaattctgtcatgtctacttaaaaggaa

SEQ ID NO: 26924 - DNA, 4413 bp, Homo sapiens
agaacggcgtcttccagttccccaccggatgaagcggaagtgcgtcatgtcgaggcgccaaggcgctcgtttggcgcgcggccctaggcggcggatctaagctaacttcttggatcttttcttgtttctccttggtttttgactttttctggaccctggtgtctacgatttccgagatgccgtcttctttgttgggcgcggcgatgccggcctctacatctgccgcagccctgcaggaagctctggaaaatgctggacggctcatcgaccgtcagttgcaagaggaccgcatgtacccggacctttccgagctgcttatggtgtctgccccaaataatcccaccgtttctggcatgtcagatatggattatcctttacaaggacctggtttgctgtccgtacccaaccttccagagatcagttccatccgaagagttcctctcccacctgaacttgttgagcagtttggacatatgcagtgtaattgcatgatgggtgtgttccctcctatcagcagagcttggctcacaattgacagtgatatattcatgtggaactatgaggatggaggagaccttgcctattttgatggacttagtgagactattcttgctgtggggcttgtgaagccaaaagcaggcatctttcaacctcatgtgcgacacctcctggttttggcgacccctgtagacatagtaattcttggactcagctatgctaatttgcaaacaggttctggagttcttaatgatagtttgtctggtggaatgcagttgcttccagatcctttatattctcttcctactgataatacttaccttttaacaataacttccactgataatggcagaattttcttggctggaaaggatggctgtttatatgaagtagcctaccaggctgaagcagggtggtttagccaaagatgtaggaaaataaaccactcaaagagctcactttctttccttgttccttccttgctacaattcacgttctcagaagatgatcctattcttcaaattgcaattgataattctagaaatattttatatacacgatctgagaaaggagtaatacaggtgtatgatttgggacaagatggacaaggaatgagcagagttgcctctgtgtcacagaatgccattgtctctgctgctggtaacattgctaggaccatcgatcgttctgtttttaaaccaattgtccaaatagcagtgattgaaaattctgaatcactggactgtcagttattggctgtcacacatgcaggtgttaggttatattttagcacttgtccattcagacagccattagcacggcctaatacactgacgctggttcatgtccgcttacctcctggattctcagcatcttcaaccgtggaaaagccttcaaaagtacatagagctctttatagtaaaggtattctattgatggcagcctcagaaaatgaggataatgatattttatggtgtgtcaaccatgatacttttcctttccaaaagccaatgatggaaacccagatgacagctggtgttgatggtcattcctgggctctttctgcgatagatgaattgaaagtagataaaataattacacctttaaacaaggatcatattccaataactgattcaccagttgttgtacagcagcacatgttacctccgaagaaatttgttctcctctcagcacaggggagccttatgtttcataaacttagacctgtagatcaactgaggcatctacttgtgagtaatgtgggaggagatggagaagagattgaaagattctttaaattacatcaggaagaccaggcttgtgcaacttgccttattcttgcttgctccactgctgcctgtgatagagaagtatctgcctgggctactcgggctttctttaggtatggtggtgaagcacagatgagatttccaaccactcttccgcctccaagtaatgttggtcccatcttggggtctcctgtctattctagttctcctgttcctagtggtagtccctatccaaatccatcctttttgggaacaccgtctcatggtatacagcctcctgccatgtcaactccagtgtgtgctctgggaaacccagcaactcaggccacaaatatgagttgtgtgactggaccagagattgtgtactctggaaaacacaatggtatttgcatttacttttctcggatcatgggaaacatttgggatgcaagcttagttgtggagagaatattcaagagtggcaacagagagatcactgcaattgaaagtagtgttccctgccaactgctagagtcagtgctacaagaactaaagggtttgcaggaatttctagacagaaactcccagtttgcaggaggaccattaggaaatccaaatactactgctaaagtgcagcagaggctgataggattcatgcgtcctgaaaacggaaatccccagcaaatgcaacaggaactgcagaggaagtttcatgaggctcaactaagtgaaaagatttcacttcaggcaattcagcagttggttcgaaaatcatatcaggctctggctttatggaaacttctttgtgaacatcaattcactatcattgtggcagaacttcagaaggaacttcaagagcagctgaagatcaccacctttaaagatcttgtaatcagggacaaagaactcacaggggcattaattgcttctcttatcaactgctacatcagagataatgccgctgttgatggcattagtttacatttacaggatatctgcccacttctatatagcactgatgatgcaatttgttctaaggcaaatgagcttctccagcgttcccgacaagttcaaaataagactgaaaaagaaagaatgttaagggaatcattaaaggaatatcaaaaaattagcaatcaagtggacctttccaatgtttgtgctcagtatagacaagtgagattttatgagggtgtggtggaactttctcttacggctgcagagaaaaaagatcctcaaggtcttgggcttcatttctataaacatggagaaccagaagaagacatagttggacttcaggccttccaagaaagattaaacagttacaaatgcattacagacacacttcaagaactggtaaatcaaagtaaggccgctcctcagtctcccagtgtacccaaaaaacctggtcctccagtgttgtcatctgatccaaatatgctgagtaatgaagaagcaggacatcattttgaacaaatgcttaaattgtcacagcgatccaaggatgagctctttagtattgccctttataattggctaatacaagtcgaccttgcagataagctgctacaggttgcttctccatttctggagccacatctagtccgaatggccaaagttgatcaaaacagagttcgttatatggatttactctggcggtattacgagaagaacagaagtttcagtaatgctgctcgtgtactgtccagactggctgacatgcatagcacagaaatttcacttcagcagcgactagagtacattgctcgagccattcttagtgccaaaagttccactgccatttcatcaatagctgccgatggtgaatttcttcatgaattagaagaaaaaatggaggttgctaggatccaacttcagatacaggagacactacaaaggcagtattcccatcattcttctgtacaggatgcagtttctcagctggattctgagctgatggacataactaagctttatggggaatttgctgacccatttaaacttgcagagtgcaaacttgcaataattcattgtgccggttattcagaccctatattggtgcagacactttggcaagatatcatagagaaagaattgagtgacagtgtgacattgagctcctcggatagaatgcatgctcttagtctcaagattgttctccttggcaaaatttatgctggcacaccacgcttctttcctttagattttattgtacagtttttagaacagcaggtttgtactttgaactgggatgtgggcttcgtaatacagacaatgaatgaaattggagtaccattacctagactactagaagtttatgatcagttgttcaaatcacgggatccattctggaacagaatgaagaagccactgcaccttttggattgtatacatgtattattgataagatatgttgagaatcccagccaagttttaaattgtgaaaggagaagatttacaaatctctgcctggatgctgtttgtggttaccttgttgagctccagtctatgagctcgtcagtagcagtacaagccatcactgggaattttaaatctcttcaagctaaattagaacggcttcattaattactgtgatatactttcatccgttttatgatctgtaaaataaaaactcagctgggtccag

SEQ ID NO: 26925 - DNA, 5174 bp, Homo sapiens
agaacggcgtcttccagttccccaccggatgaagcggaagtgcgtcatgtcgaggcgccaaggcgctcgtttggcgcgcggccctaggcggcggatctaagctaacttcttggatcttttcttgtttctccttggtttttgactttttctggaccctggtgtctacgatttccgagatgccgtcttctttgttgggcgcggcgatgccggcctctacatctgccgcagccctgcaggaagctctggaaaatgctggacggctcatcgaccgtcagttgcaagaggaccgcatgtacccggacctttccgagctgcttatggtgtctgccccaaataatcccaccgtttctggcatgtcagatatggattatcctttacaaggacctggtttgctgtccgtacccaaccttccagagatcagttccatccgaagagttcctctcccacctgaacttgttgagcagtttggacatatgcagtgtaattgcatgatgggtgtgttccctcctatcagcagagcttggctcacaattgacagtgatatattcatgtggaactatgaggatggaggagaccttgcctattttgatggacttagtgagactattcttgctgtggggcttgtgaagccaaaagcaggcatctttcaacctcatgtgcgacacctcctggttttggcgacccctgtagacatagtaattcttggactcagctatgctaatttgcaaacaggttctggagttcttaatgatagtttgtctggtggaatgcagttgcttccagatcctttatattctcttcctactgataatacttaccttttaacaataacttccactgataatggcagaattttcttggctggaaaggatggctgtttatatgaagtagcctaccaggctgaagcagggtggtttagccaaagatgtaggaaaataaaccactcaaagagctcactttctttccttgttccttccttgctacaattcacgttctcagaagatgatcctattcttcaaattgcaattgataattctagaaatattttatatacacgatctgagaaaggagtaatacaggtgtatgatttgggacaagatggacaaggaatgagcagagttgcctctgtgtcacagaatgccattgtctctgctgctggtaacattgctaggaccatcgatcgttctgtttttaaaccaattgtccaaatagcagtgattgaaaattctgaatcactggactgtcagttattggctgtcacacatgcaggtgttaggttatattttagcacttgtccattcagacagccattagcacggcctaatacactgacgctggttcatgtccgcttacctcctggattctcagcatcttcaaccgtggaaaagccttcaaaagtacatagagctctttatagtaaaggtattctattgatggcagcctcagaaaatgaggataatgatattttatggtgtgtcaaccatgatacttttcctttccaaaagccaatgatggaaacccagatgacagctggtgttgatggtcattcctgggctctttctgcgatagatgaattgaaagtagataaaataattacacctttaaacaaggatcatattccaataactgattcaccagttgttgtacagcagcacatgttacctccgaagaaatttgttctcctctcagcacaggggagccttatgtttcataaacttagacctgtagatcaactgaggcatctacttgtgagtaatgtgggaggagatggagaagagattgaaagattctttaaattacatcaggaagaccaggcttgtgcaacttgccttattcttgcttgctccactgctgcctgtgatagagaagtatctgcctgggctactcgggctttctttaggtatggtggtgaagcacagatgagatttccaaccactcttccgcctccaagtaatgttggtcccatcttggggtctcctgtctattctagttctcctgttcctagtggtagtccctatccaaatccatcctttttgggaacaccgtctcatggtatacagcctcctgccatgtcaactccagtgtgtgctctgggaaacccagcaactcaggccacaaatatgagttgtgtgactggaccagagattgtgtactctggaaaacacaatggtatttgcatttacttttctcggatcatgggaaacatttgggatgcaagcttagttgtggagagaatattcaagagtggcaacagagagatcactgcaattgaaagtagtgttccctgccaactgctagagtcagtgctacaagaactaaagggtttgcaggaatttctagacagaaactcccagtttgcaggaggaccattaggaaatccaaatactactgctaaagtgcagcagaggctgataggattcatgcgtcctgaaaacggaaatccccagcaaatgcaacaggaactgcagaggaagtttcatgaggctcaactaagtgaaaagatttcacttcaggcaattcagcagttggttcgaaaatcatatcaggctctggctttatggaaacttctttgtgaacatcaattcactatcattgtggcagaacttcagaaggaacttcaagagcagctgaagatcaccacctttaaagatcttgtaatcagggacaaagaactcacaggggcattaattgcttctcttatcaactgctacatcagagataatgccgctgttgatggcattagtttacatttacaggatatctgcccacttctatatagcactgatgatgcaatttgttctaaggcaaatgagcttctccagcgttcccgacaagttcaaaataagactgaaaaagaaagaatgttaagggaatcattaaaggaatatcaaaaaattagcaatcaagtggacctttccaatgtttgtgctcagtatagacaagtgagattttatgagggtgtggtggaactttctcttacggctgcagagaaaaaagatcctcaaggtcttgggcttcatttctataaacatggagaaccagaagaagacatagttggacttcaggccttccaagaaagattaaacagttacaaatgcattacagacacacttcaagaactggtaaatcaaagtaaggccgctcctcagtctcccagtgtacccaaaaaacctggtcctccagtgttgtcatctgatccaaatatgctgagtaatgaagaagcaggacatcattttgaacaaatgcttaaattgtcacagcgatccaaggatgagctctttagtattgccctttataattggctaatacaagtcgaccttgcagataagctgctacaggttgcttctccatttctggagccacatctagtccgaatggccaaagttgatcaaaacagagttcgttatatggatttactctggcggtattacgagaagaacagaagtttcagtaatgctgctcgtgtactgtccagactggctgacatgcatagcacagaaatttcacttcagcagcgactagagtacattgctcgagccattcttagtgccaaaagttccactgccatttcatcaatagctgccgatggtgaatttcttcatgaattagaagaaaaaatggaggttgctaggatccaacttcagatacaggagacactacaaaggcagtattcccatcattcttctgtacaggatgcagtttctcagctggattctgagctgatggacataactaagctttatggggaatttgctgacccatttaaacttgcagagtgcaaacttgcaataattcattgtgccggttattcagaccctatattggtgcagacactttggcaagatatcatagagaaagaattgagtgacagtgtgacattgagctcctcggatagaatgcatgctcttagtctcaagattgttctccttggcaaaatttatgctggcacaccacgcttctttcctttagattttattgtacagtttttagaacagcaggtttgtactttgaactgggatgtgggcttcgtaatacagacaatgaatgaaattggagtaccattacctagactactagaagtttatgatcagttgttcaaatcacgggatccattctggaacagaatgaagaagccactgcaccttttggattgtatacatgtattattgataagatatgttgagaatcccagccaagttttaaattgtgaaaggagaagatttacaaatctctgcctggatgctgtttgtggttaccttgttgagctccagtctatgagctcgtcagtagcagtacaagccatcactgggaattttaaatctcttcaagctaaattagaacggcttcattaattactgtgatatactttcatccgttttatgatctgtaaaataaaaactcagctgggtccagatatcaggtgttctaaatctaagaatgtaagaacaatcttaatagaaatatgtttttaataagtggctaatatctacaaatagtacctttgctaaatgaattcttttttatgactattttgttttttagtaattgggtgaaaaaacaactgaaattgtactgcaggcagaaatttcgaatttatattattcattttcaagttagtccaaggatattggcattaaaactccactaggcggccaggcacagtgacttacacctgtaatcccagcactttgggaggccaaggtgggcgaatcacgagcaggctggtcttgaactcctgacctcaagtgatctgcccgcctccacctcccaaagtgttgagattacagacgtgagccaatgtgcctggcctattcccttctctctttatgctaccacaaataattaccttctgtttattgtaagtgatgcatgtctaacaatttgtacaatacattttgaatatatttttccttccattattgtcttttcccaagaccatagggttgccttctctacatttgttctcttagaattcagctcccttttccctataatcttctaatgtagaatatttaatagaatgccagaacgtcactcagtgggtactactacctcttatttttcaacttttcagtttcttaagtttagcgttttttgaatatgtaaagtgaatgtatgcgatacattaattcgttttataaatttaaaattctgtcatgtctacttaaaaggaa

SEQ ID NO: 26926 - DNA, 4892 bp, Homo sapiens
agaacggcgtcttccagttccccaccggatgaagcggaagtgcgtcatgtcgaggcgccaaggcgctcgtttggcgcgcggccctaggcggcggatctaagctaacttcttggatcttttcttgtttctccttggtttttgactttttctggaccctggtgtctacgatttccgagatgccgtcttctttgttgggcgcggcgatgccggcctctacatctgccgcagccctgcaggaagctctggaaaatgctggacggctcatcgaccgtcagttgcaagaggaccgcatgtacccggacctttccgagctgcttatggtgtctgccccaaataatcccaccgtttctggcatgtcagatatggattatcctttacaaggacctggtttgctgtccgtacccaaccttccagagatcagttccatccgaagagttcctctcccacctgaacttgttgagcagtttggacatatgcagtgtaattgcatgatgggtgtgttccctcctatcagcagagcttggctcacaattgacagtgatatattcatgtggaactatgaggatggaggagaccttgcctattttgatggacttagtgagactattcttgctgtggggcttgtgaagccaaaagcaggcatctttcaacctcatgtgcgacacctcctggttttggcgacccctgtagacatagtaattcttggactcagctatgctaatttgcaaacaggttctggagttcttaatgatagtttgtctggtggaatgcagttgcttccagatcctttatattctcttcctactgataatacttaccttttaacaataacttccactgataatggcagaattttcttggctggaaaggatggctgtttatatgaagtagcctaccaggctgaagcagggtggtttagccaaagatgtaggaaaataaaccactcaaagagctcactttctttccttgttccttccttgctacaattcacgttctcagaagatgatcctattcttcaaattgcaattgataattctagaaatattttatatacacgatctgagaaaggagtaatacaggtgtatgatttgggacaagatggacaaggaatgagcagagttgcctctgtgtcacagaatgccattgtctctgctgctggtaacattgctaggaccatcgatcgttctgtttttaaaccaattgtccaaatagcagtgattgaaaattctgaatcactggactgtcagttattggctgtcacacatgcaggtgttaggttatattttagcacttgtccattcagacagccattagcacggcctaatacactgacgctggttcatgtccgcttacctcctggattctcagcatcttcaaccgtggaaaagccttcaaaagtacatagagctctttatagtaaaggtattctattgatggcagcctcagaaaatgaggataatgatattttatggtgtgtcaaccatgatacttttcctttccaaaagccaatgatggaaacccagatgacagctggtgttgatggtcattcctgggctctttctgcgatagatgaattgaaagtagataaaataattacacctttaaacaaggatcatattccaataactgattcaccagttgttgtacagcagcacatgttacctccgaagaaatttgttctcctctcagcacaggggagccttatgtttcataaacttagacctgtagatcaactgaggcatctacttgtgagtaatgtgggaggagatggagaagagattgaaagattctttaaattacatcaggaagaccaggcttgtgcaacttgccttattcttgcttgctccactgctgcctgtgatagagaagtatctgcctgggctactcgggctttctttaggtatggtggtgaagcacagatgagatttccaaccactcttccgcctccaagtaatgttggtcccatcttggggtctcctgtctattctagttctcctgttcctagtggtagtccctatccaaatccatcctttttgggaacaccgtctcatggtatacagcctcctgccatgtcaactccagtgtgtgctctgggaaacccagcaactcaggccacaaatatgagttgtgtgactggaccagagattgtgtactctggaaaacacaatggtatttgcatttacttttctcggatcatgggaaacatttgggatgcaagcttagttgtggagagaatattcaagagtggcaacagagagatcactgcaattgaaagtagtgttccctgccaactgctagagtcagtgctacaagaactaaagggtttgcaggaatttctagacagaaactcccagtttgcaggaggaccattaggaaatccaaatactactgctaaagtgcagcagaggctgataggattcatgcgtcctgaaaacggaaatccccagcaaatgcaacaggaactgcagaggaagtttcatgaggctcaactaagtgaaaagatttcacttcaggcaattcagcagttggttcgaaaatcatatcaggctctggctttatggaaacttctttgtgaacatcaattcactatcattgtggcagaacttcagaaggaacttcaagagcagctgaagatcaccacctttaaagatcttgtaatcagggacaaagaactcacaggggcattaattgcttctcttatcaactgctacatcagagataatgccgctgttgatggcattagtttacatttacaggatatctgcccacttctatatagcactgatgatgcaatttgttctaaggcaaatgagcttctccagcgttcccgacaagttcaaaataagactgaaaaagaaagaatgttaagggaatcattaaaggaatatcaaaaaattagcaatcaagtggacctttccaatgtttgtgctcagtatagacaagtgagattttatgagggtgtggtggaactttctcttacggctgcagagaaaaaagatcctcaaggtcttgggcttcatttctataaacatggagaaccagaagaagacatagttggacttcaggccttccaagaaagattaaacagttacaaatgcattacagacacacttcaagaactggtaaatcaaagtaaggccgctcctcagtctcccagtgtacccaaaaaacctggtcctccagtgttgtcatctgatccaaatatgctgagtaatgaagaagcaggacatcattttgaacaaatgcttaaattgtcacagcgatccaaggatgagctctttagtattgccctttataattggctaatacaagtcgaccttgcagataagctgctacaggttgcttctccatttctggagccacatctagtccgaatggccaaagttgatcaaaacagagttcgttatatggatttactctggcggtattacgagaagaacagaagtttcagtaatgctgctcgtgtactgtccagactggctgacatgcatagcacagaaatttcacttcagcagcgactagagtacattgctcgagccattcttagtgccaaaagttccactgccatttcatcaatagctgccgatggtgaatttcttcatgaattagaagaaaaaatggaggttgctaggatccaacttcagatacaggagacactacaaaggcagtattcccatcattcttctgtacaggatgcagtttctcagctggattctgagctgatggacataactaagctttatggggaatttgctgacccatttaaacttgcagagtgcaaacttgcaataattcattgtgccggttattcagaccctatattggtgcagacactttggcaagatatcatagagaaagaattgagtgacagtgtgacattgagctcctcggatagaatgcatgctcttagtctcaagattgttctccttggcaaaatttatgctggcacaccacgcttctttcctttagattttattgtacagtttttagaacagcaggtttgtactttgaactgggatgtgggcttcgtaatacagacaatgaatgaaattggagtaccattacctagactactagaagtttatgatcagttgttcaaatcacgggatccattctggaacagaatgaagaagccactgcaccttttggattgtatacatgtattattgataagatatgttgagaatcccagccaagttttaaattgtgaaaggagaagatttacaaatctctgcctggatgctgtttgtggttaccttgttgagctccagtctatgagctcgtcagtagcagtacaagccatcactgggaattttaaatctcttcaagctaaattagaacggcttcattaattactgtgatatactttcatccgttttatgatctgtaaaataaaaactcagctgggtccagatatcaggtgttctaaatctaagaatgtaagaacaatcttaatagaaatatgtttttaataagtggctaatatctacaaatagtacctttgctaaatgaaaaaacagacaaaacaaaaagacacaaaaaaaaaaaaaaaaaaaaaaaaaaaacagcaaaaaacagaacataccaaaaaaacccaggggggggggggggcaagatccgatcctggtgggcgacacagtgccacgcgaaccgctataaggcaaaaagagggcacacatcgagggcgctagaacaaccacgcacagcggaaaacgaagagaagcgaagagaaaaacaaaggcaacccgagaggaaagggaaaagaacgtatccagaaggaagcactcacaagcaagagagagaggacaacaacaactagcacaacaatacacaacacaagacaagacacagcccgctgagcaacgaagaagaagatacgcaggagaagaagt

SEQ ID NO: 26927 - DNA, 3063 bp, Homo sapiens
agaacggcgtcttccagttccccaccggatgaagcggaagtgcgtcatgtcgaggcgccaaggcgctcgtttggcgcgcggccctaggcggcggatctaagctaacttcttggatcttttcttgtttctccttggtttttgactttttctggaccctggtgtctacgatttccgagatgccgtcttctttgttgggcgcggcgatgccggcctctacatctgccgcagccctgcaggaagctctggaaaatgctggacggctcatcgaccgtcagttgcaagaggaccgcatgtacccggacctttccgagctgcttatggtgtctgccccaaataatcccaccgtttctggcatgtcagatatggattatcctttacaaggacctggtttgctgtccgtacccaaccttccagagatcagttccatccgaagagttcctctcccacctgaacttgttgagcagtttggacatatgcagtgtaattgcatgatgggtgtgttccctcctatcagcagagcttggctcacaattgacagtgatatattcatgtggaactatgaggatggaggagaccttgcctattttgatggacttagtgagactattcttgctgtggggcttgtgaagccaaaagcaggcatctttcaacctcatgtgcgacacctcctggttttggcgacccctgtagacatagtaattcttggactcagctatgctaatttgcaaacaggttctggagttcttaatgatagtttgtctggtggaatgcagttgcttccagatcctttatattctcttcctactgataatacttaccttttaacaataacttccactgataatggcagaattttcttggctggaaaggatggctgtttatatgaagtagcctaccaggctgaagcagggtggtttagccaaagatgtaggaaaataaaccactcaaagagctcactttctttccttgttccttccttgctacaattcacgttctcagaagatgatcctattcttcaaattgcaattgataattctagaaatattttatatacacgatctgagaaaggagtaatacaggtgtatgatttgggacaagatggacaaggaatgagcagagttgcctctgtgtcacagaatgccattgtctctgctgctggtaacattgctaggaccatcgatcgttctgtttttaaaccaattgtccaaatagcagtgattgaaaattctgaatcactggactgtcagttattggctgtcacacatgcaggtgttaggttatattttagcacttgtccattcagacagccattagcacggcctaatacactgacgctggttcatgtccgcttacctcctggattctcagcatcttcaaccgtggaaaagccttcaaaagtacatagagctctttatagtaaaggtattctattgatggcagcctcagaaaatgaggataatgatattttatggtgtgtcaaccatgatacttttcctttccaaaagccaatgatggaaacccagatgacagctggtgttgatggtcattcctgggctctttctgcgatagatgaattgaaagtagataaaataattacacctttaaacaaggatcatattccaataactgattcaccagttgttgtacagcagcacatgttacctccgaagaaatttgttctcctctcagcacaggggagccttatgtttcataaacttagacctgtagatcaactgaggcatctacttgtgagtaatgtgggaggagatggagaagagattgaaagattctttaaattacatcaggaagaccaggcttgtgcaacttgccttattcttgcttgctccactgctgcctgtgatagagaagtatctgcctgggctactcgggctttctttaggtatggtggtgaagcacagatgagatttccaaccactcttccgcctccaagtaatgttggtcccatcttggggtctcctgtctattctagttctcctgttcctagtggtagtccctatccaaatccatcctttttgggaacaccgtctcatggtatacagcctcctgccatgtcaactccagtgtgtgctctgggaaacccagcaactcaggccacaaatatgagttgtgtgactggaccagagattgtgtactctggaaaacacaatggtatttgcatttacttttctcggatcatgggaaacatttgggatgcaagcttagttgtggagagaatattcaagagtggcaacagagagatcactgcaattgaaagtagtgttccctgccaactgctagagtcagtgctacaagaactaaagggtttgcaggaatttctagacagaaactcccagtttgcaggaggaccattaggaaatccaaatactactgctaaagtgcagcagaggctgataggattcatgcgtcctgaaaacggaaatccccagcaaatgcaacaggaactgcagaggaagtttcatgaggctcaactaagtgaaaagatttcacttcaggcaattcagcagttggttcgaaaatcatatcaggctctggctttatggaaacttctttgtgaacatcaattcactatcattgtggcagaacttcagaaggaacttcaagagcagctgaagatcaccacctttaaagatcttgtaatcagggacaaagaactcacaggggcattaattgcttctcttatcaactgctacatcagagataatgccgctgttgatggcattagtttacatttacaggatatctgcccacttctatatagcactgatgatgcaatttgttctaaggcaaatgagcttctccagcgttcccgacaagttcaaaataagactgaaaaagaaagaatgttaagggaatcattaaaggaatatcaaaaaattagcaatcaagtggaccttccatggtcgggcccggataaccagtgaaatcataagggtcggggacctacctaacggtggcaaaaagaacccgggcagggcacaactaaagcgggaccaacatggagacaccctcaacagacacaaccggtcaacaccacacggcgcc

SEQ ID NO: 26928 - DNA, 788 bp, Homo sapiens
gtatgtatttaaggctggtttgctttaagggtgattggaatttatataaactttactgtagctagtgttctcattagaagctgcttggtttatctttcattcatctagcctttgggtcagtgcttctcagtatcagtcatctggagatgttcaaatgtgcattctgtcttagtagtcctgagtgaggctcaagagtctgcatttctaacaagctgccaactgctgctgctggtttaggtgccattcttgagtggcaggagcccgggtcccaagctgttagcccgtagtaaaaatagatgttggcaattcattgagagatgattggacatttttaaagacttctgttttccttgcatttctatggagtaggcatgtgatatttatttattttgttgtcattttgtgaatttgacccgtgtgtaaattatatgtatagaaatgattctgagtgaaagcctaaggtacttttgcttaaatacagcatgttggtctggtgatctccctgttgactttttagagatagattttgttttacttccagttgtccattacattatccttagatgaggtgtgggataaacataggaaagcccatataattaagatgttactcttgttcctgagtaattaatgatctttttaggaacacacgtgcattaaaaagacactgtatcggccgagcacgctgactcaaacgcctataatcccagcactttgggaggctgaggtgggtggatcacctgaggtcaggagtccgagaccagcctggccaacatggagaaaccctg

SEQ ID NO: 26929 - DNA, 500 bp, Homo sapiens
agtggctgaatcttagctcactgcaacctccatcccctgggtttaagcagttctcctgcctcagcctcccaatagctgggattacaggtgtgcaccaccacatccagctaatttttgtgtttttattagaggcagagtttcatcatgttggctaggctggtctcgaactcctgacctcaaatgatccacctgccttggcctcccaaagtgctaggatttacaggtgcgagccactgtgcccagcccataactggcttttcatctaacagtatgtcttgaaattctttccttgtcagtatttggttgatattttaaattatgggctaaactcagtagttaattttgaataatatgtctcgttttgttgattataactggtattagtgattataactggtatttcatgaagatttgaaggtttttataaatatggatatacaatagttattgtaagggagttacatacttttataagtcttctttctacttttttctttaag

SEQ ID NO: 26930 - DNA, 517 bp, Homo sapiens
tgcttcactattaatctctgaatgttgatctctagttggatgttaattttgggattttctctcacagctttatggggaatttgctgacccatttaaacttgcagagtgcaaacttgcaataattcattgtgccggttattcagaccctatattggtgcagacactttggcaagatatcatagagaaaggtaagtgttcagttataggtatgttagcatacgttatgtagtgacttggtggaggaatgcaagctgctagtaactaatataatgcaagctgctagtggctcatgaaaattgtgtatacctaagaagagagtaagtggaagtcacctgggtatggtggaggatgatcatacacagaatgacccaagtgaatattcgggagaatactcagtgaaaaggttatttaatttatattatttgtgctgccttataaaagatactgagacactcacctcagaatctaataaccagtataacctggtaagacatgagagtatctcagacaataacag

SEQ ID NO: 26931 - DNA, 4200 bp, Homo sapiens
gactctcgcctgacttcctaatttgctacttatccccagcgttggtcccggcgaggatatgctgagatttatggcactgttggctgcatttttggagaacagcaagcagcttcttttcagataatcccaccgtttctggcatgtcagatatggattatcctttacaaggacctggtttgctgtccgtacccaaccttccagagatcagttccatccgaagagttcctctcccacctgaacttgttgagcagtttggacatatgcagtgtaattgcatgatgggtgtgttccctcctatcagcagagcttggctcacaattgacagtgatatattcatgtggaactatgaggatggaggagaccttgcctattttgatggacttagtgagactattcttgctgtggggcttgtgaagccaaaagcaggcatctttcaacctcatgtgcgacacctcctggttttggcgacccctgtagacatagtaattcttggactcagctatgctaatttgcaaacaggttctggagttcttaatgatagtttgtctggtggaatgcagttgcttccagatcctttatattctcttcctactgataatacttaccttttaacaataacttccactgataatggcagaattttcttggctggaaaggatggctgtttatatgaagtagcctaccaggctgaagcagggtggtttagccaaagatgtaggaaaataaaccactcaaagagctcactttctttccttgttccttccttgctacaattcacgttctcagaagatgatcctattcttcaaattgcaattgataattctagaaatattttatatacacgatctgagaaaggagtaatacaggtgtatgatttgggacaagatggacaaggaatgagcagagttgcctctgtgtcacagaatgccattgtctctgctgctggtaacattgctaggaccatcgatcgttctgtttttaaaccaattgtccaaatagcagtgattgaaaattctgaatcactggactgtcagttattggctgtcacacatgcaggtgttaggttatattttagcacttgtccattcagacagccattagcacggcctaatacactgacgctggttcatgtccgcttacctcctggattctcagcatcttcaaccgtggaaaagccttcaaaagtacatagagctctttatagtaaaggtattctattgatggcagcctcagaaaatgaggataatgatattttatggtgtgtcaaccatgatacttttcctttccaaaagccaatgatggaaacccagatgacagctggtgttgatggtcattcctgggctctttctgcgatagatgaattgaaagtagataaaataattacacctttaaacaaggatcatattccaataactgattcaccagttgttgtacagcagcacatgttacctccgaagaaatttgttctcctctcagcacaggggagccttatgtttcataaacttagacctgtagatcaactgaggcatctacttgtgagtaatgtgggaggagatggagaagagattgaaagattctttaaattacatcaggaagaccaggcttgtgcaacttgccttattcttgcttgctccactgctgcctgtgatagagaagtatctgcctgggctactcgggctttctttaggtatggtggtgaagcacagatgagatttccaaccactcttccgcctccaagtaatgttggtcccatcttggggtctcctgtctattctagttctcctgttcctagtggtagtccctatccaaatccatcctttttgggaacaccgtctcatggtatacagcctcctgccatgtcaactccagtgtgtgctctgggaaacccagcaactcaggccacaaatatgagttgtgtgactggaccagagattgtgtactctggaaaacacaatggtatttgcatttacttttctcggatcatgggaaacatttgggatgcaagcttagttgtggagagaatattcaagagtggcaacagagagatcactgcaattgaaagtagtgttccctgccaactgctagagtcagtgctacaagaactaaagggtttgcaggaatttctagacagaaactcccagtttgcaggaggaccattaggaaatccaaatactactgctaaagtgcagcagaggctgataggattcatgcgtcctgaaaacggaaatccccagcaaatgcaacaggaactgcagaggaagtttcatgaggctcaactaagtgaaaagatttcacttcaggcaattcagcagttggttcgaaaatcatatcaggctctggctttatggaaacttctttgtgaacatcaattcactatcattgtggcagaacttcagaaggaacttcaagagcagctgaagatcaccacctttaaagatcttgtaatcagggacaaagaactcacaggggcattaattgcttctcttatcaactgctacatcagagataatgccgctgttgatggcattagtttacatttacaggatatctgcccacttctatatagcactgatgatgcaatttgttctaaggcaaatgagcttctccagcgttcccgacaagttcaaaataagactgaaaaagaaagaatgttaagggaatcattaaaggaatatcaaaaaattagcaatcaagtggacctttccaatgtttgtgctcagtatagacaagtgagattttatgagggtgtggtggaactttctcttacggctgcagagaaaaaagatcctcaaggtcttgggcttcatttctataaacatggagaaccagaagaagacatagttggacttcaggccttccaagaaagattaaacagttacaaatgcattacagacacacttcaagaactggtaaatcaaagtaaggccgctcctcagtctcccagtgtacccaaaaaacctggtcctccagtgttgtcatctgatccaaatatgctgagtaatgaagaagcaggacatcattttgaacaaatgcttaaattgtcacagcgatccaaggatgagctctttagtattgccctttataattggctaatacaagtcgaccttgcagataagctgctacaggttgcttctccatttctggagccacatctagtccgaatggccaaagttgatcaaaacagagttcgttatatggatttactctggcggtattacgagaagaacagaagtttcagtaatgctgctcgtgtactgtccagactggctgacatgcatagcacagaaatttcacttcagcagcgactagagtacattgctcgagccattcttagtgccaaaagttccactgccatttcatcaatagctgccgatggtgaatttcttcatgaattagaagaaaaaatggaggttgctaggatccaacttcagatacaggagacactacaaaggcagtattcccatcattcttctgtacaggatgcagtttctcagctggattctgagctgatggacataactaagctttatggggaatttgctgacccatttaaacttgcagagtgcaaacttgcaataattcattgtgccggttattcagaccctatattggtgcagacactttggcaagatatcatagagaaagaattgagtgacagtgtgacattgagctcctcggatagaatgcatgctcttagtctcaagattgttctccttggcaaaatttatgctggcacaccacgcttctttcctttagattttattgtacagtttttagaacagcaggtttgtactttgaactgggatgtgggcttcgtaatacagacaatgaatgaaattggagtaccattacctagactactagaagtttatgatcagttgttcaaatcacgggatccattctggaacagaatgaagaagccactgcaccttttggattgtatacatgtattattgataagatatgttgagaatcccagccaagttttaaattgtgaaaggagaagatttacaaatctctgcctggatgctgtttgtggttaccttgttgagctccagtctatgagctcgtcagtagcagtacaagccatcactgggaattttaaatctcttcaagctaaattagaacggcttcattaattactgtgatatactttcatccgttttatgatctgtaaaataaaaactcagctgggtccag

SEQ ID NO: 26932 - DNA, 5160 bp, Homo sapiens
agaacggcgtcttccagttccccaccggatgaagcggaagtgcgtcatgtcgaggcgccaaggcgctcgtttggcgcgcggccctaggcggcggatctaagctaacttcttggatcttttcttgtttctccttggtttttgactttttctggaccctggtgtctacgatttccgagatgccgtcttctttgttgggcgcggcgatgccggcctctacatctgccgcagccctgcaggaagctctggaaaatgctggacggctcatcgaccgtcagttgcaagaggaccgcatgtacccggacctttccgagctgcttatggtgtctgccccaaataatcccaccgtttctggcatgtcagatatggattatcctttacaaggacctggtttgctgtccgtacccaaccttccagagatcagttccatccgaagagttcctctcccacctgaacttgttgagcagtttggacatatgcagtgtaattgcatgatgggtgtgttccctcctatcagcagagcttggctcacaattgacagtgatatattcatgtggaactatgaggatggaggagaccttgcctattttgatggacttagtgagactattcttgctgtggggcttgtgaagccaaaagcaggcatctttcaacctcatgtgcgacacctcctggttttggcgacccctgtagacatagtaattcttggactcagctatgctaatttgcaaacaggttctggagttcttaatgatagtttgtctggtggaatgcagttgcttccagatcctttatattctcttcctactgataatacttaccttttaacaataacttccactgataatggcagaattttcttggctggaaaggatggctgtttatatgaagtagcctaccaggctgaagcagggtggtttagccaaagatgtaggaaaataaaccactcaaagagctcactttctttccttgttccttccttgctacaattcacgttctcagaagatgatcctattcttcaaattgcaattgataattctagaaatattttatatacacgatctgagaaaggagtaatacaggtgtatgatttgggacaagatggacaaggaatgagcagagttgcctctgtgtcacagaatgccattgtctctgctgctggtaacattgctaggaccatcgatcgttctgtttttaaaccaattgtccaaatagcagtgattgaaaattctgaatcactggactgtcagttattggctgtcacacatgcaggtgttaggttatattttagcacttgtccattcagacagccattagcacggcctaatacactgacgctggttcatgtccgcttacctcctggattctcagcatcttcaaccgtggaaaagccttcaaaagtacatagagctctttatagtaaaggtattctattgatggcagcctcagaaaatgaggataatgatattttatggtgtgtcaaccatgatacttttcctttccaaaagccaatgatggaaacccagatgacagctggtgttgatggtcattcctgggctctttctgcgatagatgaattgaaagtagataaaataattacacctttaaacaaggatcatattccaataactgattcaccagttgttgtacagcagcacatgttacctccgaagaaatttgttctcctctcagcacaggggagccttatgtttcataaacttagacctgtagatcaactgaggcatctacttgtgagtaatgtgggaggagatggagaagagattgaaagattctttaaattacatcaggaagaccaggcttgtgcaacttgccttattcttgcttgctccactgctgcctgtgatagagaagtatctgcctgggctactcgggctttctttaggtatggtggtgaagcacagatgagatttccaaccactcttccgcctccaagtaatgttggtcccatcttggggtctcctgtctattctagttctcctgttcctagtggtagtccctatccaaatccatcctttttgggaacaccgtctcatggtatacagcctcctgccatgtcaactccagtgtgtgctctgggaaacccagcaactcaggccacaaatatgagttgtgtgactggaccagagattgtgtactctggaaaacacaatggtatttgcatttacttttctcggatcatgggaaacatttgggatgcaagcttagttgtggagagaatattcaagagtggcaacagagagatcactgcaattgaaagtagtgttccctgccaactgctagagtcagtgctacaagaactaaagggtttgcaggaatttctagacagaaactcccagtttgcaggaggaccattaggaaatccaaatactactgctaaagtgcagcagaggctgataggattcatgcgtcctgaaaacggaaatccccagcaaatgcaacaggaactgcagaggaagtttcatgaggctcaactaagtgaaaagatttcacttcaggcaattcagcagttggttcgaaaatcatatcaggctctggctttatggaaacttctttgtgaacatcaattcactatcattgtggcagaacttcagaaggaacttcaagagcagctgaagatcaccacctttaaagatcttgtaatcagggacaaagaactcacaggggcattaattgcttctcttatcaactgctacatcagagataatgccgctgttgatggcattagtttacatttacaggatatctgcccacttctatatagcactgatgatgcaatttgttctaaggcaaatgagcttctccagcgttcccgacaagttcaaaataagactgaaaaagaaagaatgttaagggaatcattaaaggaatatcaaaaaattagcaatcaagtggacctttccaatgtttgtgctcagtatagacaagtgagattttatgagggtgtggtggaactttctcttacggctgcagagaaaaaagatcctcaaggtcttgggcttcatttctataaacatggagaaccagaagaagacatagttggacttcaggccttccaagaaagattaaacagttacaaatgcattacagacacacttcaagaactggtaaatcaaagtaaggccgctcctcagtctcccagtgtacccaaaaaacctggtcctccagtgttgtcatctgatccaaatatgctgagtaatgaagaagcaggacatcattttgaacaaatgcttaaattgtcacagcgatccaaggatgagctctttagtattgccctttataattggctaatacaagtcgaccttgcagataagctgctacaggttgcttctccatttctggagccacatctagtccgaatggccaaagttgatcaaaacagagttcgttatatggatttactctggcggtattacgagaagaacagaagtttcagtaatgctgctcgtgtactgtccagactggctgacatgcatagcacagaaatttcacttcagcagcgactagagtacattgctcgagccattcttagtgccaaaagttccactgccatttcatcaatagctgccgatggtgaatttcttcatgaattagaagaaaaaatggaggttgctaggatccaacttcagatacaggagacactacaaaggcagtattcccatcattcttctgtacaggatgcagtttctcagctggattctgagctgatggacataactaagctttatggggaatttgctgacccatttaaacttgcagagtgcaaacttgcaataattcattgtgccggttattcagaccctatattggtgcagacactttggcaagatatcatagagaaagaattgagtgacagtgtgacattgagctcctcggatagaatgcatgctcttagtctcaagattgttctccttggcaaaatttatgctggcacaccacgcttctttcctttagattttattgtacagtttttagaacagcaggtttgtactttgaactgggatgtgggcttcgtaatacagacaatgaatgaaattggagtaccattacctagactactagaagtttatgatcagttgttcaaatcacgggatccattctggaacagaatgaagaagccactgcaccttttggattgtatacatgtattattgataagatatgttgagaatcccagccaagttttaaattgtgaaaggagaagatttacaaatctctgcctggatgctgtttgtggttaccttgttgagctccagtctatgagctcgtcagtagcagtacaagccatcactgggaattttaaatctcttcaagctaaattagaacggcttcattaattactgtgatatactttcatccgttttatgatctgtaaaataaaaactcagctgggtccagatatcaggtgttctaaatctaagaatgtaagaacaatcttaatagaaatatgtttttaataagtggctaatatctacaaatagtacctttgctaaatgaattcttttttatgactattttgttttttagtaattgggtgaaaaaacaactgaaatgagattatttattattttaacataaggattaaaaaaatttagaaactcttattttgaattgtactgcaggcagaaatttcgaatttatattattcattttcaagttagtccaaggatattggcattaaaactccacaggctggtcttgaactcctgacctcaagtgatctgcccgcctccacctcccaaagtgttgagattacagacgtgagccaatgtgcctggcctattcccttctctctttatgctaccacaaataattaccttctgtttattgtaagtgatgcatgtctaacaatttgtacaatacattttgaatatatttttccttccattattgtcttttcccaagaccatagggttgccttctctacatttgttctcttagaattcagctcccttttccctataatcttctaatgtagaatatttaatagaatgccagaacgtcactcagtgggtactactacctcttatttttcaacttttcagtttcttaagtttagcgttttttgaatatgtaaagtgaatgtatgcgatacattaattcgttttataaatttaaaattctgtcatgtctacttaaaaggaa

SEQ ID NO: 26933 - DNA, 3900 bp, Homo sapiens
agaacggcgtcttccagttccccaccggatgaagcggaagtgcgtcatgtcgaggcgccaaggcgctcgtttggcgcgcggccctaggcggcggatctaagctaacttcttggatcttttcttgtttctccttggtttttgactttttctggaccctggtgtctacgatttccgagatgccgtcttctttgttgggcgcggcgatgccggcctctacatctgccgcagccctgcaggaagctctggaaaatgctggacggctcatcgaccgtcagttgcaagaggaccgcatgtacccggacctttccgagctgcttatggtgtctgccccaaataatcccaccgtttctggcatgtcagatatggattatcctttacaaggacctggtttgctgtccgtacccaaccttccagagatcagttccatccgaagagttcctctcccacctgaacttgttgagcagtttggacatatgcagtgtaattgcatgatgggtgtgttccctcctatcagcagagcttggctcacaattgacagtgatatattcatgtggaactatgaggatggaggagaccttgcctattttgatggacttagtgagactattcttgctgtggggcttgtgaagccaaaagcaggcatctttcaacctcatgtgcgacacctcctggttttggcgacccctgtagacatagtaattcttggactcagctatgctaatttgcaaacaggttctggagttcttaatgatagtttgtctggtggaatgcagttgcttccagatcctttatattctcttcctactgataatacttaccttttaacaataacttccactgataatggcagaattttcttggctggaaaggatggctgtttatatgaagtagcctaccaggctgaagcagggtggtttagccaaagatgtaggaaaataaaccactcaaagagctcactttctttccttgttccttccttgctacaattcacgttctcagaagatgatcctattcttcaaattgcaattgataattctagaaatattttatatacacgatctgagaaaggagtaatacaggtgtatgatttgggacaagatggacaaggaatgagcagagttgcctctgtgtcacagaatgccattgtctctgctgctggtaacattgctaggaccatcgatcgttctgtttttaaaccaattgtccaaatagcagtgattgaaaattctgaatcactggactgtcagttattggctgtcacacatgcaggtgttaggttatattttagcacttgtccattcagacagccattagcacggcctaatacactgacgctggttcatgtccgcttacctcctggattctcagcatcttcaaccgtggaaaagccttcaaaagtacatagagctctttatagtaaaggtattctattgatggcagcctcagaaaatgaggataatgatattttatggtgtgtcaaccatgatacttttcctttccaaaagccaatgatggaaacccagatgacagctggtgttgatggtcattcctgggctctttctgcgatagatgaattgaaagtagataaaataattacacctttaaacaaggatcatattccaataactgattcaccagttgttgtacagcagcacatgttacctccgaagaaatttgttctcctctcagcacaggggagccttatgtttcataaacttagacctgtagatcaactgaggcatctacttgtgagtaatgtgggaggagatggagaagagattgaaagattctttaaattacatcaggaagaccaggcttgtgcaacttgccttattcttgcttgctccactgctgcctgtgatagagaagtatctgcctgggctactcgggctttctttaggtatggtggtgaagcacagatgagatttccaaccactcttccgcctccaagtaatgttggtcccatcttggggtctcctgtctattctagttctcctgttcctagtggtagtccctatccaaatccatcctttttgggaacaccgtctcatggtatacagcctcctgccatgtcaactccagtgtgtgctctgggaaacccagcaactcaggccacaaatatgagttgtgtgactggaccagagattgtgtactctggaaaacacaatggtatttgcatttacttttctcggatcatgggaaacatttgggatgcaagcttagttgtggagagaatattcaagagtggcaacagagagatcactgcaattgaaagtagtgttccctgccaactgctagagtcagtgctacaagaactaaagggtttgcaggaatttctagacagaaactcccagtttgcaggaggaccattaggaaatccaaatactactgctaaagtgcagcagaggctgataggattcatgcgtcctgaaaacggaaatccccagcaaatgcaacaggaactgcagaggaagtttcatgaggctcaactaagtgaaaagatttcacttcaggcaattcagcagttggttcgaaaatcatatcaggctctggctttatggaaacttctttgtgaacatcaattcactatcattgtggcagaacttcagaaggaacttcaagagcagctgaagatcaccacctttaaagatcttgtaatcagggacaaagaactcacaggggcattaattgcttctcttatcaactgctacatcagagataatgccgctgttgatggcattagtttacatttacaggatatctgcccacttctatatagcactgatgatgcaatttgttctaaggcaaatgagcttctccagcgttcccgacaagttcaaaataagactgaaaaagaaagaatgttaagggaatcattaaaggaatatcaaaaaattagcaatcaagtggacctttccaatgtttgtgctcagtatagacaagtgagattttatgagggtgtggtggaactttctcttacggctgcagagaaaaaagatcctcaaggtcttgggcttcatttctataaacatggagaaccagaagaagacatagttggacttcaggccttccaagaaagattaaacagttacaaatgcattacagacacacttcaagaactggtaaatcaaagtaaggccgctcctcagtctcccagtgtacccaaaaaacctggtcctccagtgttgtcatctgatccaaatatgctgagtaatgaagaagcaggacatcattttgaacaaatgcttaaattgtcacagcgatccaaggatgagctctttagtattgccctttataattggctaatacaagtcgaccttgcagataagctgctacaggttgcttctccatttctggagccacatctagtccgaatggccaaagttgatcaaaacagagttcgttatatggatttactctggcggtattacgagaagaacagaagtttcagtaatgctgctcgtgtactgtccagactggctgacatgcatagcacagaaatttcacttcagcagcgactagagtacattgctcgagccattcttagtgccaaaagttccactgccatttcatcaatagctgccgatggtgaatttcttcatgaattagaagaaaaaatggaggttgctaggatccaacttcagatacaggagacactacaaaggcagtattcccatcattcttctgtacaggatgcagtttctcagctggattctgagctgatggacataactaaggtaataaaaaagcaagtgaaatttttatagtagttacctaataatgagaaatttttgttttttattttgctttttgtttcatggggaaaattaccttatctccacaaataagataaggcatctttggcagcttgtcactgggctgacagatcaccactgcttc

SEQ ID NO: 26934 - DNA, 1406 bp, Homo sapiens
aacaactatgaaaataatcttaaagcattattactcccatatacatgccagcaaacccaattgtggagagaacatgattactttttatctgacattatcctataaggatatggctacatttatttcttttaaaattggagcagttttcaattactttttaacagaattgttttcaacacagcattttgcagtgcccataaaccatagcaactttgtcctgatcgatacatatttttctgcattattattcattagcctctttgcaaactcactaaaatagaatagtattaaagtatgaatatatagagaacaattattaggttctacatatttatttaggtaaaccaatgttattaaaattaaaaacatgtgcctggcatataagtgcttcttcaggaattcttttttggatgcatagttattattttttaaacaaactcagattttcaaacactgattttcttctctgaacgggcattgcattgttttaaacagtagctcctggaataatgccacctttagtattttagactttcaaacaacaattggaattggataaatgctttcagctgggagcactttcctaatacctttgtaggtaatgggattctctatttgtgctgggtgacaaacggacagtgccctggacagactgcctaccctctgcagaatctaccaaaaagtagagttttcccatgagactgcttgtggtccatctaaaaatgaaaaaataatcagagaaaatgcgcaaagccttttctaactacagttatgaaatgatggcttaaagaggtatttagaaaataagagtggagtaatacagaaacaaaatctgaagaagaaagtttgcttaggagctgatgctctttgtctacaaacaagagggtaaggagctggatccaattgaattgaattgtttttgtttgcttgtttgttttcttccattcagtgcctttcaaactgttttttactggatgaagaaactcaaccaagaaaatatatgtcgattcttgtatatgggacaatattagctgctgtgatttttaatactagcataaaatataagaatctttttattactgtgatattgttttttcctaaatgaatgcatagtgtaacaattggtgtcaaaaagcattgaatttttttcagatggattaagctggaataataaagtatatctatgagatgatttctgtaaactctgacttgctgagaaaaaagtgaaaaagctttttctggaagaaacatggcaacttaaccgttattaatctggactaaataaaacaggaaactgcttctttacatttctagtaattttttctgcttttccaaacattgttaagttctatgcaacttgtgctattcaagtaaagatgatgtcagtaataaaattacagaatcta

SEQ ID NO: 26935 - DNA, 1703 bp, Homo sapiens
gcttcactattaaaatattttccccccaagtctcaaatattgaagaatctctaaccagggacaccagtccctacgaagaccttgggcgattttgaagtgcgggcacctcgattccccgaatctgtagtgtggctggtatcggtgttcccctggtttaactagcctgtttgaaggcacagatcattcatggggatgtataaccgaaaccagtcctctccaccgcctggggatcttcactttcgcagtctacgactgcctgtgactccagaaagacaaactgcagattggccaagctgcctgaagacccagcccgacagcgatgcctgtcagcccgcgtcgcccaccagggcagctgctctcccaactcgcatggggggcaccaccccgcctcggtgccctagagctgagcgcagccgcggctccacggggatcgccagggcctcagccctcgcggccggcggcgcgggagtgttgcggggcagggaccagagcgcgatcagagcggccacccccgatttaggtcgccagctttccagtcactgcgatggccactggggcgccccttccatcctggttaaattctcattgtgatccccagccctcttctcggttccccacacccaggaggccggttctccgccgctcaggctgggagaggtcaccgctccgggcagggtggacccccagctccgtctcggaggacctttcgccggaggcgagcaggaaggggttaaccatgagcctcccaccctcacctcccagaccctggtgccgggctaaggcctccgcttccctcctgaggtctcattaggaaaccctcaccgctattttcaacatttcctcaatcaagtgcctttaaatagagctgcacaaacagattggcggcaaaagcgtagatcttgtcacgattgagaccaatccagtatttcagccttgtttgctttgcaattacgggttggcttgtggctacggtgccaccggggcaaatctgcagccgctcgctttctcctctgcgctccgggcgggtggaggaagcgacccgcggagtcactgcagggaggagagggggacgcgcgcggggggaggcggcggagggcggaggagactcgcttgcaccccagggccgcgggcacgcagagctgtgttgaaggacatacttttcaggttcctgacagtcactgagctatacgcaataataaagtgcgtgattcgcgtgtggaaaccagtgtcgtgtccttaccagcttccttttctgtccaccttccctctctcttctacctccgtttcgcttttcttcagtgcatgttagcggtttgctggatttcccttctccctcgctgttcaactgctagcatgatttgttacattttccacagctgtttattcttgtttgactttttgtacaaagtcactttaaatctgctgcagaaagaataaagcacctagccctttggatggactcctgcaggcgtgtggctgtccctggcccacttttaattctttggagatggctcttctgtgtaaatcagctgctgggtgcgttcggtcacctcgtaggccagcctagtttgtatcagcagaacagtagtggactcgactcaggtcgtaagccttatatttcacagacaattaaatcttggctgctgttgaacaaaactgtaatatttactttgttctataccgagaagcacttttaaagtaaa

SEQ ID NO: 26936 - DNA, 2962 bp, Homo sapiens
gcttcactattaaaatattttccccccaagtctcaaatattgaagaatctctaaccaggctcgaaacgccggtctcagtggctattgagttacccaccaagttaccccggttagagctgtttggggtggctcacgttattgcggcaaactttggagatgacggctgagtcctccgggcgaacatgtcaagccgattgtaaatgctgttatttccacatccttcagggacaccagtccctacgaagaccttgggcgattttgaagtgcgggcacctcgattccccgaatctgtagtgtggctggtatcggtgttcccctggtttaactagcctgtttgaaggcacagatcattcatggggatgtataaccgaaaccagtcctctccaccgcctggggatcttcactttcgcagtctacgactgcctgtgactccagaaagacaaactgcagattggccaaggtacatctcagatcagatccctctgggaaaagcgcgggaatgcttggctctagtagttaggagctctggtgagagcgcccctagtgccattttcccatccctgcccttgacagtcccctttggtctaaattcacggttctagacagtcaaagtctacctgctgggtgtccactctcaagccataggttttcaatcctaaaagggattaggaccttggctcaaaatgtggtcaacgcagtgttcaaattaggagggcagctgggagatggcagcaggggatgaaagtatgactcctacttcgtccgcaactgtgggtctggcacctcttgacttgccagtatgctggcaaacaacccatctctcttggagaatccacacttcgtttcttctaggtccagcctaaatgttacctcctccagggagcctttccagatactgcttctcctctctcccccaactccctcccacaaatgaagttttctcttctgaattccttgctggtactgtcacttatattcttttgggtagatctctgggcatgcatatgtcacctcctgtgactgtgggtttcttgacaacctaatcaatgcattgaacaaaggagatgtttagacaacccatataaaatgaataagagaaatagggtgaataccgtctaccccaattgcaatcagattagtttcctttattttgaaaacgattagaactagtagaggagttagatgtggcccactagggaacaaattttcatctccaagccgtcctctggctcgatcgggtctgcactgggtctgcatcaacttgcgctggctcagagggaggctcagccccagcctggccttcctggtgcccactcccaacatcctgagcagggccgactctaggcaccccacgattagctgagtgatctagggcaaggacctaggcgtctctaagtcttagtttccccatctgaacaatgtggataatgacacgtacctggggtgggcaggctagagtaaatgggaaaatcaaagcgccagccagagcgggtcgcactgttagttcctgtattttctcctcctgcctctggtttcttccgttccgttctagctgcctgaagacccagcccgacagcgatgcctgtcagcccgcgtcgcccaccagggcagctgctctcccaactcgcatggggggcaccaccccgcctcggtgccctagagctgagcgcagccgcggctccacggggatcgccagggcctcagccctcgcggccggcggcgcgggagtgttgcggggcagggaccagagcgcgatcagagcggccacccccgatttaggtcgccagctttccagtcactgcgatggccactggggcgccccttccatcctggttaaattctcattgtgatccccagccctcttctcggttccccacacccaggaggccggttctccgccgctcaggctgggagaggtcaccgctccgggcagggtggacccccagctccgtctcggaggacctttcgccggaggcgagcaggaaggggttaaccatgagcctcccaccctcacctcccagaccctggtgccgggctaaggcctccgcttccctcctgaggtctcattaggaaaccctcaccgctattttcaacatttcctcaatcaagtgcctttaaatagagctgcacaaacagattggcggcaaaagcgtagatcttgtcacgattgagaccaatccagtatttcagccttgtttgctttgcaattacgggttggcttgtggctacggtgccaccggggcaaatctgcagccgctcgctttctcctctgcgctccgggcgggtggaggaagcgacccgcggagtcactgcagggaggagagggggacgcgcgcggggggaggcggcggagggcggaggagactcgcttgcaccccagggccgcgggcacgcagagctgtgttgaaggacatacttttcaggttcctgacagtcactgagctatacgcaataataaagtgcgtgattcgcgtgtggaaaccagtgtcgtgtccttaccagcttccttttctgtccaccttccctctctcttctacctccgtttcgcttttcttcagtgcatgttagcggtttgctggatttcccttctccctcgctgttcaactgctagcatgatttgttacattttccacagctgtttattcttgtttgactttttgtacaaagtcactttaaatctgctgcagaaagaataaagcacctagccctttggatggactcctgcaggcgtgtggctgtccctggcccacttttaattctttggagatggctcttctgtgtaaatcagctgctgggtgcgttcggtcacctcgtaggccagcctagtttgtatcagcagaacagtagtggactcgactcaggtcgtaagccttatatttcacagacaattaaatcttggctgctgttgaacaaaactgtaatatttactttgttctataccgagaagcacttttaaagtaaa

SEQ ID NO: 26937 - DNA, 2846 bp, Homo sapiens
gcttcactattaaaatattttccccccaagtctcaaatattgaagaatctctaaccaggctcgaaacgccggtctcagtggctattgagttacccaccaagttaccccgggacaccagtccctacgaagaccttgggcgattttgaagtgcgggcacctcgattccccgaatctgtagtgtggctggtatcggtgttcccctggtttaactagcctgtttgaaggcacagatcattcatggggatgtataaccgaaaccagtcctctccaccgcctggggatcttcactttcgcagtctacgactgcctgtgactccagaaagacaaactgcagattggccaaggtacatctcagatcagatccctctgggaaaagcgcgggaatgcttggctctagtagttaggagctctggtgagagcgcccctagtgccattttcccatccctgcccttgacagtcccctttggtctaaattcacggttctagacagtcaaagtctacctgctgggtgtccactctcaagccataggttttcaatcctaaaagggattaggaccttggctcaaaatgtggtcaacgcagtgttcaaattaggagggcagctgggagatggcagcaggggatgaaagtatgactcctacttcgtccgcaactgtgggtctggcacctcttgacttgccagtatgctggcaaacaacccatctctcttggagaatccacacttcgtttcttctaggtccagcctaaatgttacctcctccagggagcctttccagatactgcttctcctctctcccccaactccctcccacaaatgaagttttctcttctgaattccttgctggtactgtcacttatattcttttgggtagatctctgggcatgcatatgtcacctcctgtgactgtgggtttcttgacaacctaatcaatgcattgaacaaaggagatgtttagacaacccatataaaatgaataagagaaatagggtgaataccgtctaccccaattgcaatcagattagtttcctttattttgaaaacgattagaactagtagaggagttagatgtggcccactagggaacaaattttcatctccaagccgtcctctggctcgatcgggtctgcactgggtctgcatcaacttgcgctggctcagagggaggctcagccccagcctggccttcctggtgcccactcccaacatcctgagcagggccgactctaggcaccccacgattagctgagtgatctagggcaaggacctaggcgtctctaagtcttagtttccccatctgaacaatgtggataatgacacgtacctggggtgggcaggctagagtaaatgggaaaatcaaagcgccagccagagcgggtcgcactgttagttcctgtattttctcctcctgcctctggtttcttccgttccgttctagctgcctgaagacccagcccgacagcgatgcctgtcagcccgcgtcgcccaccagggcagctgctctcccaactcgcatggggggcaccaccccgcctcggtgccctagagctgagcgcagccgcggctccacggggatcgccagggcctcagccctcgcggccggcggcgcgggagtgttgcggggcagggaccagagcgcgatcagagcggccacccccgatttaggtcgccagctttccagtcactgcgatggccactggggcgccccttccatcctggttaaattctcattgtgatccccagccctcttctcggttccccacacccaggaggccggttctccgccgctcaggctgggagaggtcaccgctccgggcagggtggacccccagctccgtctcggaggacctttcgccggaggcgagcaggaaggggttaaccatgagcctcccaccctcacctcccagaccctggtgccgggctaaggcctccgcttccctcctgaggtctcattaggaaaccctcaccgctattttcaacatttcctcaatcaagtgcctttaaatagagctgcacaaacagattggcggcaaaagcgtagatcttgtcacgattgagaccaatccagtatttcagccttgtttgctttgcaattacgggttggcttgtggctacggtgccaccggggcaaatctgcagccgctcgctttctcctctgcgctccgggcgggtggaggaagcgacccgcggagtcactgcagggaggagagggggacgcgcgcggggggaggcggcggagggcggaggagactcgcttgcaccccagggccgcgggcacgcagagctgtgttgaaggacatacttttcaggttcctgacagtcactgagctatacgcaataataaagtgcgtgattcgcgtgtggaaaccagtgtcgtgtccttaccagcttccttttctgtccaccttccctctctcttctacctccgtttcgcttttcttcagtgcatgttagcggtttgctggatttcccttctccctcgctgttcaactgctagcatgatttgttacattttccacagctgtttattcttgtttgactttttgtacaaagtcactttaaatctgctgcagaaagaataaagcacctagccctttggatggactcctgcaggcgtgtggctgtccctggcccacttttaattctttggagatggctcttctgtgtaaatcagctgctgggtgcgttcggtcacctcgtaggccagcctagtttgtatcagcagaacagtagtggactcgactcaggtcgtaagccttatatttcacagacaattaaatcttggctgctgttgaacaaaactgtaatatttactttgttctataccgagaagcacttttaaagtaaa

SEQ ID NO: 26938 - DNA, 2795 bp, Homo sapiens
gcttcactattaaaatattttccccccaagtctcaaatattgaagaatctctaaccagggacaccagtccctacgaagaccttgggcgattttgaagtgcgggcacctcgattccccgaatctgtagtgtggctggtatcggtgttcccctggtttaactagcctgtttgaaggcacagatcattcatggggatgtataaccgaaaccagtcctctccaccgcctggggatcttcactttcgcagtctacgactgcctgtgactccagaaagacaaactgcagattggccaaggtacatctcagatcagatccctctgggaaaagcgcgggaatgcttggctctagtagttaggagctctggtgagagcgcccctagtgccattttcccatccctgcccttgacagtcccctttggtctaaattcacggttctagacagtcaaagtctacctgctgggtgtccactctcaagccataggttttcaatcctaaaagggattaggaccttggctcaaaatgtggtcaacgcagtgttcaaattaggagggcagctgggagatggcagcaggggatgaaagtatgactcctacttcgtccgcaactgtgggtctggcacctcttgacttgccagtatgctggcaaacaacccatctctcttggagaatccacacttcgtttcttctaggtccagcctaaatgttacctcctccagggagcctttccagatactgcttctcctctctcccccaactccctcccacaaatgaagttttctcttctgaattccttgctggtactgtcacttatattcttttgggtagatctctgggcatgcatatgtcacctcctgtgactgtgggtttcttgacaacctaatcaatgcattgaacaaaggagatgtttagacaacccatataaaatgaataagagaaatagggtgaataccgtctaccccaattgcaatcagattagtttcctttattttgaaaacgattagaactagtagaggagttagatgtggcccactagggaacaaattttcatctccaagccgtcctctggctcgatcgggtctgcactgggtctgcatcaacttgcgctggctcagagggaggctcagccccagcctggccttcctggtgcccactcccaacatcctgagcagggccgactctaggcaccccacgattagctgagtgatctagggcaaggacctaggcgtctctaagtcttagtttccccatctgaacaatgtggataatgacacgtacctggggtgggcaggctagagtaaatgggaaaatcaaagcgccagccagagcgggtcgcactgttagttcctgtattttctcctcctgcctctggtttcttccgttccgttctagctgcctgaagacccagcccgacagcgatgcctgtcagcccgcgtcgcccaccagggcagctgctctcccaactcgcatggggggcaccaccccgcctcggtgccctagagctgagcgcagccgcggctccacggggatcgccagggcctcagccctcgcggccggcggcgcgggagtgttgcggggcagggaccagagcgcgatcagagcggccacccccgatttaggtcgccagctttccagtcactgcgatggccactggggcgccccttccatcctggttaaattctcattgtgatccccagccctcttctcggttccccacacccaggaggccggttctccgccgctcaggctgggagaggtcaccgctccgggcagggtggacccccagctccgtctcggaggacctttcgccggaggcgagcaggaaggggttaaccatgagcctcccaccctcacctcccagaccctggtgccgggctaaggcctccgcttccctcctgaggtctcattaggaaaccctcaccgctattttcaacatttcctcaatcaagtgcctttaaatagagctgcacaaacagattggcggcaaaagcgtagatcttgtcacgattgagaccaatccagtatttcagccttgtttgctttgcaattacgggttggcttgtggctacggtgccaccggggcaaatctgcagccgctcgctttctcctctgcgctccgggcgggtggaggaagcgacccgcggagtcactgcagggaggagagggggacgcgcgcggggggaggcggcggagggcggaggagactcgcttgcaccccagggccgcgggcacgcagagctgtgttgaaggacatacttttcaggttcctgacagtcactgagctatacgcaataataaagtgcgtgattcgcgtgtggaaaccagtgtcgtgtccttaccagcttccttttctgtccaccttccctctctcttctacctccgtttcgcttttcttcagtgcatgttagcggtttgctggatttcccttctccctcgctgttcaactgctagcatgatttgttacattttccacagctgtttattcttgtttgactttttgtacaaagtcactttaaatctgctgcagaaagaataaagcacctagccctttggatggactcctgcaggcgtgtggctgtccctggcccacttttaattctttggagatggctcttctgtgtaaatcagctgctgggtgcgttcggtcacctcgtaggccagcctagtttgtatcagcagaacagtagtggactcgactcaggtcgtaagccttatatttcacagacaattaaatcttggctgctgttgaacaaaactgtaatatttactttgttctataccgagaagcacttttaaagtaaa

SEQ ID NO: 26939 - DNA, 868 bp, Homo sapiens
gcttcactattaaaatattttccccccaagtctcaaatattgaagaatctctaaccaggctcgaaacgccggtctcagtggctattgagttacccaccaagttaccccggttagagctgtttggggtggctcacgttattgcggcaaactttggagatgacggctgagtcctccgggcgaacatgtcaagccgattgtaaatgctgttatttccacatccttcagggacaccagtccctacgaagaccttgggcgattttgaagtgcgggcacctcgattccccgaatctgtagtgtggctggtatcggtgttcccctggtttaactagcctgtttgaaggcacagatcattcatggggatgtataaccgaaaccagtcctctccaccgcctggggatcttcactttcgcagtctacgactgcctgtgactccagaaagacaaactgcagattggccaaggtacatctcagatcagatccctctgggaaaagcgcgggaatgcttggctctagtagttaggagctctggtgagagcgcccctagtgccattttcccatccctgcccttgacagtcccctttggtctaaattcacggttctagacagtcaaagtctacctgctgggtgtccactctcaagccataggttttcaatcctaaaagggattaggaccttggctcaaaatgtggtcaacgcagtgttcaaattaggagggcagctgggagatggcagcaggggatgaaagtatgactcctacttcgtccgcaactgtgggtctggcacctcttgacttgccagtatgctggcaaacaacccatctctcttggagaatccacacttcgtttctgggcagccacttcgtgggcag

SEQ ID NO: 26940 - DNA, 375 bp, Homo sapiens
aatgtgttcttgaagatgtcacctcagcccacctgctccaaggacagtgcttcttgcgacactctgatagctctgcattcttttctgtaccagggtagggtggagtcattttacatgctatccacttagtcccaggatgtttaggatgctcagaacaaggcatattgtctgagtggtggcaagggtctccctctaactggggttgtgtagtccttcctgtttgtgtagttcttcttgtatagtcttttcttgttggcctttgagaagtagttgtctacagacataccaagtgaaagtggctccagaagtgtcgtgctgctcaaagtacacatctgcaaagcagaatcaaattttgttggatttgagtgtctattt

SEQ ID NO: 26941 - DNA, 1591 bp, Homo sapiens
gcttcactattaaaatattttccccccaagtctcaaatattgaagaatctctaaccagaaggcacagatcattcatggggatgtataaccgaaaccagtcctctccaccgcctggggatcttcactttcgcagtctacgactgcctgtgactccagaaagacaaactgcagattggccaagctgcctgaagacccagcccgacagcgatgcctgtcagcccgcgtcgcccaccagggcagctgctctcccaactcgcatggggggcaccaccccgcctcggtgccctagagctgagcgcagccgcggctccacggggatcgccagggcctcagccctcgcggccggcggcgcgggagtgttgcggggcagggaccagagcgcgatcagagcggccacccccgatttaggtcgccagctttccagtcactgcgatggccactggggcgccccttccatcctggttaaattctcattgtgatccccagccctcttctcggttccccacacccaggaggccggttctccgccgctcaggctgggagaggtcaccgctccgggcagggtggacccccagctccgtctcggaggacctttcgccggaggcgagcaggaaggggttaaccatgagcctcccaccctcacctcccagaccctggtgccgggctaaggcctccgcttccctcctgaggtctcattaggaaaccctcaccgctattttcaacatttcctcaatcaagtgcctttaaatagagctgcacaaacagattggcggcaaaagcgtagatcttgtcacgattgagaccaatccagtatttcagccttgtttgctttgcaattacgggttggcttgtggctacggtgccaccggggcaaatctgcagccgctcgctttctcctctgcgctccgggcgggtggaggaagcgacccgcggagtcactgcagggaggagagggggacgcgcgcggggggaggcggcggagggcggaggagactcgcttgcaccccagggccgcgggcacgcagagctgtgttgaaggacatacttttcaggttcctgacagtcactgagctatacgcaataataaagtgcgtgattcgcgtgtggaaaccagtgtcgtgtccttaccagcttccttttctgtccaccttccctctctcttctacctccgtttcgcttttcttcagtgcatgttagcggtttgctggatttcccttctccctcgctgttcaactgctagcatgatttgttacattttccacagctgtttattcttgtttgactttttgtacaaagtcactttaaatctgctgcagaaagaataaagcacctagccctttggatggactcctgcaggcgtgtggctgtccctggcccacttttaattctttggagatggctcttctgtgtaaatcagctgctgggtgcgttcggtcacctcgtaggccagcctagtttgtatcagcagaacagtagtggactcgactcaggtcgtaagccttatatttcacagacaattaaatcttggctgctgttgaacaaaactgtaatatttactttgttctataccgagaagcacttttaaagtaaa

SEQ ID NO: 26942 - DNA, 1870 bp, Homo sapiens
gcttcactattaaaatattttccccccaagtctcaaatattgaagaatctctaaccaggctcgaaacgccggtctcagtggctattgagttacccaccaagttaccccggttagagctgtttggggtggctcacgttattgcggcaaactttggagatgacggctgagtcctccgggcgaacatgtcaagccgattgtaaatgctgttatttccacatccttcagggacaccagtccctacgaagaccttgggcgattttgaagtgcgggcacctcgattccccgaatctgtagtgtggctggtatcggtgttcccctggtttaactagcctgtttgaaggcacagatcattcatggggatgtataaccgaaaccagtcctctccaccgcctggggatcttcactttcgcagtctacgactgcctgtgactccagaaagacaaactgcagattggccaagctgcctgaagacccagcccgacagcgatgcctgtcagcccgcgtcgcccaccagggcagctgctctcccaactcgcatggggggcaccaccccgcctcggtgccctagagctgagcgcagccgcggctccacggggatcgccagggcctcagccctcgcggccggcggcgcgggagtgttgcggggcagggaccagagcgcgatcagagcggccacccccgatttaggtcgccagctttccagtcactgcgatggccactggggcgccccttccatcctggttaaattctcattgtgatccccagccctcttctcggttccccacacccaggaggccggttctccgccgctcaggctgggagaggtcaccgctccgggcagggtggacccccagctccgtctcggaggacctttcgccggaggcgagcaggaaggggttaaccatgagcctcccaccctcacctcccagaccctggtgccgggctaaggcctccgcttccctcctgaggtctcattaggaaaccctcaccgctattttcaacatttcctcaatcaagtgcctttaaatagagctgcacaaacagattggcggcaaaagcgtagatcttgtcacgattgagaccaatccagtatttcagccttgtttgctttgcaattacgggttggcttgtggctacggtgccaccggggcaaatctgcagccgctcgctttctcctctgcgctccgggcgggtggaggaagcgacccgcggagtcactgcagggaggagagggggacgcgcgcggggggaggcggcggagggcggaggagactcgcttgcaccccagggccgcgggcacgcagagctgtgttgaaggacatacttttcaggttcctgacagtcactgagctatacgcaataataaagtgcgtgattcgcgtgtggaaaccagtgtcgtgtccttaccagcttccttttctgtccaccttccctctctcttctacctccgtttcgcttttcttcagtgcatgttagcggtttgctggatttcccttctccctcgctgttcaactgctagcatgatttgttacattttccacagctgtttattcttgtttgactttttgtacaaagtcactttaaatctgctgcagaaagaataaagcacctagccctttggatggactcctgcaggcgtgtggctgtccctggcccacttttaattctttggagatggctcttctgtgtaaatcagctgctgggtgcgttcggtcacctcgtaggccagcctagtttgtatcagcagaacagtagtggactcgactcaggtcgtaagccttatatttcacagacaattaaatcttggctgctgttgaacaaaactgtaatatttactttgttctataccgagaagcacttttaaagtaaa

SEQ ID NO: 26943 - DNA, 3005 bp, Homo sapiens
gcttcactattaaaatattttccccccaagtctcaaatattgaagaatctctaaccagggacaccagtccctacgaagaccttgggcgattttgaagtgcgggcacctcgattccccgaatctgtagtgtggctggtatcggtgttcccctggtttaactagcctgtttgtggaagtgactctgaccgttcccttaagaatctttaatgctcttacatgagatgagcctcagaacaagctaagaaccatcgaaagaacatcaagcctggaaggtgacagaaggagcaatgtgttcttgaagatgtcacctcagcccacctgctccaaggacagtgcttcttgcgacactctgatagctctgcattcttttctgtaccaggaaggcacagatcattcatggggatgtataaccgaaaccagtcctctccaccgcctggggatcttcactttcgcagtctacgactgcctgtgactccagaaagacaaactgcagattggccaaggtacatctcagatcagatccctctgggaaaagcgcgggaatgcttggctctagtagttaggagctctggtgagagcgcccctagtgccattttcccatccctgcccttgacagtcccctttggtctaaattcacggttctagacagtcaaagtctacctgctgggtgtccactctcaagccataggttttcaatcctaaaagggattaggaccttggctcaaaatgtggtcaacgcagtgttcaaattaggagggcagctgggagatggcagcaggggatgaaagtatgactcctacttcgtccgcaactgtgggtctggcacctcttgacttgccagtatgctggcaaacaacccatctctcttggagaatccacacttcgtttcttctaggtccagcctaaatgttacctcctccagggagcctttccagatactgcttctcctctctcccccaactccctcccacaaatgaagttttctcttctgaattccttgctggtactgtcacttatattcttttgggtagatctctgggcatgcatatgtcacctcctgtgactgtgggtttcttgacaacctaatcaatgcattgaacaaaggagatgtttagacaacccatataaaatgaataagagaaatagggtgaataccgtctaccccaattgcaatcagattagtttcctttattttgaaaacgattagaactagtagaggagttagatgtggcccactagggaacaaattttcatctccaagccgtcctctggctcgatcgggtctgcactgggtctgcatcaacttgcgctggctcagagggaggctcagccccagcctggccttcctggtgcccactcccaacatcctgagcagggccgactctaggcaccccacgattagctgagtgatctagggcaaggacctaggcgtctctaagtcttagtttccccatctgaacaatgtggataatgacacgtacctggggtgggcaggctagagtaaatgggaaaatcaaagcgccagccagagcgggtcgcactgttagttcctgtattttctcctcctgcctctggtttcttccgttccgttctagctgcctgaagacccagcccgacagcgatgcctgtcagcccgcgtcgcccaccagggcagctgctctcccaactcgcatggggggcaccaccccgcctcggtgccctagagctgagcgcagccgcggctccacggggatcgccagggcctcagccctcgcggccggcggcgcgggagtgttgcggggcagggaccagagcgcgatcagagcggccacccccgatttaggtcgccagctttccagtcactgcgatggccactggggcgccccttccatcctggttaaattctcattgtgatccccagccctcttctcggttccccacacccaggaggccggttctccgccgctcaggctgggagaggtcaccgctccgggcagggtggacccccagctccgtctcggaggacctttcgccggaggcgagcaggaaggggttaaccatgagcctcccaccctcacctcccagaccctggtgccgggctaaggcctccgcttccctcctgaggtctcattaggaaaccctcaccgctattttcaacatttcctcaatcaagtgcctttaaatagagctgcacaaacagattggcggcaaaagcgtagatcttgtcacgattgagaccaatccagtatttcagccttgtttgctttgcaattacgggttggcttgtggctacggtgccaccggggcaaatctgcagccgctcgctttctcctctgcgctccgggcgggtggaggaagcgacccgcggagtcactgcagggaggagagggggacgcgcgcggggggaggcggcggagggcggaggagactcgcttgcaccccagggccgcgggcacgcagagctgtgttgaaggacatacttttcaggttcctgacagtcactgagctatacgcaataataaagtgcgtgattcgcgtgtggaaaccagtgtcgtgtccttaccagcttccttttctgtccaccttccctctctcttctacctccgtttcgcttttcttcagtgcatgttagcggtttgctggatttcccttctccctcgctgttcaactgctagcatgatttgttacattttccacagctgtttattcttgtttgactttttgtacaaagtcactttaaatctgctgcagaaagaataaagcacctagccctttggatggactcctgcaggcgtgtggctgtccctggcccacttttaattctttggagatggctcttctgtgtaaatcagctgctgggtgcgttcggtcacctcgtaggccagcctagtttgtatcagcagaacagtagtggactcgactcaggtcgtaagccttatatttcacagacaattaaatcttggctgctgttgaacaaaactgtaatatttactttgttctataccgagaagcacttttaaagtaaa

SEQ ID NO: 26944 - DNA, 2408 bp, Homo sapiens
gcttcactattaaaatattttccccccaagtctcaaatattgaagaatctctaaccagggacaccagtccctacgaagaccttgggcgattttgaagtgcgggcacctcgattccccgaatctgtagtgtggctggtatcggtgttcccctggtttaactagcctgtttgaaggcacagatcattcatggggatgtataaccgaaaccagtcctctccaccgcctggggatcttcactttcgcagtctacgactgcctgtgactccagaaagacaaactgcagattggccaagtctaggtccagcctaaatgttacctcctccagggagcctttccagatactgcttctcctctctcccccaactccctcccacaaatgaagttttctcttctgaattccttgctggtactgtcacttatattcttttgggtagatctctgggcatgcatatgtcacctcctgtgactgtgggtttcttgacaacctaatcaatgcattgaacaaaggagatgtttagacaacccatataaaatgaataagagaaatagggtgaataccgtctaccccaattgcaatcagattagtttcctttattttgaaaacgattagaactagtagaggagttagatgtggcccactagggaacaaattttcatctccaagccgtcctctggctcgatcgggtctgcactgggtctgcatcaacttgcgctggctcagagggaggctcagccccagcctggccttcctggtgcccactcccaacatcctgagcagggccgactctaggcaccccacgattagctgagtgatctagggcaaggacctaggcgtctctaagtcttagtttccccatctgaacaatgtggataatgacacgtacctggggtgggcaggctagagtaaatgggaaaatcaaagcgccagccagagcgggtcgcactgttagttcctgtattttctcctcctgcctctggtttcttccgttccgttctagctgcctgaagacccagcccgacagcgatgcctgtcagcccgcgtcgcccaccagggcagctgctctcccaactcgcatggggggcaccaccccgcctcggtgccctagagctgagcgcagccgcggctccacggggatcgccagggcctcagccctcgcggccggcggcgcgggagtgttgcggggcagggaccagagcgcgatcagagcggccacccccgatttaggtcgccagctttccagtcactgcgatggccactggggcgccccttccatcctggttaaattctcattgtgatccccagccctcttctcggttccccacacccaggaggccggttctccgccgctcaggctgggagaggtcaccgctccgggcagggtggacccccagctccgtctcggaggacctttcgccggaggcgagcaggaaggggttaaccatgagcctcccaccctcacctcccagaccctggtgccgggctaaggcctccgcttccctcctgaggtctcattaggaaaccctcaccgctattttcaacatttcctcaatcaagtgcctttaaatagagctgcacaaacagattggcggcaaaagcgtagatcttgtcacgattgagaccaatccagtatttcagccttgtttgctttgcaattacgggttggcttgtggctacggtgccaccggggcaaatctgcagccgctcgctttctcctctgcgctccgggcgggtggaggaagcgacccgcggagtcactgcagggaggagagggggacgcgcgcggggggaggcggcggagggcggaggagactcgcttgcaccccagggccgcgggcacgcagagctgtgttgaaggacatacttttcaggttcctgacagtcactgagctatacgcaataataaagtgcgtgattcgcgtgtggaaaccagtgtcgtgtccttaccagcttccttttctgtccaccttccctctctcttctacctccgtttcgcttttcttcagtgcatgttagcggtttgctggatttcccttctccctcgctgttcaactgctagcatgatttgttacattttccacagctgtttattcttgtttgactttttgtacaaagtcactttaaatctgctgcagaaagaataaagcacctagccctttggatggactcctgcaggcgtgtggctgtccctggcccacttttaattctttggagatggctcttctgtgtaaatcagctgctgggtgcgttcggtcacctcgtaggccagcctagtttgtatcagcagaacagtagtggactcgactcaggtcgtaagccttatatttcacagacaattaaatcttggctgctgttgaacaaaactgtaatatttactttgttctataccgagaagcacttttaaagtaaa

SEQ ID NO: 26945 - DNA, 278 bp, Homo sapiens
tggctgaatagtgctccgttgtgtatttgtaccacattcatctgttgatggacgtttagattgcttccagatcttggctattgttgctgaattctttttctcagcatggaacgtccctgagaaagagaatgcacgcctaggggtaggtctctgaactggcccccccggggcgtacctgtctcttatggttgagactgcagggacgaaataaactccagtctcccatagcgctcccaggcttattaggaagaggaaattcccacctaataaattttggt

SEQ ID NO: 26946 - DNA, 378 bp, Homo sapiens
ttaaaaaaccagctttcacgtgaactaatgaagaactcattaccccaaagagggcactaatctgctcatgagggatccctcccatgacccaaacacctcttaccaggccctgcttccaacattgagaatcacatttcaacatgagatttggaagggacagacatccaaactatatcagtttgacagaagtgtgtgcatttccaggtgtaacacaatctaccttattccttctgttatacacatgagtctggcattcaatcaaaaaccaacaaaatccaattcagaaatgaaacagaggttgggactagcagaccttaagacaatcagttaatatattaacatatctggtggaaaaggtgggaaataacaaacagatag

SEQ ID NO: 26947 - DNA, 1398 bp, Homo sapiens
  misc_feature (319)..(319): n is a, c, g, or t
  misc_feature (700)..(700): n is a, c, g, or t
  misc_feature (702)..(702): n is a, c, g, or t
  misc_feature (801)..(801): n is a, c, g, or t
  misc_feature (1148)..(1148): n is a, c, g, or t
  misc_feature (1183)..(1183): n is a, c, g, or t
atgttgcccttcacttgtggaagaaatgcaaatgaaaacagccctagggatgttgacgttggggtggcacctgctgcagagggtaacgtgcagcatgtcgagggcagcactgccaaggctggtttgagctcaaggtcaggtggaggaggtagtctctcccatctcttctgcgagtgcagctctaaaccctgcctgaaacacgtggagaagctatctgagctgcctccaggacacatgcaaatggacactctgatcataaaattatcaggaagattgagaaataagacaaaaatggaggtgccaccaaaccagtggaaanttttcccttttcattcctctggcattccctggccttgactcaaggcagcccacactctaggagcagacaccagggcacaggtggggagctctgggggaccctccaggcttactcagtgaatgggttagcagcagccacaggagccaccatggagcctgcagggacccacaacactgagggcagggatcttgcctctaatcagataagctgtgattccgagagggtggggtaaaggccacgggtctttttctctccacatcttcccacgtcatgaccccagagggtcgaagagggagaaagtgtgagcaccgtgacataatgagccgcagccttctgactagatgccccaaagaagaatcccaggtgaccacacagcatcananaaactgcaggtaatgaggaactttggaaagcaatccatcgtgttgtcagtaaaacctctggctcactcccgagctgggcatgcatggatgtgaccctcnatggaatagactatgagaaccaggtgaggggatctacctccaccgagacgtgagagtgacctgcatacccaaacaccatgaggctttaaagactgagctgatgtggaagccacagcctctgcaggttgctctgcacttgcaacataagcccaaccacatcaattgctgcaaaacaaaactacagcattctccataccacttaaataagacacagagtctcacaacattcaaaacgcccaggacacaatccaaaattacttctacaaaaaatcaggaaaatctcaatgagcaaggaaaatggcaatcagtagctgccagtgctgagatgacatgagggttggaatcancaacatctttaaagtaattatcataagcattctcnagcaagtaatggcaaacactcttgagataaatggaaagataagaaggctcagggagaaagtggaatgtacaaagaatgaccaagtgggaattgcaccactggaaacaaatcaccaggataaagcagtctctggctgggccaacaggagaatggaaatgaaaagggaaagagttgttatggcagttgtccaatttgaacaacacaaaagacactga

SEQ ID NO: 26948 - DNA, 242 bp, Homo sapiens
aaatttggcaaaaacaaaaaacataaagcaacagattcaagaatctgagtgaaattcgaagataataaatgcaaataaattcacaccaaggcacatcatactcaaacatctgaaaacaaaagacaaataaaaaaatctttaaagcatatatctatagggaaaaataaattctaatgatagtggttttctcatcagaaaccatggaggccagaaagaatgggcacaatattttttaagtgcta

SEQ ID NO: 26949 - DNA, 279 bp, Homo sapiens
gcccaggctggagtgcattggcgtgattttggctcgctgcaacctccgtctcccaggttcaaccgattctcctttctcaacctctcaagtagctgggattacaggcgctcgccaccacagctggtaaaattttgtatttttagtagagacggggtttcaccatgttggccatgctggtctcaaactcccagctttcattgatccacctgtctcagcctcccaaaatgctaggattacagatatgagccattgtgcctggccctcgttcatgattttaaa

SEQ ID NO: 26950 - DNA, 170 bp, Homo sapiens
aatttccccccaccaaaagaatgcaggagatgctgtgcagcaaaatctgtagctaatgtcttcggttggagttataagtcaccagggatcagcagtggaggtagttcaggctgctgggggttcaggattgtcttcatatgaaaggaatacttagggtaacatttccataa

SEQ ID NO: 26951 - DNA, 394 bp, Homo sapiens
tactgcttcacacccactacaatgtggctacaataaaaaatacagatagttacaagtgttatcaaagatgtggaaaaaccagaactctcatgggagtgtaaaatggtgtagccactttggaaaacattctggcaattcctcaagaggttagctgaggcaggcagatcacgaggtcaggagatcgagaccatcctggccaacatggtgaaaccccgtctctactaaaaaaatacaaaaattagctgggcgtggtggcatgtgcttgtaatctcagctacttgggaggctgaggcaggagaatcacttgaaccagggagtcggaagttgcagtgagctgagattgagccactgcactccagcctggcgtcagagtgagactccgtctcaaaaaaaa

SEQ ID NO: 26952 - DNA, 329 bp, Homo sapiens
cacaaaaatctactaatactttgcagataagataaagacaggtacaaaattagaaagaaaggatgcaaagttatttattaaagtcatcttgaactactcatttaccctctctggccaccactgcctcgtgactgaattgaaataataatgactgtgaggattataggaaatacacaagatattgtgtatgaaatgatggtaaacagcgttaaggcactgtaaaaacacaagacataatcaatgctttgctgtcatgatgtccaaggataaaaaaggacaaaagcattcatttccattacatgttaacccttaaaagtaaagcttctctc

SEQ ID NO: 26953 - DNA, 669 bp, Homo sapiens
gattctgggatcctttgtttagcagaaacctcatgactgaatcctctatacctaggcagcctcttttagtttctgagtaataaccctgtcatccaggtggaatcacaaccatctttttatatacacgaagtcctcacttcgttttggaattccctgaaaactgactttatggaaacaatgtacaggaggtcctccaacaccattggttgttcaaagttgtgtagttatactgttgataaaaaataagtggtttcactatacatcattttgcttcgaggtgaagtttccaagagactttcaaagatgttaagtgaggacatactgtacatcaaattcatatcctcttccacagttcatctggaatttctttataaactgcttctagagaatctatttaggcaggttatgtgtagagatccatgtcgcccttcctcaatcttggttttgagtcaactcacctggggagcttacaaatgatgaggccctgggtctcaatacctgagattctgatttccttgcacctgtgtgagcatgtggattttttttttttcttttaaagcaccagaggtggttccaatgatgaagtttttggaggcatcaagctccaatgtgtaagaacagaaattaattgtaatatgatttcttcaaatattatcttcaaatgcattg

SEQ ID NO: 26954 - DNA, 286 bp, Homo sapiens
aggagcactgacagagataaactgagatgataagagccaatcctgctttgatttgcaaagctactaattctttaagagacataattttgaaaacgtaggacttgaggaattcctctttatccaaactaagagcagggagaatttaaggtttaaaaatgatccttcttcatctcactctgtgcattaaacatcttgcatgtttgatttccatgacttttctgtaattgagtatctcaagtgaatgctaactttcatctttactttctctgcatatcccccaccttta

SEQ ID NO: 26955 - DNA, 305 bp, Homo sapiens
ttgcccctcatttcctgctgtgcggcctggtttccaacagaccatggaccagcgctggtccatggcctgggagttggggacccctgctttaaagaacacccagatccagggaaagctgaaggtaacagaaaataaaaccccccctttccacagtgctttcacctgtttttttctcatttcatccttactacaatcctgtgtgatgtgtattatgatcattcccattttagagaacttgaatccaaagcaatttttcaacaatgagcaagagaagcaggtgataaacatttattctgctttttata

SEQ ID NO: 26956 - DNA, 480 bp, Homo sapiens
gaaatgctcaaatttgtatattactgtctttgccacaaatgggttagtggtgactgaattatcgtttggtctctttagctgccaaaatataacaggtaattgagtttaacatcaactaatgtttttgttttattttcagtaagccattaaaaaaatctaaataatttttaaatgctgttaacttagaagagctcatgaaaaacacctgttaacttacaactaaaaaaaacaccatcttagtcaagcctggtggcccacacctgtaatcccaatactttgggaagccgaggcgggtggatcacctaaggtcaggagtttgagaccagcctggctaacatggtgaaacgctatctctactaaaaatacaaaaattagctgggcgcggtggtgcatgcctgtagtcccagctcctggggctgaggcaggagaatcgcttgaacccaagaggtggaggttgcagtgagccaagatagcaccact

SEQ ID NO: 26957 - DNA, 556 bp, Homo sapiens
aaacaatgtactgtaacttttatgtaccagagactgttgttttaaactttcagcctaaagctaaaagtacaacttcttttatttggtttatttattatcttttgagtacttcaaatgcaatgagaagtgtggataccgaaggcagcactagtctggtagtcaagagacctgaggttagatatcagctctgctctcaagtaactgtgtgactgtgaacttgaatatccccattttaacacgtgggtattgcgttaaaataatctctaacatttcttttatgtttaaatgtatggttttatggaattacaatgctatatcacaggaaatggatacattatataagaggagaaacagaaaagatcagctcaaataaatgggtgttgtcaataagcttattagagaatcttgagggtttcacagtcttatataaaaacccagagacacagacagtgatcataagtaagatcaatactggggaatataaacagtgaaaccaaaaggaaaaattcatatttattcaaaccagagaatactcgcatatgtgtgttttgtgtgg

SEQ ID NO: 26958 - DNA, 534 bp, Homo sapiens
cataaaaggaatctgttttggctgctttctctgcagcctggcattcttttcggctgctgaacaatgtgcagaaagagccagcttcctgatggtcctataacccgtatccccacattcctctgggagtcacactgagaagtcatcttggattgggacaagtgtcttgcatgctagggttgccttagaaaacacagactttatactttttttgttgtgaactaaaaattaaatttaactacatttcttcttacttgtagaagaaatgtcttctctccttgcactgacaattctaaagaaagtctcaattgtaggctagtgtttcttctctcttaaaaaaatgaaagaattgatgatgtcttcctaaactggaaaggaggaggagttttgttcaattcgataaaaatgtgtatcccacattctttcatgaagatcttaccccattcaaagagaaaatgagaacactttagtgtgtatattaatgtatatattttcgagctggtctttggtagccaggttttgttttgtgaaatgaca

SEQ ID NO: 26959 - DNA, 919 bp, Homo sapiens
aagaaaagaaatctgtttctaccaaacatttccagaaacgtatttatagcatgaagaaacacacatgggtagtgtgacctgtttggatgtgattacttaaaaatggaatgctctgaataggcactctctacattaaaggtatggaaggcgataggggtcagaattttaaaaatttaattttgaaaaaggtgactcacccctcatttccagagtgtaggcaattatgtcctgctttgataaaactgctagaggatggctatgcaaaagcataacgattcaaggaaacaaagtacaggtagtttttgagctgacagcagcaaaggcaccataagtcaaaatattggttttggtggagatgatcgatgtgtgtgtgtgagagagagctatgtttctaaccaagggcctaatgtttgttacagaaatgatcccagagacctacaagatgtgggaatcagcataacagggcaatgcagcaattaaccccacatcgttttctgtagttcctttttgtttcattttcttctgtctcacctcgttagaaaattcctcccagtcaggggtcgtccagtgcaggacgggggacccaagggtctcaagcctgcaagtccagaaggtgacaaacccaggagcactgggagttaagctttccttggggagggaagagccttgatgtccagcacacagcctggctataaagacacgaagcgacctacccactgtacagtccacttcacaggatcagctgaatcatgacctttaaaagttccgagttgaaactgaaggctctcctcagacctggctttttcctcagtccctgttcataccatctctgcacccacaatcacactgatttttcaaattcattttgtttttgctgtttcatttctggcattaataaaagtcttataaggagaaaaaa

SEQ ID NO: 26960 - DNA, 309 bp, Homo sapiens
tacaagagaagagacgagatgtacaagagatgagacgagatgtacaaggaagagccttgatgtccagcacacagcctggctataaagacacgaagcgacctacccactgtacagtccacttcacaggatcagctgaatcatgacctttaaaagttccgagttgaaactgaaggctctcctcagacctggctttttcctcagtccctgttcataccatctctgcacccacaatcacactgatttttcaaattcattttgtttttgctgtttcatttctggcattaataaaagtcttataaggagaaaaaa

SEQ ID NO: 26961 - DNA, 559 bp, Homo sapiens
agttcagggagatcacattaattgcctgagttcccaagttggttaagagactaagctagatctcaacccttcaggctgaatccaaagctactttccttgaatggtttgtaagatttttccatttcttttttaaaaaaatggtatgttcaaatatctttctcatcaataaatatttatcttcatcattcttcctaatgacattcccttgtatgaatgtgccaatgtggaataaccagttccgtcttgttgggctttcagatgttttctttttgtaaatgataaacaatgcagttataactatctttatatataaactttgcaatagtatgagtattttcctagaataaatactggaaagtgaaattgcgtggtcaaaggccagacacatttttaaaagctgcctctttcccaatcacacatttcccacatccatttatttgctgaggatcttcacaaaatttggactgagattaaacacagaatcagagaagccctatgctggaaagatcttagtatatacctcttgaactaaaccagtcttactttagaaaaaaaaaaa

SEQ ID NO: 26962 - DNA, 271 bp, Homo sapiens
tggtaaatattaacatagcaccaaattttgtaattaagtataaatgactatacatttgaatttagtttagggcaagattttatacaaggtcataagattaaatacagagttatttgccccataaaattagtactcagtactataatgaagacatacttttgcaaatcatcattcagcagaagttctttatcccacagctatatctatctacaatttcaattttaggatctcaatgccctttaaaaaattgtatgggccaggcgaggtggcc

SEQ ID NO: 26963 - DNA, 403 bp, Homo sapiens
gccccaaaaaataaataaataaaataaggagaatggtcaaggccatggtataaaaaaaaaccctccagccaagggctactgcacccaggagaaacccaagactccctgcacctgctgtgaaaggcaggacataaagtgtcagaaaaaagctcaaatctgctctaaaagtctccagtatttaagcctttatataagccaagaggaaagatggcttagtagtaaacaaaagcaatctgtttgtgcacttcctactccaaccacctggtgtcaaataagagagttcctaagggcagcaaggttctgctgcatttagatcccaaatttctagcttatggctaagccacaaagagaaggaaagaaagagcccctcctctaggaggctaaccaggagaagacttttaaa

SEQ ID NO: 26964 - DNA, 495 bp, Homo sapiens
aaccacatcaaagttaagtaaaataagaaatgtaccgtctcatccaaggagagagttggattcatacatggaggaatccttggttcaaaggatgtatgccgtcagaactttgtctttctccacctttccactcagatgttccttgtgttgtctcattattaggcaaatggcaagattacctggaccagctccagggtctaaagctaggatttagctccaggcctggctctttcatttttttttttttggaaccacttttttaggtggaaacttccttggaagttgagaaatttgtcctaaggcttactaggaattggcaaaagggcaataggatatgtcattccaggacagtgtgtctgccagccaactggaatgcgaacagggcactctgcctgggaatatgagcagctgcgtagatctatccacttttgctggggatcaccagtgaggaaccatggtcaggctgcctgggtttaaatttagggtccactactc

SEQ ID NO: 26965 - DNA, 1821 bp, Homo sapiens
cgcgtgaactgcttcctgcaggctggccatggcgcttcacgttcccaaggctccgggctttgcccagatgctcaaggagggagcgaaacacttttcaggattagaagaggctgtgtatagaaacatacaagcttgcaaggagcttgcccaaaccactcgtacagcatatggaccaaaaggaatgaacaaaatggttatcaaccacttggagaagttgtttgtgacaaacgatgcagcaactattttaagagaactagaagtacagcatcctgctgcaaaaatgattgtaatggcttctcatatgcaagagcaagaagttggagatggcacaaactttgttctggtatttgctggagctctcctggaattagctgaagaacttctgaggattggcctgtcagtttcagaggtcatagaaggttatgaaatagcctgcagaaaagctcatgagattcttcctaatttggtatgttgttctgcaaaaaaccttcgagatattgatgaagtctcatctctacttcgtacctccataatgagtaaacaatatggtaatgaagtatttctggccaagcttattgctcaggcatgcgtatctatttttcctgattccggccatttcaatgttgataacatcagagtttgtaaaattctgggctctggtatcagttcctcttcagtattgcatggcatggtttttaagaaggaaaccgaaggtgatgtaacatctgtcaaagatgcaaaaatagcagtgtactcttgtccttttgatggcatgataacagaaactaagggaacagtgttgataaagactgctgaagaattgatgaattttagtaagggagaagaaaacctcatggatgcacaagtcaaagctattgctgatactggtgcaaatgtcgtagtaacaggtggcaaagtggcagacatggctcttcattatgcaaataaatataatatcatgttagtgaggctaaactcaaaatgggatctccgaagactttgtaaaactgttggtgctacagctcttcctagattgacacctcctgtccttgaagaaatgggacactgtgacagtgtttacctctcagaagttggagatactcaggtggtggtttttaagcatgaaaaggaagatggcgccatttctaccatagtacttcgaggctctacagacaatctgatggatgacatagaaagggtagtagacgatggtgttaatactttcaaagttcttacaagggataaacgtcttgtacccggaggtggagcaacagaaattgaattagccaaacagatcacatcatatggagagacatgtcctggacttgaacagtatgctattaagaagtttgctgaggcatttgaagctattccccgcgcactggcagaaaactctggagttaaggccaatgaagtaatctctaaactttatgcagtacatcaagaaggaaataaaaacgttggattagatattgaggctgaagtccctgctgtaaaggacatgctggaagctggtattctagatacttacctgggaaaatattgggctatcaaactcgctactaatgctgcagtcactgtacttagagtggatcagatcatcatggcaaaaccagctggtgggcccaagcctccaagtgggaagaaagactgggatgatgaccaaaatgattgaaattggcttaatttttactgtaggtgaaggctgtatttgtagtagtactcaagaatcacctgatgttttcttattctccttaaattaagagttattttgtgtttgtattcttggctggatgttataataaacatattgttactgtc

SEQ ID NO: 26966 - DNA, 298 bp, Homo sapiens
accaaccctatgagatgtgcgctggaagtaacatcaaagaggcacggttggacaatcactaagaaaaagatgggtccaggcgcagtggctcatacctgtaatcccaccactttggaaggccaaggcaggtggatcacttgaggtcaggagttcaagaccagcctggccaatatggcaaaaccctgtctctattaaacatacaaaaatttgaccgggtacggtggcttacgcctgtaatcccagcacttaaagaggctgaggcagatggatcacttgaggtcagaagtttgagaccagc

SEQ ID NO: 26967 - DNA, 425 bp, Homo sapiens
aagcactttaagatttgagatccactgctttaagtgataccatctgacatcagtttatctgcctgtgtgaaataaagtcttttactgcacaggtgtctacaacaggggccaccatcatcgctaccgtcaacgtggttggatgtctgaaagaagaagctgagtatcaatgttgactctcactcatgtcatcttattaaaaaaaaaacagtttacaaaacaattgctactgataaatgcagtgtgaaagactggttttaaggcactggtttaaggcactgctttatgtccacccagataacttgagtttttaactaaaagtttcaaatcactatcttctttatacttactaaagttcgttttgcagaagcagatagtttctaaggaatgatccattcatgggaaggagatataaaataaaataaaac

SEQ ID NO: 26968 - DNA, 383 bp, Homo sapiens
ttcatttattcttaagagtagtaggaaatgaattttttattttctcatcatgcccatgatactctgagcttcttgttcatcttctaaatactttaaagatgatcatatgatttttgcccataagagtatccccataggagcagaaaaagcatttaagaaaattcaacattttttcgtgataaaaattctatgaacaaattaggtatagaagaaatgtttctcaacacaagaaggtctatatatgacaggcccacaactaacattgtacttaatggtgaaaagccgaaagcttttcttttaagatcaggaacaagatcaggatgctcactctcaacacttcttttcagcatagtactgttaagccctagctagagcacttaggc

SEQ ID NO: 26969 - DNA, 474 bp, Homo sapiens
ggacctaggtggtgagctatcccatagttcattctcaacgtctttactgcactgtttagggtcagatacacatatatatacaactttgggtgagctcaggagtttataagctttatgggcttggtgttttgatttataaacaggagtttatagaactttatgggtttgcttcctctttctgccagttccttggtattttccagcccttagaactcctctttcgggtctgtgtcccaaaagctggttctttagttaccctactctgttgaacagtttccacagctgtgtccatgtcctaggccacatggtgggaggacaggggaaggggaaagcaagggggttcgctcatgccctaagaactcgggttcctctgagtcgactcctctgttgtggacatctgtagcctcctgctgctgcattgcctctgacacttcaggattgtctggggtctgaaatctaagtgagaatgaagga

SEQ ID NO: 26970 - DNA, 400 bp, Homo sapiens
cattctccaaaataactgaccttcaaaagtgtgaggtcatgaaagacaaggacagactggattcacagtcagagattggagagacacgtcaactcaaggcaatgtgggatcctgaaacatagacaagtatagtagtgggaaaactgggtgaacacagaaagtctgtagtttagttaatgctatggtagaatagcattaactaaattggctaatattggcttctcattttgatagttgtactgtgattacacaggatgctaacattaggggaagatgagtgaaggttatactttatcatttttgcaacttttttcatatgtctaaaattattaaaattttaaactaaagttataaaagagaagtctttaggttgtttattgttctttatattttgactcta

SEQ ID NO: 26971 - DNA, 215 bp, Homo sapiens
ttgcctatttttaaatatttatttttcaatttaaacttttaaaaattctactgggattttcatcttttccaggaacattattcaagtcttatttaataacatgtccttcattaattcattcaacaaatgtttattgagcacttaatatgagccaggaattattttaggtactgaatataaagaacaaatagaattccttgcccttatggagctta

SEQ ID NO: 26972 - DNA, 641 bp, Homo sapiens
aaaaaaaaaaaaaatcaaaaacaaacacaaaaaaaacaagcaggggtcgactactgctgggggaggagcaagaaactcacccaagaccagtgcaagtgagacaggttttgctgccacagagaagggggaaggattgctaaacatggaaaagaaatcccaccttagagggccagatgtacagagcctgcctaatactgaagctggagcacgacaaaagagaacatgcccattcctgccagcctaacatgttgtaataaggaagagcaggccactgctgggagaagagtaggagcatggagaattacctcatttaaggcccaggcatgcaggatggctggaagttgagggaggtcaagaacactcacacaaaaagcccctggcaccccagctccaactcaaagttcaagataaccgcagtctacctttgtaagaatgtgaaggctgtggtgcactggaagtaacaacaaaactcaaactcaggtcaacccctgagattgactcagccttctcacctccatgctgacaacttcacagaagaagaggcatgttgatttccagccgtaaatactatttacctcagtctctactgctcttctatgcttgatgtctggcactcaactaaaaattatcacacaccaaaa

SEQ ID NO: 26973 - DNA, 430 bp, Homo sapiens
tttgatgcgcatattaagccaaacagatcaagaagagaaaagtgtcttccaagagttcagggttgcaatgcactgagcccaaatgactcattgcaggaacatcactcccttctggaaggagacagtgaggtggaagcaggtgagggcaaagtgtagaggtgcaaggggttcagtgatgctgactgtctggcatttttgctccagatcttctaactccccttctcaaaagtgaataacacatacttagtgacagtgacagtcaaacgtttctgataattgtgtcttctaaagtagcaccagttcaaaggaagtaacagtaattgagcaacttcacttatcaaatgatggtatgtcaattagaggcttaaaagtgtcaaatctgaatcttcagtgttttgctgtaattcacattatgctgtttactatagag

SEQ ID NO: 26974 - DNA, 289 bp, Homo sapiens
gattcaatagatctgggggtgggcccaagaatctgccttttttgtaagtactcaggtgattctgctgctgggactggtgagggaatggagcctggccaacagcactttctgtaggcatcatcactaagtagggattggctaatccttgtggatttgtttcacggaattttccttttctttttttttttttttcttgaggtaactgcttagaaatccatctgttgcctattaaagaagactggaggctgtacgcagtggctcacgcctgtaatcccagcactttgggagg

SEQ ID NO: 26975 - DNA, 505 bp, Homo sapiens
aaagcaataattattcagtttatgaaaatgaagagaataaaatcatcttatttctaaattacatggaaatcaaaaaggctcaactaaaatattttcctctttaaatataggtatgtattaactgggttttactacttagtctcacaatgggaatactgtacaagttgtaaaaaatgaacttagtaaacaagagattatcacaaaatgacacgtaacaaagagttacataaagttttaaaaattactttaaccacatatattaataatataaacacctccaaaaaaagaaacttggaccttttttttcaagtttattaaaatttttttccctgttgtcttcctgcttttccacctttactggggtataactgacaattaaaaattataaggccaggcatgattgattatgcctgtaaccccagcactttgggaggccaagggggacagatcacttgagcccaggagttcgagaccagcaggggcaacacagtgagaccctgcctct

SEQ ID NO: 26976 - DNA, 437 bp, Homo sapiens
atttactaaaattatatgaactgtggactcttagggctgctgtaggattcctgtttacatctgttaagttttttgtctgcttttatctggagtcacttttattggttgcataagatggctaaatctcagccaagaagaacctggttgtgttgttctacgcaaatgtatttttgaaagataatgcataatgagaggtgaaataaaagaatgctcaaagacaataagagggcagtacaattgacccttgagcaacatggggttaagggtgccaaccccttgcacaattgaaaatctgagtataagttttgacttccccaaaatttaactactaatagcctactgtaaagtcagttaacacgttgtttgttatatgcattacatactatattcttacaataagctaaaggaaaataaattcctaaggaagaaaaaataca

SEQ ID NO: 26977 - DNA, 434 bp, Homo sapiens
gcaaaaagaaattaaaattgaggatttaagatatccacaggtcctccttgtgaacaccaaatgacagtaaaaaagcaatttatctgctgccaggattggggttttaagttcattaaattaactttaataggggtaagaatttctaaattgctagatcacttatgtgagatttgaaccaaatttaataccaaagagttattgaatgcctactgtgtgccaattctattgctaagcatagaaagacatgagtgaagagacctgctgctaacattcaaggattctttcagtgtccagcttgaaaaatgaaccgtaatgaatgtctgggagagcattacctcactgctcctccttcctgtggatgattttagtttcaaaccacaaacatatatgaaaaggaatgaccagaattttcgctgtcaaaaaaacctgctgct

SEQ ID NO: 26978 - DNA, 483 bp, Homo sapiens
tacccttcctcccaaaaaagaataaaatatttttctgtgtggtggactggctagtgcaaatttaattcttaagtttaaaaatcacgtagtcagtagtatttctttagaagtgttgctttgatgtagcattgtgctcttatggtttgtagattgtctgcaattgagagatggcttctcatttgaggaagagaggtcacagagggaactctgtcaatgaactttggacacaaggccctttgaacttcagttccttgttacaaacttgcgatacctgctctaattcacatgaatcaatgtgtatcaaaaagctataagtagagtaatctgattaattttatgcagttatgtaagaaagttatgatttggtcttcagaatcaatataattctttgccctctgcccccaccccagcccgttgtggtgggagaatttgtcttctaaaatctcttggattcagtttcccatgcttatataaaagcattta

SEQ ID NO: 26979 - DNA, 383 bp, Homo sapiens
tctcacatgacctaatcctatttagccatttggggccccagatcttactaaaaccctacaggaaaaggcacccatataacaatcttataaatggctcttaatgagtaatgtgtgaaaaaacaaaaggacagtaagagttggtgagcaaaatgagctcagtggttatactctcattcacacagaaaatggagaaataacagtcagaaacagtcattcaaaaagttttaaaccagacatcaatcccaatttgtctgaagaaagatattcaactttctactcttctactgaactttctacattgcatgatggacaaaaatcataaatacaatttcaagaatgacaaaaatatcagcaggacagtgaacctcgcattaaaaagatga

SEQ ID NO: 26980 - DNA, 2001 bp, Homo sapiens
gcgcgcttccttgcgcgagccgggctgtcgggtgtgttttgctctccatcctccgtcgtctctgcagcactccgggttctcctccagagcgctagtcccaggagctcggaatgttcgtggaacttaataacctgcttaacaccacccccgacagggcggagcaggggaaactgactctactctgtgatgccaagacagatgggagtttccttgtacaccactttctctccttctatctcaaagctaattgtaaagtctgctttgtggcactcatccagtccttcagccactacagtatcgtgggacagaagctgggtgtcagcctgaccatggcgcgggagcgtgggcagcttgtgttccttgagggactcaagtctgcagtggacgtcgtcttccaggctcaaaaggagccacaccccctgcagtttctcagggaggctaatgctgggaacttgaaaccattgtttgagtttgtacgggaggccctgaagccagtagacagtggagaggctcggtggacgtacccggtgctgttggtggacgacctcagtgtgctcctgagcctgggcatgggggcggtggctgtgctagacttcattcactactgcagagccaccgtgtgctgggaactaaagggaaacatggtggtccttgtgcacgacagtggagatgcggaggatgaggagaatgacatcctgctgaatggcctcagtcatcagagccatctgatactgcgggctgagggcctggccactggcttctgcagggatgtgcacgggcaggtatgcaggggcctcctgggcaacgggcttcttgcccgtgtacctgtgattcttgactacataggggagagtcaggcctgagggactgtctggttgggacatgacttcaggtggaagggaaacactggaaattgtgagacttcaggtaatagacctgctccagattgcgcttagcctcatggaccagcccacgttttccatgggggtcccatttgtgaccaaagtggggcactcttaaagaggagacagctgtctagagtggaatgcaggggcatgccatcaaataacagcaaaattcctccgcagtactgcagcaggcgtcgtctattcaggtcaacactgcactccagcctgggcgacagagtgagactctgtctcaaaaaaagaaaaaagaaaaacgacttggggaggccgtacccgtggaccagggttgctgccccaactgctgccactcaccagaacaattggagtacttgggcagaaactgagagtcctgccctgggagggaagctggattctacccctctaaatgggctgccatgtggctctgtgccttctcaaacttctcttctggaaccactcccaagcctccaccacagcttcctggttaacttcaagttgagcactcctgacccaataagagtggctaggagtcttggcccagagtccttcagaggcaagtctggtaggtcacacagaggaccaagcccagcagtactatgtgtgtagtgctgcagcagggcctgaggagaaggtgctgctgggcagctgtggcctctcttcagccagacccccagagcattgtagtcagcagtaacaccatcaaaacaggtatctagccttcctgggcctctgtagtgaatgtacaaattctaatgtgattttcaaaattagtctagcccgcaagtacaaaaccatgcttagaagaaagaacaaagggaccgggcacagtggctcacgcctgtaatcccagcactttgggaggccgaggtgggcggatcacctgaggtcagagttccagaccagcctggccaacatagtgaaaccccgcctctactaaaaatacaaaaattgcccaggcatggtgatgcgcacccataatccagctacttgggaggctgaagcaggagaattgcctgaacctgggaggcagaggttgcagtaagccaagattgcgccactgcactccagcctgggcaacagagtgagactctgcttc

SEQ ID NO: 26981 - DNA, 858 bp, Homo sapiens
gcgcgcttccttgcgcgagccgggctgtcgggtgtgttttgctctccatcctccgtcgtctctgcagcactccgggttctcctccagagcgctagtcccaggagctcggaatgttcgtggaacttaataacctgcttaacaccacccccgacagggcggagcaggggaaactgactctactctgtgatgccaagacagatgggagtttccttgtacaccactttctctccttctatctcaaagctaattgtaaagtctgctttgtggcactcatccagtccttcagccactacagtatcgtgggacagaagctgggtgtcagcctgaccatggcgcgggagcgtgggcagcttgtgttccttgagggactcaagtctgcagtggacgtcgtcttccaggctcaaaaggagccacaccccctgcagtttctcagggaggctaatgctgggaacttgaaaccattgtttgagtttgtacgggaggccctgaagccagtagacagtggagaggctcggtggacgtacccggtgctgttggtggacgacctcagtgtgctcctgagcctgggcatgggggcggtggctgtgctagacttcattcactactgcagagccaccgtgtgctgggaactaaaggtactcatggaactgccttctctgcgcccacctgtgacctccaagaactcagacaggtccagacctcacttgcttgctgtgatctttttatttgcttggggttttggctttactctggcaggcccagaaagcttttgcagccaccctgttttcccttacctgccattgctgaaaagtaaagccccccaaaataaagggatgatcaacattgcattcagtgggg

SEQ ID NO: 26982 - DNA, 1340 bp, Homo sapiens
gcgcgcttccttgcgcgagccgggctgtcgggtgtgttttgctctccatcctccgtcgtctctgcagcactccgggttctcctccagagcgctagtcccaggagctcggaatgttcgtggaacttaataacctgcttaacaccacccccgacagggcggagcaggggaaactgactctactctgtgatgccaagacagatgggagtttccttgtacaccactttctctccttctatctcaaagctaattgtaaagtctgctttgtggcactcatccagtccttcagccactacagtatcgtgggacagaagctgggtgtcagcctgaccatggcgcgggagcgtgggcagcttgtgttccttgagggactcaagtctgcagtggacgtcgtcttccaggctcaaaaggagccacaccccctgcagtttctcagggaggctaatgctgggaacttgaaaccattgtttgagtttgtacgggaggccctgaagccagtagacagtggagaggctcggtggacgtacccggtgctgttggtggacgacctcagtgtgctcctgagcctgggcatgggggcggtggctgtgctagacttcattcactactgcagagccaccgtgtgctgggaactaaagggaaacatggtggtccttgtgcacgacagtggagatgcggaggatgaggagaatgacatcctgctgaatggcctcagtcatcagagccatctgatactgcgggctgagggcctggccactggcttctgcagggatgtgcacgggcagctgaggatcctgtggaggagaccatcgcagcccgcagtccaccgggatcagagcttcacttaccagtataagatacaggacaaaagcgtgtccttttttgccaaaggaatgtctcctgctgttctgtgacctgatttcggagcagctgaagctacataggactgtttttggacgtggaagatagagcaacatagcaagaatgggtctttctcctctgtagtaatatttcaggctggaccggcgactccactgtgaccagagggttgagtgctgcagtgatggcatgccttggctgccctgggccctgttcagaaaacacaagggaccacaatcctgcctttgctgagagagaggctggatgctagacccaagtgaaaggggtcctttggagcctttgtttaaatatgccttagccccagctgcccatttttggttgacaagcctttcagagccagagtgggtatagatgtgccagccaggagatggcaccggatggcaggtgtgcaaggtgacaactaggataatcatggctggaataaagtaagtttccacactgga

SEQ ID NO: 26983 - DNA, 1352 bp, Homo sapiens
atcgacccggggattggactggaggcttgggcccgccgaaagtgggcttctgggccatctcgcatattctcaacggctgtgcgtgtccttaaaagtccctgggaagcggccgggcgcggtggctcacccctgtaatcccagcagtttgggaggccgaggcgggtgcatcatctaaggggaaactgactctactctgtgatgccaagacagatgggagtttccttgtacaccactttctctccttctatctcaaagctaattgtaaagtctgctttgtggcactcatccagtccttcagccactacagtatcgtgggacagaagctgggtgtcagcctgaccatggcgcgggagcgtgggcagcttgtgttccttgagggactcaagtctgcagtggacgtcgtcttccaggctcaaaaggagccacaccccctgcagtttctcagggaggctaatgctgggaacttgaaaccattgtttgagtttgtacgggaggccctgaagccagtagacagtggagaggctcggtggacgtacccggtgctgttggtggacgacctcagtgtgctcctgagcctgggcatgggggcggtggctgtgctagacttcattcactactgcagagccaccgtgtgctgggaactaaagggaaacatggtggtccttgtgcacgacagtggagatgcggaggatgaggagaatgacatcctgctgaatggcctcagtcatcagagccatctgatactgcgggctgagggcctggccactggcttctgcagggatgtgcacgggcagctgaggatcctgtggaggagaccatcgcagcccgcagtccaccgggatcagagcttcacttaccagtataagatacaggacaaaagcgtgtccttttttgccaaaggaatgtctcctgctgttctgtgacctgatttcggagcagctgaagctacataggactgtttttggacgtggaagatagagcaacatagcaagaatgggtctttctcctctgtagtaatatttcaggctggaccggcgactccactgtgaccagagggttgagtgctgcagtgatggcatgccttggctgccctgggccctgttcagaaaacacaagggaccacaatcctgcctttgctgagagagaggctggatgctagacccaagtgaaaggggtcctttggagcctttgtttaaatatgccttagccccagctgcccatttttggttgacaagcctttcagagccagagtgggtatagatgtgccagccaggagatggcaccggatggcaggtgtgcaaggtgacaactaggataatcatggctggaataaagtaagtttccacactgga

SEQ ID NO: 26984 - DNA, 1254 bp, Homo sapiens
atcgacccggggattggactggaggcttgggcccgccgaaagtgggcttctgggccatctcgcatattctcaacggctgggaaactgactctactctgtgatgccaagacagatgggagtttccttgtacaccactttctctccttctatctcaaagctaattgtaaagtctgctttgtggcactcatccagtccttcagccactacagtatcgtgggacagaagctgggtgtcagcctgaccatggcgcgggagcgtgggcagcttgtgttccttgagggactcaagtctgcagtggacgtcgtcttccaggctcaaaaggagccacaccccctgcagtttctcagggaggctaatgctgggaacttgaaaccattgtttgagtttgtacgggaggccctgaagccagtagacagtggagaggctcggtggacgtacccggtgctgttggtggacgacctcagtgtgctcctgagcctgggcatgggggcggtggctgtgctagacttcattcactactgcagagccaccgtgtgctgggaactaaagggaaacatggtggtccttgtgcacgacagtggagatgcggaggatgaggagaatgacatcctgctgaatggcctcagtcatcagagccatctgatactgcgggctgagggcctggccactggcttctgcagggatgtgcacgggcagctgaggatcctgtggaggagaccatcgcagcccgcagtccaccgggatcagagcttcacttaccagtataagatacaggacaaaagcgtgtccttttttgccaaaggaatgtctcctgctgttctgtgacctgatttcggagcagctgaagctacataggactgtttttggacgtggaagatagagcaacatagcaagaatgggtctttctcctctgtagtaatatttcaggctggaccggcgactccactgtgaccagagggttgagtgctgcagtgatggcatgccttggctgccctgggccctgttcagaaaacacaagggaccacaatcctgcctttgctgagagagaggctggatgctagacccaagtgaaaggggtcctttggagcctttgtttaaatatgccttagccccagctgcccatttttggttgacaagcctttcagagccagagtgggtatagatgtgccagccaggagatggcaccggatggcaggtgtgcaaggtgacaactaggataatcatggctggaataaagtaagtttccacactgga

SEQ ID NO: 26985 - DNA, 1698 bp, Homo sapiens
atcgacccggggattggactggaggcttgggcccgccgaaagtgggcttctgggccatctcgcatattctcaacggctgtgcgtgtccttaaaagtccctgggaagcggccgggcgcggtggctcacccctgtaatcccagcagtttgggaggccgaggcgggtgcatcatctaaggtcaagagttcgagacaagtctggccaagatggtgaaacccccgtctctacgaaaaatacaaaaattagccgggcgtggtggctcatgcctgtaatctcagctactcgggaggctgagacaggagaattgcttgaacccgggaggcggaggttgcagtgacccgagatctcgccaccgcactccagcctgggcgacagagcgggactccacctcaaaaaaaaaaaaaaaaatgaaaaaacctgaagcccagagaagttaaggcatttgtggaaggtcacacggcaaggaggtggcatgcatgatatcacttgatcctgaccttccctgtcactgacagaaatagaggggaaactgactctactctgtgatgccaagacagatgggagtttccttgtacaccactttctctccttctatctcaaagctaattgtaaagtctgctttgtggcactcatccagtccttcagccactacagtatcgtgggacagaagctgggtgtcagcctgaccatggcgcgggagcgtgggcagcttgtgttccttgagggactcaagtctgcagtggacgtcgtcttccaggctcaaaaggagccacaccccctgcagtttctcagggaggctaatgctgggaacttgaaaccattgtttgagtttgtacgggaggccctgaagccagtagacagtggagaggctcggtggacgtacccggtgctgttggtggacgacctcagtgtgctcctgagcctgggcatgggggcggtggctgtgctagacttcattcactactgcagagccaccgtgtgctgggaactaaagggaaacatggtggtccttgtgcacgacagtggagatgcggaggatgaggagaatgacatcctgctgaatggcctcagtcatcagagccatctgatactgcgggctgagggcctggccactggcttctgcagggatgtgcacgggcagctgaggatcctgtggaggagaccatcgcagcccgcagtccaccgggatcagagcttcacttaccagtataagatacaggacaaaagcgtgtccttttttgccaaaggaatgtctcctgctgttctgtgacctgatttcggagcagctgaagctacataggactgtttttggacgtggaagatagagcaacatagcaagaatgggtctttctcctctgtagtaatatttcaggctggaccggcgactccactgtgaccagagggttgagtgctgcagtgatggcatgccttggctgccctgggccctgttcagaaaacacaagggaccacaatcctgcctttgctgagagagaggctggatgctagacccaagtgaaaggggtcctttggagcctttgtttaaatatgccttagccccagctgcccatttttggttgacaagcctttcagagccagagtgggtatagatgtgccagccaggagatggcaccggatggcaggtgtgcaaggtgacaactaggataatcatggctggaataaagtaagtttccacactgga

SEQ ID NO: 26986 - DNA, 1361 bp, Homo sapiens
gcgcgcttccttgcgcgagccgggctgtcgggtgtgttttgctctccatcctccgtcgtctctgcagcactccgggttctcctccagagcgctagtcccaggagctcggaatgttcgtggaacttaataacctgcttaacaccacccccgacagggcggagcaggggaaactgactctactctgtgatgccaagacagatgggagtttccttgtacaccactttctctccttctatctcaaagctaattgtaaagtctgctttgtggcactcatccagtccttcagccactacagtatcgtgggacagaagctgggtgtcagcctgaccatggcgcgggagcgtgggcagcttgtgttccttgagggactcaagtctgcagtggacgtcgtcttccaggctcaaaaggagccacaccccctgcagtttctcagggaggctaatgctgggaacttgaaaccattgtttgagtttgtacgggaggccctgaagccagtagacagtggagaggctcggtggacgtacccggtgctgttggtggacgacctcagtgtgctcctgagcctgggcatgggggcggtggctgtgctagacttcattcactactgcagagccaccgtgtgctgggaactaaagggaaacatggtggtccttgtgcacgacagtggagatgcggaggatgaggagaatgacatcctgctgaatggcctcagtcatcagagccatctgatactgcgggctgagggcctggccactggcttctgcagggatgtgcacgggcagctgaggatcctgtggaggagaccatcgcagcccgcagtccaccgggatcagagcttcacttaccagtataagatacaggacaaaagcgtgtccttttttgccaaaggaatgtctcctgctgttctgtgacctgatttcggagcagctgaagctacataggactgtttttggacgtggaagatagagcaacatagcaagaatgggtctttctcctctgtagtaatatttcaggctggaccggcgactccactgtgaccagagggttgagtgctgcagtgatggcatgccttggctgccctgggccctgttcagaaaacacaagggaccacaatcctgcctttgctgagagagaggctggatgctagacccaagtgaaaggggtcctttggagcctttgtttaaatatgccttagccccagctgcccatttttggttgacaagcctttcagagccagagtgggtatagatgtgccagccaggagatggcaccggatggcaggtgtgcaaggtgacaactaggataatcatggctggaataaagtaagtttccacactggacaacaaccacaaaacaacaaa

SEQ ID NO: 26987 - DNA, 1269 bp, Homo sapiens
gcgcgcttccttgcgcgagccgggctgtcgggtgtgttttgctctccatcctccgtcgtctctgcagcactccgggttctcctccagagcgctagtcccaggagctcggaatgttcgtggaacttaataacctgcttaacaccacccccgacagggcggagcaggggaaactgactctactctgtgatgccaagacagatgggagtttccttgtacaccactttctctccttctatctcaaagggtgtcagcctgaccatggcgcgggagcgtgggcagcttgtgttccttgagggactcaagtctgcagtggacgtcgtcttccaggctcaaaaggagccacaccccctgcagtttctcagggaggctaatgctgggaacttgaaaccattgtttgagtttgtacgggaggccctgaagccagtagacagtggagaggctcggtggacgtacccggtgctgttggtggacgacctcagtgtgctcctgagcctgggcatgggggcggtggctgtgctagacttcattcactactgcagagccaccgtgtgctgggaactaaagggaaacatggtggtccttgtgcacgacagtggagatgcggaggatgaggagaatgacatcctgctgaatggcctcagtcatcagagccatctgatactgcgggctgagggcctggccactggcttctgcagggatgtgcacgggcagctgaggatcctgtggaggagaccatcgcagcccgcagtccaccgggatcagagcttcacttaccagtataagatacaggacaaaagcgtgtccttttttgccaaaggaatgtctcctgctgttctgtgacctgatttcggagcagctgaagctacataggactgtttttggacgtggaagatagagcaacatagcaagaatgggtctttctcctctgtagtaatatttcaggctggaccggcgactccactgtgaccagagggttgagtgctgcagtgatggcatgccttggctgccctgggccctgttcagaaaacacaagggaccacaatcctgcctttgctgagagagaggctggatgctagacccaagtgaaaggggtcctttggagcctttgtttaaatatgccttagccccagctgcccatttttggttgacaagcctttcagagccagagtgggtatagatgtgccagccaggagatggcaccggatggcaggtgtgcaaggtgacaactaggataatcatggctggaataaagtaagtttccacactgga

SEQ ID NO: 26988 - DNA, 1183 bp, Homo sapiens
atcgacccggggattggactggaggcttgggcccgccgaaagtgggcttctgggccatctcgcatattctcaacggctgggaaactgactctactctgtgatgccaagacagatgggagtttccttgtacaccactttctctccttctatctcaaagggtgtcagcctgaccatggcgcgggagcgtgggcagcttgtgttccttgagggactcaagtctgcagtggacgtcgtcttccaggctcaaaaggagccacaccccctgcagtttctcagggaggctaatgctgggaacttgaaaccattgtttgagtttgtacgggaggccctgaagccagtagacagtggagaggctcggtggacgtacccggtgctgttggtggacgacctcagtgtgctcctgagcctgggcatgggggcggtggctgtgctagacttcattcactactgcagagccaccgtgtgctgggaactaaagggaaacatggtggtccttgtgcacgacagtggagatgcggaggatgaggagaatgacatcctgctgaatggcctcagtcatcagagccatctgatactgcgggctgagggcctggccactggcttctgcagggatgtgcacgggcagctgaggatcctgtggaggagaccatcgcagcccgcagtccaccgggatcagagcttcacttaccagtataagatacaggacaaaagcgtgtccttttttgccaaaggaatgtctcctgctgttctgtgacctgatttcggagcagctgaagctacataggactgtttttggacgtggaagatagagcaacatagcaagaatgggtctttctcctctgtagtaatatttcaggctggaccggcgactccactgtgaccagagggttgagtgctgcagtgatggcatgccttggctgccctgggccctgttcagaaaacacaagggaccacaatcctgcctttgctgagagagaggctggatgctagacccaagtgaaaggggtcctttggagcctttgtttaaatatgccttagccccagctgcccatttttggttgacaagcctttcagagccagagtgggtatagatgtgccagccaggagatggcaccggatggcaggtgtgcaaggtgacaactaggataatcatggctggaataaagtaagtttccacactgga

SEQ ID NO: 26989 - DNA, 1364 bp, Homo sapiens
gcgcgcttccttgcgcgagccgggctgtcgggtgtgttttgctctccatcctccgtcgtctctgcagcactccgggttctcctccagagcgctagtcccaggagctcggaatgttcgtggaacttaataacctgcttaacaccacccccgacagggcggagcaggggaaactgactctactctgtgatgccaagacagatgggagtttccttgtacaccactttctctccttctatctcaaagctaattgtaaagtctgctttgtggcactcatccagtccttcagccactacagtatcgtgggacagaagctgggtgtcagcctgaccatggcgcgggagcgtgggcagcttgtgttccttgagggactcaagtctgcagtggacgtcgtcttccaggctcaaaaggagccacaccccctgcagtttctcagggaggctaatgctgggaacttgaaaccattgtttgagtttgtacgggaggccctgaagccagtagacagtggagaggctcggtggacgtacccggtgctgttggtggacgacctcagtgtgctcctgagcctgggcatgggggcggtggctgtgctagacttcattcactactgcagagccaccgtgtgctgggaactaaaggcttccatcttgtatctgatgcagggaaacatggtggtccttgtgcacgacagtggagatgcggaggatgaggagaatgacatcctgctgaatggcctcagtcatcagagccatctgatactgcgggctgagggcctggccactggcttctgcagggatgtgcacgggcagctgaggatcctgtggaggagaccatcgcagcccgcagtccaccgggatcagagcttcacttaccagtataagatacaggacaaaagcgtgtccttttttgccaaaggaatgtctcctgctgttctgtgacctgatttcggagcagctgaagctacataggactgtttttggacgtggaagatagagcaacatagcaagaatgggtctttctcctctgtagtaatatttcaggctggaccggcgactccactgtgaccagagggttgagtgctgcagtgatggcatgccttggctgccctgggccctgttcagaaaacacaagggaccacaatcctgcctttgctgagagagaggctggatgctagacccaagtgaaaggggtcctttggagcctttgtttaaatatgccttagccccagctgcccatttttggttgacaagcctttcagagccagagtgggtatagatgtgccagccaggagatggcaccggatggcaggtgtgcaaggtgacaactaggataatcatggctggaataaagtaagtttccacactgga

SEQ ID NO: 26990 - DNA, 1102 bp, Homo sapiens
ggacgcgtgggtcgacccacgcgtccggcagcactccgggttctcctccagagcgctagtcccaggagctcggaatgttcgtggaacttaataacctgcttaacaccacccccgacagggcggagcaggggaaactgactctactctgtgatgccaagacagatgggagtttccttgtacaccactttctctccttctatctcaaagctaattgtaaagtctgctttgtggcactcatccagtccttcagccactacagtatcgtgggacagaagctgggtgtcagcctgaccatggcgcgggagcgtgggcagcttgtgttccttgagggactcaagtctgcagtggacgtcgtcttccaggctcaaaaggagccacaccccctgcagtttctcagggaaacatggtggtccttgtgcacgacagtggagatgcggaggatgaggagaatgacatcctgctgaatggcctcagtcatcagagccatctgatactgcgggctgagggcctggccactggcttctgcagggatgtgcacgggcagctgaggatcctgtggaggagaccatcgcagcccgcagtccaccgggatcagagcttcacttaccagtataagatacaggacaaaagcgtgtccttttttgccaaaggaatgtctcctgctgttctgtgacctgatttcggagcagctgaagctacataggactgtttttggacgtggaagatagagcaacatagcaagaatgggtctttctcctctgtagtaatatttcaggctggaccggcgactccactgtgaccagagggttgagtgctgcagtgatggcatgccttggctgccctgggccctgttcagaaaacacaagggaccacaatcctgcctttgctgagagagaggctggatgctagacccaagtgaaaggggtcctttggagcctttgtttaaatatgccttagccccagctgcccatttttggttgacaagcctttcagagccagagtgggtatagatgtgccagccaggagatggcaccggatggcaggtgtgcaaggtgacaactaggataatcatggctggaataaagtaagtttccacactgga

SEQ ID NO: 26991 - DNA, 991 bp, Homo sapiens
gcgcgcttccttgcgcgagccgggctgtcgggtgtgttttgctctccatcctccgtcgtctctgcagcactccgggttctcctccagagcgctagtcccaggagctcggaatgttcgtggaacttaataacctgcttaacaccacccccgacagggcggagcaggggaaactgactctactctgtgatgccaagacagatgggagtttccttgtacaccactttctctccttctatctcaaagctaattgtaaagtctgctttgtggcactcatccagtccttcagccactacagtatcgtgggacagaagctgggtgtcagcctgaccatggcgcgggagcgtgggcagcttgtgttccttgagggactcaagtctgcagtggacgtcgtcttccaggctcaaaaggagccacaccccctgcagtttctcagctgaggatcctgtggaggagaccatcgcagcccgcagtccaccgggatcagagcttcacttaccagtataagatacaggacaaaagcgtgtccttttttgccaaaggaatgtctcctgctgttctgtgacctgatttcggagcagctgaagctacataggactgtttttggacgtggaagatagagcaacatagcaagaatgggtctttctcctctgtagtaatatttcaggctggaccggcgactccactgtgaccagagggttgagtgctgcagtgatggcatgccttggctgccctgggccctgttcagaaaacacaagggaccacaatcctgcctttgctgagagagaggctggatgctagacccaagtgaaaggggtcctttggagcctttgtttaaatatgccttagccccagctgcccatttttggttgacaagcctttcagagccagagtgggtatagatgtgccagccaggagatggcaccggatggcaggtgtgcaaggtgacaactaggataatcatggctggaataaagtaagtttccacactgga

SEQ ID NO: 26992 - DNA, 1313 bp, Homo sapiens
ttcctgtggcgagccggggctgtcgggctgtgtttggtgtctcctcatcactccgacgatctcgtagtcagcactcacgggtactgcgctccagacgcgcaagctcgccaggcagtctcgggaatgtgtctggcgaagctcaagtaacccgtgtgttaacctaccagcacaccggaacagagaggagatccagagggagagaacgtgagcctgctaacgtacatgctggatgcgcgaaacgcacgaggagtggcgaagtttcccgtgctacgaggctcatatgtacgttctccttcttcctagatctcaaaacatgcataaaatggtgtacatatcgtcctgctgtaagggggatgtcaatctgcatgccgtgtcagccatttacagataacgtggcgcacagcaagctggatgtcacacctgaccatggtggctggagtgtgggctgtgtgtgttccttgagggagtcaagtacgtgcccgatggagcgtacgatctatgcgcaggctcataggagaggaagccatcaacctcgcgcatgcaggtttctcagggaggctaatgctgggaacttgaaaccattgtttgagtttgtacgggaggccctgaagccagtagacagtggagaggctcggtggacgtacccggtgctgttggtggacgacctcagtgtgctcctgagcctgggcatgggggcggtggctgtgctagacttcattcactactgcagagccaccgtgtgctgggaactaaagctgaggatcctgtggaggagaccatcgcagcccgcagtccaccgggatcagagcttcacttaccagtataagatacaggacaaaagcgtgtccttttttgccaaaggaatgtctcctgctgttctgtgacctgatttcggagcagctgaagctacataggactgtttttggacgtggaagatagagcaacatagcaagaatgggtctttctcctctgtagtaatatttcaggctggaccggcgactccactgtgaccagagggttgagtgctgcagtgatggcatgccttggctgccctgggccctgttcagaaaacacaagggaccacaatcctgcctttgctgagagagaggctggatgctagacccaagtgaaaggggtcctttggagcctttgtttaaatatgccttagccccagctgcccatttttggttgacaagcctttcagagccagagtgggtatagatgtgccagccaggagatggcaccggatggcaggtgtgcaaggtgacaactaggataatcatggctggaataaagtaagtttccacactgga

SEQ ID NO: 26993 - DNA, 326 bp, Homo sapiens
tgtacaccactttctctccttctatctcaaaggtatgggactcattgatgctgtagaaaagaaacccaagatgggtgcagaaataataaaaaccaaaactatttaaggaagcaataacagcatttacaagccaagccttggtgttgggatacctaggggggctattttattaggataacaggttactaggccatctcgttccttccccagccctgccaaagagtggcatgtgctcactgtttctgtgtcctaccttccccttctccacccactgtgtggacattgcctcactgaggtcctatgtggcctcctgattttgttgctcc

SEQ ID NO: 26994 - DNA, 334 bp, Homo sapiens
  misc_feature (25)..(25): n is a, c, g, or t
  misc_feature (37)..(37): n is a, c, g, or t
  misc_feature (71)..(71): n is a, c, g, or t
ctttaagggtcttcctctgaaagantttttccttctntttcctttttttttcctctttcacattttcttgnttgagccaatatgactactgtaatggaggggaaccctttatttgtagttagctggtgataggctttattttacaagttggccccattaccagatggcacatctgactatcatctcatagaggcctcagctgaagggcacagagaaggtagggtggggttcccagtggagcaggtcctggggtggctgctcctctttcattcttctctgtctctgtagctgaggatcctgtggaggagaccatcgcagcccgcagtccaccggg

SEQ ID NO: 26995 - DNA, 700 bp, Homo sapiens
gcgcgcttccttgcgcgagccgggctgtcgggtgtgttttgctctccatcctccgtcgtctctgcagcactccgggttctcctccagagcgctagtcccaggagctcggaatgttcgtggaacttaataacctgcttaacaccacccccgacagggcggagcaggggaaactgactctactctgtgatgccaagacagatgggagtttccttgtacaccactttctctccttctatctcaaagctaattgtaaagtctgctttgtggcactcatccagtccttcagccactacagtatcgtgggacagaagctgggtgtcagcctgaccatggcgcgggagcgtgggcagcttgtgttccttgagggactcaagtctgcagtggacgtcgtcttccaggctgagcctgggcatgggggcggtggctgtgctagacttcattcactactgcagagccaccgtgtgctgggaactaaaggtactcatggaactgccttctctgcgcccacctgtgacctccaagaactcagacaggtccagacctcacttgcttgctgtgatctttttatttgcttggggttttggctttactctggcaggcccagaaagcttttgcagccaccctgttttcccttacctgccattgctgaaaagtaaagccccccaaaataaagggatgatcaacattgcattcagtgggg

SEQ ID NO: 26996 - DNA, 512 bp, Homo sapiens
ctgggaaaagtggcagcttgcaaggaacattacaaagtgcacttagaaattaggtggttaaactgtgccaattgttttcgttgttttataatatcattttccaaaactgtccagtaagttttattatttttaaaactagtttttcaactcattagttctaggctgtactctcttgtaagctttatgataaccactttagttttgtgaataataaattttattcttttgttaatacttgtatacaatttaattgaaaactgtagcttgcacactggaccagatgagtccctcactggcacagtgccctgcacctggagtgatgtttcataaaacggaattttaatagtgtaagagcaccaagatttctctgcacctatacctagcgttggactgtgcattccaaatgaaattcctcctctttatccctgtaatgcactgactaacagaagacttactacacatttaaactgtatattgacatgctattaaatgcgttttttattaaaaaaaaa

SEQ ID NO: 26997 - DNA, 316 bp, Homo sapiens
agtgtggccctcctggcccatttctgcctggagtcaatcactcctatgctgtcctggctcaatgccacttaccatgtcaggcataataatgtgctctcacgtccttctttcccattagtcagtgagtaaagcaaggctgtctcactcttctttgcatccccactgcatagattggaaccaggcagcctgatacctggggaagagtgcaggctttgcagggagacaaacgtggatccaaattccaaatctgaaaaggagctggtggctaattcaagtgaggcactcaaactttctgtgtttcagtgtgttcattgtc

SEQ ID NO: 26998 - DNA, 378 bp, Homo sapiens
gctataaatcatatcttgaactaagttcaaaatttgagtcaaaccaacacaagttgtctgattgcattcctgacccacatggatatcccttgtgtataaaacaagttgccccatcttgatcctttccaatttgtgatctccctgacagaacaccagccatgggggttgtggcttctccacaaaccatctcttgacaagttcagtcccagtggtctctcatggccacctggcataactctacttacagccacacagtcaaacatttaattgtttaattattttgcacagaatgatcctgtctgtctcccagaatctaagctctaggagggagtgaggagggtaggaagcgtgtcttctgagttttcttctacattcagt

SEQ ID NO: 26999 - DNA, 359 bp, Homo sapiens
cgtcgacctgaagcagacaggttgaggggaaatatttgaagtcaggaaatgtttcttaaatatgggctttgttagccctggatgcagagtttcagaagcttaaaagatccaaaatgttttaacacttggaatatttctacttcaatacaaacatctatactaccataaagaactgtaaaaactaaaaagtgaaatctgcccctccaccacccctacccccaacaacaaattcccgcttcccataggtaaccatggttaaaagtttagtgtgactcctttcagacttttttacagtgtgtaatgtatttttccatgttatttattatacagcttatatgatttttacttttcagtgatca

SEQ ID NO: 27000 - DNA, 808 bp, Homo sapiens
ctgtggatactccgaacagaccagtgaggcagagcagcaaaagcagcctggaactggaggcggccaggagaggagcagcaagccggtgcccacagtcagccacggcaccctcagcaggcccattaggaggaattgagaagcttctccagtgtttgccctaaaatctcaatccattttaagtgacagaaagtgacaaaaaacaccccagaggaaaatactggggcctaagggagtaatctcagaactcttgtaataataataataatagcagccaacatctaatacatgcttactctgtgccaggccctattctaagcactttgtctgtgttaattcatttaatattcacatcattctataagctgaagacaatcattattcccattttacagatgaggaaactgaagtacagagaagtaagttgcgcaggattacatgtccagtggatggatgtaggtgtcaaattggctctgacacgttttctcacacaagcccaaaggaggtggagttaggggcaggacagacaagtctggagaacactggtaagagagttgctagtgttctgttcatcctctaacccagggagacattgtgtaggtctgtgacttctgggaccccagggagccagtctggccggcacttctttgtccagtcctgctgcctggtgcctcctgaggtttctgtttcccaatcagggtacgggttccattctccacctccctctccagggcaggaggcaccctccatccctcaatccaaataagctgggagagatgcctcagggagttggccaggctccaggcccctg

SEQ ID NO: 27001 - DNA, 715 bp, Homo sapiens
gggctgagctaaacacagtccttccatgagttctgcaaaccttgggttggaaaagaggctctagtttgccttaggctacctggactgagcaatataaggcatgggagaggtggtttatctgtttaaggtgccatgtcttgtttatactcactgatgagaagaaaaaacttaaatgaagacttcagactgaattttttttccttgtattaaaaacttagagtgagagttaagcttagatttagtttttctaaaaccttaaaaactagaaaccatttattaaagctagattttttttttcttttgagatagactttctcactctgtcgcccaggctggagtgcagtggtgcaatcttggctcactgcaacctccgcctcccgggttcaaactattcttgtgcctcagcctcctgagtagctggaattacaggtgtgagccaccatgcctggctaatttttttttggtatttttagtagagacagggttttgccatgttggccaggctggtctcgaactctaggcctcaagtgatctgcccgcctcagcctcccaaagtgtgggaattacaggagtgagccaccacacctggcctaaagccagattttcatagtccttagaaccaaacaaatttccccaagcacagtaagaactctgtaataatatttccaagtcaacactggaataaataggagtaggacagcctatctgcctctgc

SEQ ID NO: 27002 - DNA, 430 bp, Homo sapiens
ctaaacactgtctttgcgtagaatataatgctactgatgtgaggaaaagaaatccagtgcctggcacatagaaaaggatagatacacttttgtgggaggaaaaacagtggtaaaaacatggactggagtctcagctctaccatttactaattatgtgactttggtcaaatatttgacccctctgagacttggatttcacatctggaaatgtgaagaataaacactacttaatagaattattgtgcaaattaaattaagtgtaaaaagcttggttcacagtaggtggcaaataaatatgtacttcctctaaggaaatgtgtcattttctctaacatagtttatattcataaggagacaacacacaaacacatacacaatcaatcaacaaaaatgtgatacagtagattattaagcaccttgctctgattaa

SEQ ID NO: 27003 - DNA, 264 bp, Homo sapiens
gcctagacattttcacagctttatgctgtacagcagttagcttgtgcctgaatgcacaggaatgcaactccggcaattatttaccagatggaacgtgttttttgtgtttctgttttaagggaactccgttaaagtttttgattctagttttgatgcagtggattgtaaacctgttataacctgctgagaagggaaaaaacccatatttttctgttttcaggaaaaatcatttccatatgaaaggccatctggagaactgggcat

SEQ ID NO: 27004 - DNA, 361 bp, Homo sapiens
ggcacaatctcggcttaatgcaacctccaccttccgggtacaagcgattctcctgcctcagcctcccaagtagctgggactacaggcgcacacatcacgcacgcccagctaatttttgtatttttagtagagatggggttttaccatgtgggccaggatggtctcgatctcccgacctcatgatcctcccattttggcctcccaaagctctgggattacaggtgtgagctactgtgcccggcccacttagttattttaagatagggtcttgctctgttgtccgagctggagtgcaatggtgctatcatagctcactgcaacctcgaccttctaggctcaagtgatcctcctgcctcagcct

SEQ ID NO: 27005 - DNA, 353 bp, Homo sapiens
gaaaaagtctgatctactcttcagtagatctcaataatgttctctaatgttggtctcattcttcagtttatcagatcttttactgatggcactgtaaaagccaagttccaccaatatgttctgtagaacaaaaaatcctaaatcagtggcttgcaacagcaaatgtttatttctctcttgcattgcatttgagtgtggtttagaagtagcatacctaagctcaaaccagctccaatctttgttgttattattattgtttttgtttttaatgggattcaggtttaaagactagcccagatctaggatatgctcttcctgagtcatagggaggaacaaaaaaaaggctgaatgag

SEQ ID NO: 27006 - DNA, 437 bp, Homo sapiens
agtttctaaagcgtcgaccttaagttggtttgtctagtatactttctcacgattagactgaggggatagatttttggaaagactatcacagatgtgaagtgccctcctcctcacattgtgtcaggaggtacatgatgcccacatataacattactagggatgttagccattcttatgtagtaaaggcaatgtttgctaggtttctccactataaagttactaatttttgccaggccttgggggctcacgcctgtaatcccagcactttgggaggctgaggcgggtggattatgagcgcaagagatctagaccatcttggccaacatggtgaagccccatctctactaaagatacaaaaattagctgggtgtggtggcgcgcacatgtaatcccagctactcgggaggctgaggcaggagaatcgcttgaacccagga

SEQ ID NO: 27007 - DNA, 431 bp, Homo sapiens
gtgtcactcattccctggtcattctagtaaaaacagccagctccacaccttttccctggctgtaactccctcccctgttttatcccctgcctggccccatacttactccaaacagacacatatatgctacttttttactgtctgtctctcctctgactaaaatgtaaactccttaaagggcagaaactgactgttccttgctgtaatcctcacgtcatcacaccggagtctgtgtgaatgattaaatggtgtaagaactaggccttagagaactaggctagaactcacatattcagagatggtgctgtgggagtgacatgagagaattatagaaagtgaaaatagaatatgatcaacctaaaagcagagctggaggatgctgaagaccttgcctgtaaaatcccatgagtccggttctaagggaaagaccc

SEQ ID NO: 27008 - DNA, 677 bp, Homo sapiens
ataatcccagtgacaagtggtgaaacccatgcaaatagataagggatccacccgagagatgttaaggatacggaattgatggggcttggtgaccagtgagatctagggtgagagaagacttaaggctacccctaataaataatactgtcattccatctttttaattatttttttaatatttttattttaagttccaggatgcatgtgcagaacatgcaggtttgttacacaggtatacatgtgccatggtggtttgctgcacctatcaacccgtcatctaggttttaagccctgcatgcattaggtatttgtcctaatgctctcccttccccttgtcccccccaccccccgacaggccctggtgtgtgatgatgttcctctccctgtgtccatgtgtcacttccatctttaatgggtgactgggtgatatactaaggaaagagtatagaggaaaagaaatagattttgagggtgcaaataattctattttgtccacccaaaatgatttggtggcccaggggaagattactagttggaaatgtagatttaagtgttggagagggaatgaagtttttggctttggatacattgacttatttatgtctcatccgtaaaactaaatacttatattgtctcactagattttgtggtttaagaaccaaatggataatatgtag

SEQ ID NO: 27009 - DNA, 413 bp, Homo sapiens
ctgtaatcacagctaattgaatgtctgctgatgccaaaattggcttctgattgaattcagaacttttgtttaattaattatcatccacttgagtactgctgcttccctcagaccaggtggttaactgtttcctctcttctgagactgttgtcttccccctgagccctaacacttatactaaagagttaatctgcttccggggagatgcctcactctggttgcaaagagggtgaggcaaaatgtcaaggagtcaagaaagtggaaaggcacccaaaatgggagaaaacatttgcaaatctgataaaggtctagtatccgagtacataaaaaacgcttacatctcagcaatttttaaaaccccaattaaaaaacaagcaaaagatgcaaatagacattaatatatgtcttctttc

SEQ ID NO: 27010 - DNA, 622 bp, Homo sapiens
tcacaataaccaagatatggaattaagctaaatatccatcaatggatggataaaaaatgtggtatatacatataccaaatttgtatatacattcatatatatatatatgaataatattctgccataaaaagaatgaaattctgtcatttgcagaatcatggataagactagcgaacattatgttaagtggaataagtcagacacagaaaaattaatactgtctgtccttacccatatgcaggagctaaacaaatttgagctcattaaagtaaatggtagaattgtggttattagatgttgggaaggatgtgggagcagaggttggttaatggacacaaaattatagctatattggaggaataagttctgttgtagtgctctatagctggtcacatggaaataactataatttatggtatattttcaaaaagctagaagagaagattttgaatgttgtcaacacaaaagtatgataaatgtttgaggtgtttgaaatgctaattaccctgatttgatcattacgcattgtacacctgtatcaaaatatcactctgtttccataaatatgtacaattattgcatgccaactaacaataaaaggacaagataaagattcaaaaaa

SEQ ID NO: 27011 - DNA, 497 bp, Homo sapiens
gtgaccgtgtgccgcacctttgttctgcccgttccttactccttatttaggtgatgaaagatgtggtgccccaactttaagttccacttgacgcagaatttcctgattgaggatggagcctggggctaccttgaggtaattacgggatagtcgttgtacctggaacgtacatttttctaaagttgccacacagtaagactcccacagttctgtccacaccccttcccatgacattattgtttcttcaaaagggaccagccgctgagattttgttagcagggaaatctgtttcacaggaaggagggatgtgtagatgggacctaaacatcgaagtttataatttggtgaaaacctgataaatgggaagaccatttgaaatagatgtttcagtggctgggagtcccagatacccttgaatttaacactgctcattacatacctcagtgaccagaaattggagaccagcctgggcaacatcgcaagaccccatctctaca

SEQ ID NO: 27012 - DNA, 348 bp, Homo sapiens
gtggcatgatctcaactcactgcagcctccatccccagggctcaagtgatcctccaatctcagcctcccaagtagcctggaccacagacacatgctaccacacccagctaatttttatatttttggtagagacggggtttcaccatgttggccaggctggtcttgacctcctgagctcaagcaatctgcccacctcggcctcccaaagtgctgggattacaggagtgagccactgcacccggcccactttatgcccacctcttgagcttggcttgggaactgtggccaggccagactcactgaatgtccagtttaaagatgggaggcaatggggcatatcatccatct

SEQ ID NO: 27013 - DNA, 441 bp, Homo sapiens
gtgagcccacatattctgtttgctttgtatgcatttacaaattttgtattgtgtgtgcatgtagagtatatatttgtagcaattagtacactgtcacatgacagtcaaccatatttttaatgaaagaatgcatggccagctgactggatgaatagttcaatgtgctaatattcctagtttaaaagaaaatgctctgttggctgggtgcggtggctcacgtctgtaatccaagcactttgggaagccgaggtgggcagatcacctgaggtcaggagttcgagaccagcctggccaacatggcaaaaccccgtttctactaaaaatacaaaaaaaaatttagctgggtgtggtggcaggcacctgttatcccagctacttgggaggctgaggcaagagaattgcttgaactgggaggcggaggttgcagtgagccaagatcgt

SEQ ID NO: 27014 - DNA, 447 bp, Homo sapiens
  misc_feature (247)..(247): n is a, c, g, or t
tttctttacagcaatcagaaaatagactaatacagggacaggtgcctgacatggaaggaacatccatcttggactacatggagtgaaaagcaagggctgaatacgatggaacaagaccaccgggacgcgtggagagtgacagaagaacaccccacaccaaccccaaaagaaacaaaaagcacccccggaggaagagaggagagagcagagtatccagcaaagaggagaaacagtgggccgggcgcgngtggctcacgcctagtaatcccgagcagctttgggagggaccgaggtggagcggatcactagggtcagggagattgagaccatccgtggctaacagtggtgaaacgccgtctctactaaaatacaaaaaaaaaattagctgggcgtggttgcgggcgcctgtggtcccagctattcgggaggctgaggcaggagaatagc

SEQ ID NO: 27015 - DNA, 288 bp, Homo sapiens
tagagacggagtttcaccaggttgaccaggctggtctcaaactcttgacctcaagtgatatgctggcctcggcctcccaaagtgctgggattacaggcgtgagccactgcacccggcctaaatgctcactaaaatttattaactgaatggcttatgtgaagaaactcttgttgaattactggaagaggttaaggcaaacacctgtctttgataatacttattctaaaatgttatttataagcttggttatatgtatagtgagattttaccaagttatgatttgtataa

SEQ ID NO: 27016 - DNA, 615 bp, Homo sapiens
gaaaaggatatagagagaccaagttgttgaggacaatagctggagtttagtcttccagaagtatttttcttgccagaattgatcaaaggaagagccaacggcactggataggagattctagcatttggctgcttctccaagacaagcgaggttagaagggagttgagaagttatgtcatcttccactgcagcagataccccttttttagtacttggagatcccccgaatcacagcatttctaaatcagccctggattccacaagtgaagcagcggaggaaccaggaggtcagcggtgtcactcaaatctgtggcaatcaagtgggagttctcaaaaggctatcaaaggaagggggttatgataaggaaaggctcaagacctgcctcagaaggagtgagcagggaagagcaggactgactccactcagtgcaggatccagtacaaaatgaagatgtgaggcttttgtgcaaacagcaggaaaacattacctttacaggtactaaaatgtaatgtttttcctttcttccatagtgtctttctcaacttgttatggctgtgttttttatttgctacttaatgctgttctaactaaaaacttaaatgttaaattccaat

SEQ ID NO: 27017 - DNA, 493 bp, Homo sapiens
tcactttactactcacactaaactgcactttccagtgtcatgtgggagaacgtgttctatacaagctgtcctcaaggggagtatggaaaagaataattagaaaaaaatgtttgatttctgactattcttagactttgtaaatccatggcagatataagatcttaatgccaaaagattttgatttgcctcaattacgtttttcccagtgaagagggagttcttgcaactccaaaagtgagcttcagaaataagcagcactggccgggtacagtggctcacgcctgtcatcccagcactttgggaggccgaggtggatggatcacctgaggtcaggagttcgagaccagcctgaccaacatggtgaaacccggtctctactgaaaatacaaaattagccagggtgtggtggcacacacctgtaatcctggctagttgggaggccgatgcaggaaaatcacttgaacctgggaggtggaggttgcagtgagctgga

SEQ ID NO: 27018 - DNA, 498 bp, Homo sapiens
cttgggagagagactgaagagcaatggattgatagttatctgaagtcctcacaggttaaggatggttgagaagataagctagctcattcagctaccttgctggcatactagctatgtgacaggcactgttctggttgaggactgctctctcagagcagtaaagtaaatcaaataacttgcccaaagtcacactgctggaaaatgccagagctgttcaaagctcctccctaactccaaccctctccaattctctacagctatctgctctgtgtcttcccccaagaaagcgatggaaaccagagcaggaggtttccgtaaccagtcattataatttgtcagggagccatactgcagttcaactagacaagcacattgtcattccctgccatataaggaaacagagctaaacaccattgctttcactattgactggagaggttgctcaagttagagttagacaagatgaggatctagacctagagcagttaaattaaatta

SEQ ID NO: 27019 - DNA, 674 bp, Homo sapiens
tataatcacagtccttttgtttctttttcagtttctaatatgaacagaaattaatgcttttaattcaagctaaccttgtaaaataatttagtataatttttgtgttggtaaattcttaagtgaataagacaacatgtataatctcagtgggaaaacttcagtttatatgtctcatatcaaagtctaaattttaagaattaggtgggtctgtatttcaactcacaaaggatgaaaagaaagaattagataggtcatatgtacactgttagtagaactaggaattcttagagccatcctgaaaaatagtttcatgatgtgtatgataagccttaaaaatggttatatccttttatattgtattaatgtcatgtctagtaatcgatcctaaagaaataaccagtcagccggcacagtggctcacacctgtaatcccagcactttgagagtccgaggcaggcggatcacttgaggccaggagttcgagaccagcttagccaacatgatgaaaccccatctcttctaaaaatacgaaaattagccaggtgttgtggcacatgcctgtaatcccagctactcgggatgctgaggcagagaatcgcttgaacctgggaggcggaggctgcagtgagctgagatgtgccactgcactccagcctgggtgacagagtgagact

SEQ ID NO: 27020 - DNA, 667 bp, Homo sapiens
gctacaaataatgttgctgttttaagtattcatattaaatagatgccttctatatggaacatggcagaaagactgaaaaataacagtaattaattgtgtaattcagaattcataccaatcggtgttgaaactcaaacattgcaaaaatgggtggcaatattcagtgcttaacacttttatagcattggtacatgtgaaaaatgagtgttcaggtggattttatccttgcaagcatgtttttataagaattgtgattgtgcctatcataacagttgttttctgtatcttgaaaaagtattctccacattttaaatgtttttatattagagaattatttaatgcacacttgtcaaatatatatatatatatatgtagtactaatgttactttttatcttttgttttagatgtaagagcatgctcatatgttaggtacttacataaattgttacattattttttcttatgtaatacctttttgtttgtttatgtggttcaaatatattctttccttaaactctttaaaaaaaaaaaagaagtgattgctaatgggttcaaggtttccttttgggctgatgaaaatattttaaaattagacagtggtaatgatttaagaatctgtaaatataactaaaaattactgaaaagaataaaatttatataatgtg

SEQ ID NO: 27021 - DNA, 769 bp, Homo sapiens
gcctgccctggcctcccaaagtgctgggattacaggcgtgagccactgcgcctgacctgtattagggtttgaaagagtgaatatataaatattagtgatttggtttggctttctaggctagatagtgattagaaactgaggagttggaaataacaggaatagatgctgctgttgtcactgatgtgaaactggttggtttcagatttgttaggaggtcagcaaacttcagtccatgggctaaatccggtcacaccattcctctacctgttgagtggttacattagagacccaatggccattcaggccaaaagtactgactctggctttgaaagcaatggtgtgctctagatcttactgggaatcagctggcctgagttccaactgcttttaatgatagtttaaaacctggctaacttgtgattagaaccaaatgatatcttttggggaacaatttcatatagtcttaaataggtggctttattcaaaccgcatagttccaaatcatgatatcccgtatttctctctgtgtgtttgtgtgctttttttttttgacagagtctcccactctgtctctctgaggctggagtgcagtggcgtgatctctgcttactgcagctcccacctcctgcgttcaagcgattctctgtctcagccttctgagtagctgggattacaggcgtgagccactgcgccctgcctatctgcttattttaaaagcagtaaattctttacattatccctaagtgtatactctgatattcacagaacc

SEQ ID NO: 27022 - DNA, 455 bp, Homo sapiens
gaaactaaaggttatctggacgtgccattagtaaagccatttcttattaagaagtaaccattaacagcgagtgtagctcaggacacaggcaaaaaacaacaatcccattccccgtttgagttcatttcagggtttaacttcttccggcgccagccaccggactctcttgagattgtctccaaaacttgtacccgcacaacagatagaggtctcttttttgaattatgtgtttgctgaattcagatttattccagcaatcactaataagccatagagtctgaaagggtattttcccagtacccctccttcctcaaagaatgctctaacaacccaacgtagttactcccaatctccaaatactggacatttagattccgtcagtagatggcgcacggagctcttccacggacgtccttacgtgaccccttcacaacaaaaagatcaggaagggggag

SEQ ID NO: 27023 - DNA, 436 bp, Homo sapiens
tgttaaaacccgtgttgttcaagggtcaaccataactgcaggcagaacatctgggcaggaagctcctgcaggaagacctgtaaactcaggtctgtggaacggcgatgatcttcttcccttgcttccagaattattgctgtgagatcaggtgcactggtacatcttcttacccaaacaaccaggagcatttgttggcaagtttattgtgcccagtgccgatgtctggacaattaattccctaggtcagtggctttcacagtttgtgatggtgactccaggaaggaaactcaccatgaccctgtatatacatagaacaaaaatgcagcccactctgatattgtatttgttctattctagttcattaaaagtgaatgttggtcttcatcctttaaatggatattgtcacctgctaatagattggaccagtattttgaac

SEQ ID NO: 27024 - DNA, 411 bp, Homo sapiens
atggcacgcacgaagcaaacagctcgtaagtccactggcggcaaagccccgcgcaagcagctggccactaaggcggctcgcaaaagcgcgccagccaccggtggcgtgaagaagccccaccgctacaggcctggtactgtcgccctccgtgaaatccgccgctatcagaaatcgactgagctactgattcgcaagctaccattccagcgtctggtacgtgagatcgcgcaggacttcaagaccgacctgcgcttccagagctcggctgtgatggcgctgcaggaggcctgcgaggcttacctggtggggctctttgaggacaccaacctgtgtgctatccacgccaagcgagtgactatcatgcccaaggacatccagctcgctcgccgcattcgcggagagagggcataa

SEQ ID NO: 27025 - DNA, 850 bp, Homo sapiens
ggaattgataagaactttattatggagagttctaaaaggtctaggatattactgttgtggaagacagaatttgtctctagagtcaaagagggtaaggaactgtgttgtcaggatgctaaaaccagagggcaaatgcataactcatattattacctaccacagcaacaccccagtgttctttcccgctgagtccgcatgtgtctcagcatctttctcagtgcagagttccaggaagtcaatagcagtcaatgaaaattgatttttgtctttgctttagacagtgccacaaggggttgttactcgagaccaagggtgggtggagctgacagtagggcagtgtataacaggtgaagtttagtagtccccctggaattagagtcggtggctagagtggaatcttgaaacctagaggttgtaactaaccttggagaagtgtgcagccttagaggagggagtagggctggtaggtgtttgaatggttctcaggaagtctaaccacattctctcatgctctaggctgtcagtgcagtgctggcagcacctgggccagagccattaggtgaggttgaaccaagtagcatgctgtctggaaagctggaaatggggcctaaaagacaagagaaagtagcagttgaatacagattatttgtattggccataagtgaagacaagccaaatcaaaggaatatctttgttctgaagtgatacttcttttcttttatcttgagctaatcaattatattgatggagggcgagtgtagtggctcacacctgtaattccagcactttggaaggccaaggcaataggattgcttgagcccaggagtttgagaccagtctgggcaacata

SEQ ID NO: 27026 - DNA, 1182 bp, Homo sapiens
cagtgattgctaaactttcatatgtggaatatatttatgctgctgtttaggctatccaagaaaaccatgaatattttgtattcaagtgacacaacactgggaatcttacctgtctttcaaagtggcattgggctcatggggaacttattgctattcattacatatatgtacatcttcttattttggccccatcagaagaaccccttagatgtgattctcatgcacctaactttggctaatgttataacagttatcatcaggggtgttccatatataatgtcatccttcagacttagaagtacttttgttgatactggttgtaaaacagggctatacatttataaaatgacatggggcatttgtgtatgtacttcttctctcctgagtacatttcaggctgttatcatctgtccttgtcattccaagtgggcatggctcaaactcaaatctccccataaattttcccttattgatttattcctaaacaacaggctaatcaatatgtgggtcattataagcaccgtagccaccagcaaatccactaatgttggacttgtatattctctgatatactgtaaaacaagactgtttatatactaccatgcaatgatatttcaaagtgccatgtttactcaaggtttcctcttcttgttcctcatgatttggactagtttctacatggtgactattttcttaaggcatcaaaagacggtctttcatattcacagtatcagtctgtctccacaatcttttcctgaaacagaagccagtcatgttttcttcttgctggtgagccgctttgttttcttttatgggactaacgtgtgtctttccacttatattagctccatgtatgagaacagcctaatcctggagaacattactagttttgtttcatcttcctacccaattatctgtactttgatattgattaattatgataataaagtttccagattaacctgtgccattttaaatatgattatttccccctgcttaccacacagctttctattgcatcaaagaaatcctgataaaaattattttaaccacaagagaatgtgtttttaaactttcctgagtttagaaatttagtcctttggcctgggaggtccaggctgcaatgagccaagatcacgccactgaactccagcctgggagacagcaagaccctgtctgaaa

SEQ ID NO: 27027 - DNA, 1202 bp, Homo sapiens
cagtgattgctaaactttcatatgtggaatatatttatgctgctgtttaggctgtgctggcttcaatcaaaagatccaagaaaaccatgaatattttgtattcaagtgacacaacactgggaatcttacctgtctttcaaagtggcattgggctcatggggaacttattgctattcattacatatatgtacatcttcttattttggccccatcagaagaaccccttagatgtgattctcatgcacctaactttggctaatgttataacagttatcatcaggggtgttccatatataatgtcatccttcagacttagaagtacttttgttgatactggttgtaaaacagggctatacatttataaaatgacatggggcatttgtgtatgtacttcttctctcctgagtacatttcaggctgttatcatctgtccttgtcattccaagtgggcatggctcaaactcaaatctccccataaattttcccttattgatttattcctaaacaacaggctaatcaatatgtgggtcattataagcaccgtagccaccagcaaatccactaatgttggacttgtatattctctgatatactgtaaaacaagactgtttatatactaccatgcaatgatatttcaaagtgccatgtttactcaaggtttcctcttcttgttcctcatgatttggactagtttctacatggtgactattttcttaaggcatcaaaagacggtctttcatattcacagtatcagtctgtctccacaatcttttcctgaaacagaagccagtcatgttttcttcttgctggtgagccgctttgttttcttttatgggactaacgtgtgtctttccacttatattagctccatgtatgagaacagcctaatcctggagaacattactagttttgtttcatcttcctacccaattatctgtactttgatattgattaattatgataataaagtttccagattaacctgtgccattttaaatatgattatttccccctgcttaccacacagctttctattgcatcaaagaaatcctgataaaaattattttaaccacaagagaatgtgtttttaaactttcctgagtttagaaatttagtcctttggcctgggaggtccaggctgcaatgagccaagatcacgccactgaactccagcctgggagacagcaagaccctgtctgaaa

SEQ ID NO: 27028 - DNA, 2045 bp, Homo sapiens
accagatgcgttttcagaagacagtactccagtgataaggtatctacaccacttaataactgtacctggtaaggagatttaataaggctgagggtggtattaagtttctcagaacagactcatctttgcggatgcagttgcagaacaggaaacagacccagggagaagtttagtccccccagatctcattggccctccgcacaagccaagccacagccactcctgccacacaatcggattgctttcagcactcgcagccgtggaccgccgtgcggtcctttcctctgcagtgagccgatttgctctgccagcagctgtcggtgccgcgctcgacaccgagtcctagctaggcgctcacagaatacgcgctccctccctcccccttctctgtcccccgcctctcgctcaccccggcccactccagcggcgactttgagggattccctctctggcggcctctgcagcagcacagccggcctcattcggggcactgcgagtatggatctccaaggaagaggggtccccagcatcgacagacttcgagttctcctgatgttgttccatacaatggctcaaatcatggcagaacaagaagtggaaaatctctcaggcctttccactaaccctgaaaaagatatatttgtggtgcgggaaaatgggacgacgtgtctcatggcagagtttgcagccaaatttattgtaccttatgatgtgtgggccagcaactacgtagatctgatcacagaacaggccgatatcgcattgacccggggagctgaggtgaagggccgctgtggccacagccagtcggagctgcaagtgttctgggtggatcgcgcatatgcactcaaaatgctctttgtaaaggaaagccacaacatgtccaagggacctgaggcgacttggaggctgagcaaagtgcagtttgtctacgactcctcggagaaaacccacttcaaagacgcagtcagtgctgggaagcacacagccaactcgcaccacctctctgccttggtcacccccgctgggaagtcctatgagtgtcaagctcaacaaaccatttcactggcctctagtgatccgcagaagacggtcaccatgatcctgtctgcggtccacatccaaccttttgacattatctcagattttgtcttcagtgaagagcataaatgcccagtggatgagcgggagcaactggaagaaaccttgcccctgattttggggctcatcttgggcctcgtcatcatggtaacactcgcgatttaccacgtccaccacaaaatgactgccaaccaggtgcagatccctcgggacagatcccagtataagcacatgggctagaggccgttaggcaggcaccccctattcctgctcccccaactggatcaggtagaacaacaaaagcacttttccatcttgtacacgagatacaccaacatagctacaatcaaacaggcctgggtatctgaggcttgcttggcttgtgtccatgcttaaacccacggaagggggagactctttcggatttgtagggtgaaatggcaattattctctccatgctggggaggaggggaggagggtctcagacagctttcgtgctcatggtggcttggctttgactctccaaagagcaataaatgccacttggagctgtatctggccccaaagtttagggattgaaaacatgcttctttgaggaggaaacccctttaggttcagaagaatatggggtgctttgctcccttggacacagctggcttatcctatacagttgtcaatgcacacagaatacaacctcatgctccctgcagcaagacccctgaaagtgattcatgcttctggctggcattctgcatgtttagtgattgtcttgggaatgtttcactgctacccgcatccagcgactgcagcaccagaaaacgactaatgtaactatgcagagttgtttggacttcttcctgtgccaggtccaagtcgggggacctgaagaatcaatctgtgtgagtctgtttttcaaaatgaaataaaacacactattctctggc

SEQ ID NO: 27029 - DNA, 1950 bp, Homo sapiens
  misc_feature (6)..(7): n is a, c, g, or t
tcgaanngtaaccgttcgtacgagaatcgctgtcctctccttgcggccgcagtgtggtggaattcttttccgacacgtagtagtactgacgcttgggaacggcctgggccagaatctcgatctggcgagcgttcaggcccatgcggcggtacagggccgccgtgtcctcatccctggcgtaaatattcggcaggaaaatcttggtcgcggtcgattccacgatcacgtccaggatgccgctgttggcggcgtcggacaggctctgcgttgccatcagcacaaggcagttggccttacgcagcaccttgagccattccctgatcttcgcgcggaatgccgggtggccgagcatcaaccaggcttcgtccaggatgatgacggccgccagtgtggtggaattctaaccctgaaaaagatatatttgtggtgcgggaaaatgggacgacgtgtctcatggcagagtttgcagccaaatttattgtaccttatgatgtgtgggccagcaactacgtagatctgatcacagaacaggccgatatcgcattgacccggggagctgaggtgaagggccgctgtggccacagccagtcggagctgcaagtgttctgggtggatcgcgcatatgcactcaaaatgctctttgtaaaggtaactccgagcccagcgggcagaggggccgcaggctccgcgtgggtgtgggaagtggcggcccctaggtttaagaacccagacgctgcggggacgattgaagcgcacctccccggctcaacaggaaagccacaacatgtccaagggacctgaggcgacttggaggctgagcaaagtgcagtttgtctacgactcctcggagaaaacccacttcaaagacgcagtcagtgctgggaagcacacagccaactcgcaccacctctctgccttggtcacccccgctgggaagtcctatgagtgtcaagctcaacaaaccatttcactggcctctagtgatccgcagaagacggtcaccatgatcctgtctgcggtccacatccaaccttttgacattatctcagattttgtcttcagtgaagagcataaatgcccagtggatgagcgggagcaactggaagaaaccttgcccctgattttggggctcatcttgggcctcgtcatcatggtaacactcgcgatttaccacgtccaccacaaaatgactgccaaccaggtgcagatccctcgggacagatcccagtataagcacatgggctagaggccgttaggcaggcaccccctattcctgctcccccaactggatcaggtagaacaacaaaagcacttttccatcttgtacacgagatacaccaacatagctacaatcaaacaggcctgggtatctgaggcttgcttggcttgtgtccatgcttaaacccacggaagggggagactctttcggatttgtagggtgaaatggcaattattctctccatgctggggaggaggggaggagggtctcagacagctttcgtgctcatggtggcttggctttgactctccaaagagcaataaatgccacttggagctgtatctggccccaaagtttagggattgaaaacatgcttctttgaggaggaaacccctttaggttcagaagaatatggggtgctttgctcccttggacacagctggcttatcctatacagttgtcaatgcacacagaatacaacctcatgctccctgcagcaagacccctgaaagtgattcatgcttctggctggcattctgcatgtttagtgattgtcttgggaatgtttcactgctacccgcatccagcgactgcagcaccagaaaacgactaatgtaactatgcagagttgtttggacttcttcctgtgccaggtccaagtcgggggacctgaagaatcaatctgtgtgagtctgtttttcaaaatgaaataaaacacactattctctggc

SEQ ID NO: 27030 - DNA, 1576 bp, Homo sapiens
aaccgcatgttcccggaacctgggatgcgcgcgcgcaaaggagcgcccaagcgtgcaacccagagtttggacgcgccgccctttacagcccccgccccggggccgggcgagctgagggggcgcggggcgtctgtgttcccagctgatcacagaacaggccgatatcgcattgacccggggagctgaggtgaagggccgctgtggccacagccagtcggagctgcaagtgttctgggtggatcgcgcatatgcactcaaaatgctctttgtaaaggtaactccgagcccagcgggcagaggggccgcaggctccgcgtgggtgtgggaagtggcggcccctaggtttaagaacccagacgctgcggggacgattgaagcgcacctccccggctcaacaggaaagccacaacatgtccaagggacctgaggcgacttggaggctgagcaaagtgcagtttgtctacgactcctcggagaaaacccacttcaaagacgcagtcagtgctgggaagcacacagccaactcgcaccacctctctgccttggtcacccccgctgggaagtcctatgagtgtcaagctcaacaaaccatttcactggcctctagtgatccgcagaagacggtcaccatgatcctgtctgcggtccacatccaaccttttgacattatctcagattttgtcttcagtgaagagcataaatgcccagtggatgagcgggagcaactggaagaaaccttgcccctgattttggggctcatcttgggcctcgtcatcatggtaacactcgcgatttaccacgtccaccacaaaatgactgccaaccaggtgcagatccctcgggacagatcccagtataagcacatgggctagaggccgttaggcaggcaccccctattcctgctcccccaactggatcaggtagaacaacaaaagcacttttccatcttgtacacgagatacaccaacatagctacaatcaaacaggcctgggtatctgaggcttgcttggcttgtgtccatgcttaaacccacggaagggggagactctttcggatttgtagggtgaaatggcaattattctctccatgctggggaggaggggaggagggtctcagacagctttcgtgctcatggtggcttggctttgactctccaaagagcaataaatgccacttggagctgtatctggccccaaagtttagggattgaaaacatgcttctttgaggaggaaacccctttaggttcagaagaatatggggtgctttgctcccttggacacagctggcttatcctatacagttgtcaatgcacacagaatacaacctcatgctccctgcagcaagacccctgaaagtgattcatgcttctggctggcattctgcatgtttagtgattgtcttgggaatgtttcactgctacccgcatccagcgactgcagcaccagaaaacgactaatgtaactatgcagagttgtttggacttcttcctgtgccaggtccaagtcgggggacctgaagaatcaatctgtgtgagtctgtttttcaaaatgaaataaaacacactattctctggc

SEQ ID NO: 27031 - DNA, 1614 bp, Homo sapiens
  misc_feature (6)..(7): n is a, c, g, or t
tcgaanngtaaccgttcgtacgagaatcgctgtcctctccttgcggccgcagtgtggtggaattctaaccctgaaaaagatatatttgtggtgcgggaaaatgggacgacgtgtctcatggcagagtttgcagccaaatttattgtaccttatgatgtgtgggccagcaactacgtagatctgatcacagaacaggccgatatcgcattgacccggggagctgaggtgaagggccgctgtggccacagccagtcggagctgcaagtgttctgggtggatcgcgcatatgcactcaaaatgctctttgtaaaggtaactccgagcccagcgggcagaggggccgcaggctccgcgtgggtgtgggaagtggcggcccctaggtttaagaacccagacgctgcggggacgattgaagcgcacctccccggctcaacaggaaagccacaacatgtccaagggacctgaggcgacttggaggctgagcaaagtgcagtttgtctacgactcctcggagaaaacccacttcaaagacgcagtcagtgctgggaagcacacagccaactcgcaccacctctctgccttggtcacccccgctgggaagtcctatgagtgtcaagctcaacaaaccatttcactggcctctagtgatccgcagaagacggtcaccatgatcctgtctgcggtccacatccaaccttttgacattatctcagattttgtcttcagtgaagagcataaatgcccagtggatgagcgggagcaactggaagaaaccttgcccctgattttggggctcatcttgggcctcgtcatcatggtaacactcgcgatttaccacgtccaccacaaaatgactgccaaccaggtgcagatccctcgggacagatcccagtataagcacatgggctagaggccgttaggcaggcaccccctattcctgctcccccaactggatcaggtagaacaacaaaagcacttttccatcttgtacacgagatacaccaacatagctacaatcaaacaggcctgggtatctgaggcttgcttggcttgtgtccatgcttaaacccacggaagggggagactctttcggatttgtagggtgaaatggcaattattctctccatgctggggaggaggggaggagggtctcagacagctttcgtgctcatggtggcttggctttgactctccaaagagcaataaatgccacttggagctgtatctggccccaaagtttagggattgaaaacatgcttctttgaggaggaaacccctttaggttcagaagaatatggggtgctttgctcccttggacacagctggcttatcctatacagttgtcaatgcacacagaatacaacctcatgctccctgcagcaagacccctgaaagtgattcatgcttctggctggcattctgcatgtttagtgattgtcttgggaatgtttcactgctacccgcatccagcgactgcagcaccagaaaacgactaatgtaactatgcagagttgtttggacttcttcctgtgccaggtccaagtcgggggacctgaagaatcaatctgtgtgagtctgtttttcaaaatgaaataaaacacactattctctggc

SEQ ID NO: 27032 - DNA, 1920 bp, Homo sapiens
accagatgcgttttcagaagacagtactccagtgataaggtatctacaccacttaataactgtacctggtaaggagatttaataaggctgagggtggtattaagtttctcagaacagactcatctttgcggatgcagttgcagaacaggaaacagacccagggagaagtttagtccccccagatctcattggccctccgcacaagccaagccacagccactcctgccacacaatcggattgctttcagcactcgcagccgtggaccgccgtgcggtcctttcctctgcagtgagccgatttgctctgccagcagctgtcggtgccgcgctcgacaccgagtcctagctaggcgctcacagaatacgcgctccctccctcccccttctctgtcccccgcctctcgctcaccccggcccactccagcggcgactttgagggattccctctctggcggcctctgcagcagcacagccggcctcattcggggcactgcgagtatggatctccaaggaagaggggtccccagcatcgacagacttcgagttctcctgatgttgttccatacaatggctcaaatcatggcagaacaagaagtggaaaatctctcaggcctttccactaaccctgaaaaagatatatttgtggtgcgggaaaatgggacgacgctgtggccacagccagtcggagctgcaagtgttctgggtggatcgcgcatatgcactcaaaatgctctttgtaaaggaaagccacaacatgtccaagggacctgaggcgacttggaggctgagcaaagtgcagtttgtctacgactcctcggagaaaacccacttcaaagacgcagtcagtgctgggaagcacacagccaactcgcaccacctctctgccttggtcacccccgctgggaagtcctatgagtgtcaagctcaacaaaccatttcactggcctctagtgatccgcagaagacggtcaccatgatcctgtctgcggtccacatccaaccttttgacattatctcagattttgtcttcagtgaagagcataaatgcccagtggatgagcgggagcaactggaagaaaccttgcccctgattttggggctcatcttgggcctcgtcatcatggtaacactcgcgatttaccacgtccaccacaaaatgactgccaaccaggtgcagatccctcgggacagatcccagtataagcacatgggctagaggccgttaggcaggcaccccctattcctgctcccccaactggatcaggtagaacaacaaaagcacttttccatcttgtacacgagatacaccaacatagctacaatcaaacaggcctgggtatctgaggcttgcttggcttgtgtccatgcttaaacccacggaagggggagactctttcggatttgtagggtgaaatggcaattattctctccatgctggggaggaggggaggagggtctcagacagctttcgtgctcatggtggcttggctttgactctccaaagagcaataaatgccacttggagctgtatctggccccaaagtttagggattgaaaacatgcttctttgaggaggaaacccctttaggttcagaagaatatggggtgctttgctcccttggacacagctggcttatcctatacagttgtcaatgcacacagaatacaacctcatgctccctgcagcaagacccctgaaagtgattcatgcttctggctggcattctgcatgtttagtgattgtcttgggaatgtttcactgctacccgcatccagcgactgcagcaccagaaaacgactaatgtaactatgcagagttgtttggacttcttcctgtgccaggtccaagtcgggggacctgaagaatcaatctgtgtgagtctgtttttcaaaatgaaataaaacacactattctctggc

SEQ ID NO: 27033 - DNA, 1452 bp, Homo sapiens
aaccgcatgttcccggaacctgggatgcgcgcgcgcaaaggagcgcccaagcgtgcaacccagagtttggacgcgccgccctttacagcccccgccccggggccgggcgagctgagggggcgcggggcgtctgtgttcccagctgatcacagaacaggccgatatcgcattgacccggggagctgaggtgaagggccgctgtggccacagccagtcggagctgcaagtgttctgggtggatcgcgcatatgcactcaaaatgctctttgtaaaggaaagccacaacatgtccaagggacctgaggcgacttggaggctgagcaaagtgcagtttgtctacgactcctcggagaaaacccacttcaaagacgcagtcagtgctgggaagcacacagccaactcgcaccacctctctgccttggtcacccccgctgggaagtcctatgagtgtcaagctcaacaaaccatttcactggcctctagtgatccgcagaagacggtcaccatgatcctgtctgcggtccacatccaaccttttgacattatctcagattttgtcttcagtgaagagcataaatgcccagtggatgagcgggagcaactggaagaaaccttgcccctgattttggggctcatcttgggcctcgtcatcatggtaacactcgcgatttaccacgtccaccacaaaatgactgccaaccaggtgcagatccctcgggacagatcccagtataagcacatgggctagaggccgttaggcaggcaccccctattcctgctcccccaactggatcaggtagaacaacaaaagcacttttccatcttgtacacgagatacaccaacatagctacaatcaaacaggcctgggtatctgaggcttgcttggcttgtgtccatgcttaaacccacggaagggggagactctttcggatttgtagggtgaaatggcaattattctctccatgctggggaggaggggaggagggtctcagacagctttcgtgctcatggtggcttggctttgactctccaaagagcaataaatgccacttggagctgtatctggccccaaagtttagggattgaaaacatgcttctttgaggaggaaacccctttaggttcagaagaatatggggtgctttgctcccttggacacagctggcttatcctatacagttgtcaatgcacacagaatacaacctcatgctccctgcagcaagacccctgaaagtgattcatgcttctggctggcattctgcatgtttagtgattgtcttgggaatgtttcactgctacccgcatccagcgactgcagcaccagaaaacgactaatgtaactatgcagagttgtttggacttcttcctgtgccaggtccaagtcgggggacctgaagaatcaatctgtgtgagtctgtttttcaaaatgaaataaaacacactattctctggc

SEQ ID NO: 27034 - DNA, 2313 bp, Homo sapiens
accagatgcgttttcagaagacagtactccagtgataaggtatctacaccacttaataactgtacctggtaaggagatttaataaggctgagggtggtattaagtttctcagaacagactcatctttgcggatgcagttgcagaacaggaaacagacccagggagaagtttagtccccccagatctcattggccctccgcacaagccaagccacagccactcctgccacacaatcggattgctttcagcactcgcagccgtggaccgccgtgcggtcctttcctctgcagtgagccgatttgctctgccagcagctgtcggtgccgcgctcgacaccgagtcctagctaggcgctcacagaatacgcgctccctccctcccccttctctgtcccccgcctctcgctcaccccggcccactccagcggcgactttgagggattccctctctggcggcctctgcagcagcacagccggcctcattcggggcactgcgagtatggatctccaaggaagaggggtccccagcatcgacagacttcgagttctcctgatgttgttccatacaatggctcaaatcatggcagaacaagaagtggaaaatctctcaggcctttccactaaccctgaaaaagatatatttgtggtgcgggaaaatgggacgacgtgtctcatggcagagtttgcagccaaatttattgtaccttatgatgtgtgggccagcaactacgtagatctgatcacagaacaggccgatatcgcattgacccggggagctgaggtgaagggccgctgtggccacagccagtcggagctgcaagtgttctgggtggatcgcgcatatgcactcaaaatgctctttgtaaaggaaagccacaacatgtccaagggacctgaggcgacttggaggctgagcaaagtgcagtttgtctacgactcctcggagaaaacccacttcaaagacgcagtcagtgctgggaagcacacagccaactcgcaccacctctctgccttggtcacccccgctgggaagtcctatgagtgtcaagctcaacaaaccatttcactggcctctagtgatccgcagaagacggtcaccatgatcctgtctgcggtccacatccaaccttttgacattatctcagattttgtcttcagtgaagagcataaatgcccagtggatgagcgggagcaactggaagaaaccttgcccctgattttggggctcatcttgggcctcgtcatcatggtaacactcgcgatttaccacgtccaccacaaaatgactgccaaccaggtgcagatccctcgggacagatcccagtataagcacatgggctagaggccgttaggcaggcaccccctattcctgctcccccaactggatcaggtagaacaacaaaagcacttttccatcttgtacacgagatacaccaacatagctacaatcaaacaggcctgggtatctgaggcttgcttggcttgtgtccatgcttaaacccacggaagggggagactctttcggatttgtagggtgaaatggcaattattctctccatgctggggaggaggggaggagggtctcagacagctttcgtgctcatggtggcttggctttgactctccaaagagcaataaatgccacttggagctgtatctggccccaaagtttagggattgaaaacatgcttctttgaggaggaaacccctttaggttcagaagaatatggggtgctttgctcccttggacacagctggcttatcctatacagttgtcaatgcacacagaatacaacctcatgctccctgcagcaagacccctgaaagtgattcatgcttctggctggcattctgcatgtttagtgattgtcttgggaatgtttcactgctacccgcatccagcgactgcagcaccagaaaacgactaatgtaactatgcagagttgtttggacttcttcctgtgccaggtccaagtcgggggacctgaagaatcaatctgtgtgagtctgtttttcaaaatgaaataaaacacactattctctggcctttggctgctttcttgaaacaagaaaacaaagctaaaatggtgtctttggcgtccagaagagaaagaggaaaagatgaagacggattttgcatgtttgcaagaggaaaagtaaagacagggcaggaaaccaatgagggggaagttggcttttctaggtgaaaaaaacatggatttttttggcaaatataaatagttttaataatggcacctcttgaccagttggcctaatattgcttctgatgcttcttggtcttgagtttggcatt

SEQ ID NO: 27035 - DNA, 2169 bp, Homo sapiens
accagatgcgttttcagaagacagtactccagtgataaggtatctacaccacttaataactgtacctggtaaggagatttaataaggctgagggtggtattaagtttctcagaacagactcatctttgcggatgcagttgcagaacaggaaacagacccagggagaagtttagtccccccagatctcattggccctccgcacaagccaagccacagccactcctgccacacaatcggattgctttcagcactcgcagccgtggaccgccgtgcggtcctttcctctgcagtgagccgatttgctctgccagcagctgtcggtgccgcgctcgacaccgagtcctagctaggcgctcacagaatacgcgctccctccctcccccttctctgtcccccgcctctcgctcaccccggcccactccagcggcgactttgagggattccctctctggcggcctctgcagcagcacagccggcctcattcggggcactgcgagtatggatctccaaggaagaggggtccccagcatcgacagacttcgagttctcctgatgttgttccatacaatggctcaaatcatggcagaacaagaagtggaaaatctctcaggcctttccactaaccctgaaaaagatatatttgtggtgcgggaaaatgggacgacgtgtctcatggcagagtttgcagccaaatttattgtaccttatgatgtgtgggccagcaactacgtagatctgatcacagaacaggccgatatcgcattgacccggggagctgaggtgaagggccgctgtggccacagccagtcggagctgcaagtgttctgggtggatcgcgcatatgcactcaaaatgctctttgtaaaggtaactccgagcccagcgggcagaggggccgcaggctccgcgtgggtgtgggaagtggcggcccctaggtttaagaacccagacgctgcggggacgattgaagcgcacctccccggctcaacaggaaagccacaacatgtccaagggacctgaggcgacttggaggctgagcaaagtgcagtttgtctacgactcctcggagaaaacccacttcaaagacgcagtcagtgctgggaagcacacagccaactcgcaccacctctctgccttggtcacccccgctgggaagtcctatgagtgtcaagctcaacaaaccatttcactggcctctagtgatccgcagaagacggtcaccatgatcctgtctgcggtccacatccaaccttttgacattatctcagattttgtcttcagtgaagagcataaatgcccagtggatgagcgggagcaactggaagaaaccttgcccctgattttggggctcatcttgggcctcgtcatcatggtaacactcgcgatttaccacgtccaccacaaaatgactgccaaccaggtgcagatccctcgggacagatcccagtataagcacatgggctagaggccgttaggcaggcaccccctattcctgctcccccaactggatcaggtagaacaacaaaagcacttttccatcttgtacacgagatacaccaacatagctacaatcaaacaggcctgggtatctgaggcttgcttggcttgtgtccatgcttaaacccacggaagggggagactctttcggatttgtagggtgaaatggcaattattctctccatgctggggaggaggggaggagggtctcagacagctttcgtgctcatggtggcttggctttgactctccaaagagcaataaatgccacttggagctgtatctggccccaaagtttagggattgaaaacatgcttctttgaggaggaaacccctttaggttcagaagaatatggggtgctttgctcccttggacacagctggcttatcctatacagttgtcaatgcacacagaatacaacctcatgctccctgcagcaagacccctgaaagtgattcatgcttctggctggcattctgcatgtttagtgattgtcttgggaatgtttcactgctacccgcatccagcgactgcagcaccagaaaacgactaatgtaactatgcagagttgtttggacttcttcctgtgccaggtccaagtcgggggacctgaagaatcaatctgtgtgagtctgtttttcaaaatgaaataaaacacactattctctggc

SEQ ID NO: 27036 - DNA, 318 bp, Homo sapiens
aactgccctattgctaatctctaccttatattgcaaggtggatattgttatccctaatttacaaatgagaaaattgttgcttaaagtgatcaagtggctcacacaatggtgtaccactagtaagtagctttggtaaacactgatgtctctggtaccaaagccagtgttcttgatcctcgcaccctgatgccttttaactaaattgcacaatacatgtgaaagcattttgcaacctaaaaagtggtatacaaatggtagtttatatgagagacagaaagtcctgggaagggcaatttccagatcaccctgaagaaggaa

SEQ ID NO: 27037 - DNA, 1293 bp, Homo sapiens
gtgcaatgaaaggatgtgggagtttgagacccatctctgctgtgtggccctgggtgagtcagttgaagctctcagaacgcccagctatccccactgcagaaggctctccctgaaagggcacaggtggaggacgtttgcatttatctggagacagttcatggagaaacacaaagaggtgtcctgacaagacaacaggtccacagcagtcgtcatcatgagtgctcaccatatgccagggttcatcttttaaaatccttaaccaaacaaccaaactgtggttgggattattctctttttataggtgagaaaactgaggctgaaagccattgggtggtttgccaaagctgagaagtagctgagctggggtttgtactcacaccacggtgactcggaggcccaagccagttctgacacactgccttcccatgacattcccacgacaggttcccgaggtcgttggaatgcttacacatttcagcaacttcatggcaactgcccagctcgacccagaagataatactaccttgtactccccctgccgcttccttcctccaggcagctcacagacatgacctcattccctctcccagagtcccataggggtgaaggacagggtggggatcgttaactctgcttcctagggaggaaagggaggcccagagagggatgctggcccaccctgggtcatccagccagctagcgggagagctgcaactggaaatcaggcttccctgccctcggggacagttatttagcctcctggatgtgagctagaatcacccctaagatgcagcaattggggtactcctcttggggtactgggactcagtggctgaaacagctccaagagagttgggcctgtgctgaaaacagaaatccgagatgcatataaattcaatccgtatgagaagagcagggtggcctgggaggagtggtcaccgcagtggctccacctcctacccggccacctgcagccctgcctgggctgctcttggtctctctgtgcccagcttccctggccggatgccctgggggccagagcagccgcaggtgcgatgaaaagaacactggccttgaggtcatgggacctggggaggatattcaccaggggcccctaagttagtcattttagctctcagcttttccatttttcattcaaaaaatggggactctaactccatgaaagagacattgtgtgtgaaatatttcatcataagctgtgaagcctgcaaagaaactcctggtgttctctgtagcctgatttcatctctactaaacgctattttgaaaatg

SEQ ID NO: 27038 - DNA, 848 bp, Homo sapiens
gtacctgacctccctcagtctctggacctaggacccctggccctgtgggtcgcaggttccctggatgatgctggggaaaaggcctgtgttcattgcctcagttctaatttttctttttcaaaaggaagctctcagaacgcccagctatccccactgcagaaggctctccctgaaagggcacaggtggaggacgtttgcatttatctggagacagttcatggagaaacacaaagaggtgtcctgacaagacaacaggtccacagcagtcgtcatcatgagtgctcaccatatgccagggttcatcttttaaaatccttaaccaaacaaccaaactgtggttgggattattctctttttataggtgagaaaactgaggctgaaagccattgggtggtttgccaaagctgagaagtagctgagctggggtttgtactcacaccacggtgactcggaggcccaagccagttctgacacactgccttcccatgacattcccacgacaggttcccgaggtcgttggaatgcttacacatttcagcaacttcatggcaactgcccagctcgacccagaagataatactaccttgtactccccctgccgcttccttcctccaggcagctcacagacatgacctcattccctctcccagagtcccataggggtgaaggacagggtggggatcgttaactctgcttcctagggaggaaagggaggcccagagagggatgctggcccaccctgggtcatccagccagctagcgggagagctgcaactggaaatcaggcttccctgccctcggggacagttatttagcctcctggatgtgagctagaatcacccctaaga

SEQ ID NO: 27039 - DNA, 746 bp, Homo sapiens
  misc_feature (22)..(22): n is a, c, g, or t
ctgtcgtgcaggcgtaggcgtnggggagttttgctcctcaaagggtgtctgtgcatcagcagcactggtggcatcacctgggaggtgttagatacacagattctcaggccccaccctagccctgctgaatcagaacctgcatttcaacaagaaccccaggtatacatgttaaagtctgagaagcactttttacagccatcttaggccgatcggtctgaatgtcacctgaaaatgaaagtgttctaggattggttgttttccgtcacctccactagactgtcagccctgtgagggcaggacctgtttggtttaacactcttctcccagctcccatgagtgcaccagccctgccggggcttgtgtgggttctgccaatgtatcccccagggactctccttgccctgttcccacatcaggccagctctctttcttctgagaccctgatggccttgctgctttgtggtcccatgaggcatctctgctggtctgcccatctatacctggtattgctcctatgtttttgctctcagagggccatcttattgctcccacttccagcttctcaatagggcctcagtgtaatcttcatgaactttccaaattgtttttagtctcacaaagcccacttccattcattaaagaccctgagcaggttggagagcatttatagtcacagctgagtctgtgaatataaccaacaactgtgatgacccctctgttaataaataacttggacatcagcaaaa

SEQ ID NO: 27040 - DNA, 2361 bp, Homo sapiens
ggtcaccaggacaacgggcgtcgccggcgccgtgtgacttcgggctgtgggctcgctcgcggctcttcggccatggttttctcaaacaatgatgaaggccttattaacaaaaagttacccaaagaacttctgttaagaatattttccttcttggatatagtaactttgtgccgatgtgcacagatttccaaggcttggaacatcttagccctggatggaagcaactggcaaagaatagatctttttaactttcaaacagatgtagagggtcgagtggtggaaaatatctcgaagcgatgcggtggattcctgaggaagctcagcttgcgaggctgcattggtgttggggattcctccttgaagacctttgcacagaactgccgaaacattgaacatttgaacctcaatggatgcacaaaaatcactgacagcacgtgttatagccttagcagattctgttccaagctgaaacatctggatctgacctcctgtgtgtctattacaaacagctccttgaaggggatcagtgagggctgccgaaacctggagtacctgaacctctcttggtgtgatcagatcacgaaggatggcatcgaggcactggtgcgaggttgtcgaggcctgaaagccctgctcctgaggggctgcacacagttagaagatgaagctctgaaacacattcagaattactgccatgagcttgtgagcctcaacttgcagtcctgctcacgtatcacggatgaaggtgtggtgcagatatgcaggggctgtcaccggctacaggctctctgcctttcgggttgcagcaacctcacagatgcctctcttacagccctgggtttgaactgtccgcgactgcaaattttggaggctgcccgatgctcccatttgactgacgcaggttttacacttttagctcggaattgccacgaattggagaagatggatcttgaagaatgcatcctgataaccgacagcacactcatccagctctccattcactgtcctaaactgcaagccctgagcctgtcccactgtgaactcatcacagatgatgggatcctgcacctgagcaacagtacctgtggccatgagaggctgcgggtactggagttggacaactgcctcctcatcactgatgtggccctggaacacctagagaactgccgaggcctggagcgcctcgagctgtacgactgccagcaggttacccgtgcaggcatcaagcggatgcgggctcagctccctcatgtcaaagtccacgcctactttgctcccgtcaccccaccgacagcagtggcaggaagtggacagcgactgtgcaggtgctgtgtcattctctgacagcagctgcctgggcccaaggggtgatgaggcatcctttcctctagaagacctgagtcttcctgaccgactccaccatcacccaatctgttgattctccattgggaaaggcatttacaggtaaaagacttctgtatggattgcagttactctggtgatagttttcacctttattctgctgtgaaacaatcaaatcaaagccttgtgtcagttaacacatgacaagtggtctcaatgcagctaggaccatgccagaaacctggatctcttaagagattggtacctacctaggtacgaaagttctacccttggcatactcagcattcctcaaaaagaccatcagtgttagcacaaactgagcagaaaaaataagctgttgattttctacctgatacttaagccagtggcctactttaattcacaattccattttgattagcaggacttttccactttgaagataaatagcaactttatcaaagtgactgtactgcaaattaattcataatgcctgatagttttatatatagagacttatgtggaaggcatgttaataggtttccatgagacaccaaagaaaagaggactctatactgggtggagcagggtcttcacctttttgtttctgtcaacttgtcatatacacctccagggaccaaaaacaaaagcagctcggagtctgtgttgcctgattggaaagtagaagctctggtgtatgctacagcacataacacatttttactaaaggaaaaaagctaattatgtccatgcctctcgtaaaactggggggaaccttaaagagaaagaactaaggcttaagttatctgtagtataatcaattagaagtaatgaatggatgcatgtaaaatggatgtgattttttttcaagcttattttgaaatcttaaaaatcaggttacaccatagctactcaaaagttttacacacttaaaactcagatcagtaagtgttggtaccttttagactcataaaattgaataaaccattgcaatgcttt

SEQ ID NO: 27041 - DNA, 385 bp, Homo sapiens
gtctagacactgattaatcttagagaagacctaaagtgatgacagcagcaaaaatttataaaggcatttaaaatatatgcttaagtataattgctttgaagagctttctcctccctctttaccagtatcctctttatcagtttcccaacaggcacctatcaagatttaagaatggcgaagacaagaaaggatttataagcaacatctgacatcacatggtgacctgaaacatggctctgacctagctagtgctccttttgccctcttccctaatgagcagcctcaccagtacccatttgcttctctgatacctctaaaggttaataatcctcaagacagaccagacaggcccagcatcaaaatacatcaactgtgtacagtaaaa

SEQ ID NO: 27042 - DNA, 2568 bp, Homo sapiens
ggtcaccaggacaacgggcgtcgccggcgccgtgtgacttcgggctgtgggctcgctcgcggctcttcggccatggttttctcaaacaatgatgaaggccttattaacaaaaagttacccaaagaacttctgttaagaatattttccttcttggatatagtaactttgtgccgatgtgcacagatttccaaggcttggaacatcttagccctggatggaagcaactggcaaagaatagatctttttaactttcaaacagatgtagagggtcgagtggtggaaaatatctcgaagcgatgcggtggattcctgaggaagctcagcttgcgaggctgcattggtgttggggattcctccttgaagacctttgcacagaactgccgaaacattgaacatttgaacctcaatggatgcacaaaaatcactgacagcacgtgttatagccttagcagattctgttccaagctgaaacatctggatctgacctcctgtgtgtctattacaaacagctccttgaaggggatcagtgagggctgccgaaacctggagtacctgaacctctcttggtgtgatcagatcacgaaggatggcatcgaggcactggtgcgaggttgtcgaggcctgaaagccctgctcctgaggggctgcacacagttagaagatgaagctctgaaacacattcagaattactgccatgagcttgtgagcctcaacttgcagtcctgctcacgtatcacggatgaaggtgtggtgcagatatgcaggggctgtcaccggctacaggctctctgcctttcgggttgcagcaacctcacagatgcctctcttacagccctgggtttgaactgtccgcgactgcaaattttggaggctgcccgatgctcccatttgactgacgcaggttttacacttttagctcggaattgccacgaattggagaagatggatcttgaagaatgcatcctgataaccgacagcacactcatccagctctccattcactgtcctaaactgcaagccctgagcctgtcccactgtgaactcatcacagatgatgggatcctgcacctgagcaacagtacctgtggccatgagaggctgcgggtactggagttggacaactgcctcctcatcactgatgtggccctggaacacctagagaactgccgaggcctggagcgcctcgagctgtacgactgccagcaggttacccgtgcaggcatcaagcggatgcgggctcagctccctcatgtcaaagtccacgcctactttgctcccgtcaccccaccgacagcagtggcaggaagtggacagcgactgtgcaggtgctgtgtcattctctgacagcagctgcctgggcccaaggggtgatgaggcatcctttcctctagaagacctgagtcttcctgaccgactccaccatcacccaatctgttgattctccattgggaaaggcatttacaggtaaaagacttctgtatggattgcagttactctggtgatagttttcacctttattctgctgtgaaacaatcaaatcaaagccttgtgtcagttaacacatgacaagtggtctcaatgcagctaggaccatgccagaaacctggatctcttaagagattggtacctacctaggtacgaaagttctacccttggcatactcagcattcctcaaaaagaccatcagtgttagcacaaactgagcagaaaaaataagctgttgattttctacctgatacttaagccagtggcctactttaattcacaattccattttgattagcaggacttttccactttgaagataaatagcaactttatcaaagtgactgtactgcaaattaattcataatgcctgatagttttatatatagagacttatgtggaaggcatgttaataggtttccatgagacaccaaagaaaagaggactctatactgggtggagcagggtcttcacctttttgtttctgtcaacttgtcatatacacctccagggaccaaaaacaaaagcagctcggagtctgtgttgcctgattggaaagtagaagctctggtgtatgctacagcacataacacatttttactaaaggaaaaaagctaattatgtccatgcctctcgtaaaactggggggaaccttaaagagaaagaactaaggcttaagttatctgtagtataatcaattagaagtaatgaatggatgcatgtaaaatggatgtgattttttttcaagcttattttgaaatcttaaaaatcaggttacaccatagctactcaaaagttttacacacttaaaactcagatcagtaagtgttggtaccttttagactcataaaattgaataaaccattgcaatgctttaaaaaaaattaagtcagagggttttattgctatgattttatggcagacacatccaagcaaaaccattttccaaatgcagaccttcctgatgttatctgaaatctgataaaatgaccctactctctgctgtggttcattctcgctccatgctgtccatatttatgatctttattaagaacctgtcaatcagtcatcaccaccttcatt

SEQ ID NO: 27043 - DNA, 2514 bp, Homo sapiens
ggtcaccaggacaacgggcgtcgccggcgccgtgtgacttcgggctgtgggctcgctcgcggctcttcggccatggttttctcaaacaatgatgaaggccttattaacaaaaagttacccaaagaacttctgttaagaatattttccttcttggatatagtaactttgtgccgatgtgcacagatttccaaggcttggaacatcttagccctggatggaagcaactggcaaagaatagatctttttaactttcaaacagatgtagagggtcgagtggtggaaaatatctcgaagcgatgcggtggattcctgaggaagctcagcttgcgaggctgcattggtgttggggattcctccttgaagacctttgcacagaactgccgaaacattgaacatttgaacctcaatggatgcacaaaaatcactgacagcacgtgttatagccttagcagattctgttccaagctgaaacatctggatctgacctcctgtgtgtctattacaaacagctccttgaaggggatcagtgagggctgccgaaacctggagtacctgaacctctcttggtgtgatcagatcacgaaggatggcatcgaggcactggtgcgaggttgtcgaggcctgaaagccctgctcctgaggggctgcacacagttagaagatgaagctctgaaacacattcagaattactgccatgagcttgtgagcctcaacttgcagtcctgctcacgtatcacggatgaaggtgtggtgcagatatgcaggggctgtcaccggctacaggctctctgcctttcgggttgcagcaacctcacagatgcctctcttacagccctgggtttgaactgtccgcgactgcaaattttggaggctgcccgatgctcccatttgactgacgcaggttttacacttttagctcggaattgccacgaattggagaagatggatcttgaagaatgcatcctgataaccgacagcacactcatccagctctccattcactgtcctaaactgcaagccctgagcctgtcccactgtgaactcatcacagatgatgggatcctgcacctgagcaacagtacctgtggccatgagaggctgcgggtactggagttggacaactgcctcctcatcactgatgtggccctggaacacctagagaactgccgaggcctggagcgcctcgagctgtacgactgccagcaggttacccgtgcaggcatcaagcggatgcgggctcagctccctcatgtcaaagtccacgcctactttgctcccgtcaccccaccgacagcagtggcaggaagtggacagcgactgtgcaggtgctgtgtcattctctgacagcagctgcctgggcccaaggggtgatgaggcatcctttcctctagaagacctgagtcttcctgaccgactccaccatcacccaatctgttgattctccattgggaaaggcatttacaggtaaaagacttctgtatggattgcagttactctggtgatagttttcacctttattctgctgtgaaacaatcaaatcaaagccttgtgtcagttaacacatgacaagtggtctcaatgcagctaggaccatgccagaaacctggatctcttaagagattggtacctacctaggtacgaaagttctacccttggcatactcagcattcctcaaaaagaccatcagtgttagcacaaactgagcagaaaaaataagctgttgattttctacctgatacttaagccagtggcctactttaattcacaattccattttgattagcaggacttttccactttgaagataaatagcaactttatcaaagtgactgtactgcaaattaattcataatgcctgatagttttatatatagagacttatgtggaaggcatgttaataggtttccatgagacaccaaagaaaagaggactctatactgggtggagcagggtcttcacctttttgtttctgtcaacttgtcatatacacctccagggaccaaaaacaaaagcagctcggagtctgtgttgcctgattggaaagtagaagctctggtgtatgctacagcacataacacatttttactaaaggaaaaaagctaattatgtccatgcctctctataatcaattagaagtaatgaatggatgcatgtaaaatggatgtgattttttttcaagcttattttgaaatcttaaaaatcaggttacaccatagctactcaaaagttttacacacttaaaactcagatcagtaagtgttggtaccttttagactcataaaattgaataaaccattgcaatgctttaaaaaaaattaagtcagagggttttattgctatgattttatggcagacacatccaagcaaaaccattttccaaatgcagaccttcctgatgttatctgaaatctgataaaatgaccctactctctgctgtggttcattctcgctccatgctgtccatatttatgatctttattaagaacctgtcaatcagtcatcaccaccttcatt

SEQ ID NO: 27044 - DNA, 1709 bp, Homo sapiens
ggtcaccaggacaacgggcgtcgccggcgccgtgtgacttcgggctgtgggctcgctcgcggctcttcggccatggttttctcaaacaatgatgaaggccttattaacaaaaagttacccaaagaacttctgttaagaatattttccttcttggatatagtaactttgtgccgatgtgcacagatttccaaggcttggaacatcttagccctggatggaagcaactggcaaagaatagatctttttaactttcaaacagatgtagagggtcgagtggtggaaaatatctcgaagcgatgcggtggattcctgaggaagctcagcttgcgaggctgcattggtgttggggattcctccttgaagacctttgcacagaactgccgaaacattgaacatttgaacctcaatggatgcacaaaaatcactgacagcacgtgttatagccttagcagattctgttccaagctgaaacatctggatctgacctcctgtgtgtctattacaaacagctccttgaaggggatcagtgagggctgccgaaacctggagtacctgaacctctcttggtgtgatcagatcacgaaggatggcatcgaggcactggtgcgaggttgtcgaggcctgaaagccctgctcctgaggggctgcacacagttagaagatgaagctctgaaacacattcagaattactgccatgagcttgtgagcctcaacttgcagtcctgctcacgtatcacggatgaaggtgtggtgcagatatgcaggggctgtcaccggctacaggctctctgcctttcgggttgcagcaacctcacagatgcctctcttacagccctgggtttgaactgtccgcgactgcaaattttggaggctgcccgatgctcccatttgactgacgcaggttttacacttttagctcggaattgccacgaattggagaagatggatcttgaagaatgcatcctgataaccgacagcacactcatccagctctccattcactgtcctaaactgcaagccctgagcctgtcccactgtgaactcatcacagatgatgggatcctgcacctgagcaacagtacctgtggccatgagaggctgcgggtactggagttggacaactgcctcctcatcactgatgtggccctggaacacctagagaactgccgaggcctggagcgcctcgagctgtacgactgccagcaggttacccgtgcaggcatcaagcggatgcgggctcagctccctcatgtcaaagtccacgcctactttgctcccgtcaccccaccgacagcagtggcaggaagtggacagcgactgtgcaggtgctgtgtcattctctgacagcagctgcctgggcccaaggggtgatgaggcatcctttcctctagaagacctgagtcttcctgaccgactccaccatcacccaatctgttgattctccattgggaaaggcatttacagtttcccaacaggcacctatcaagatttaagaatggcgaagacaagaaaggatttataagcaacatctgacatcacatggtgacctgaaacatggctctgacctagctagtgctccttttgccctcttccctaatgagcagcctcaccagtacccatttgcttctctgatacctctaaaggttaataatcctcaagacagaccagacaggcccagcatcaaaatacatcaactgtgtacagtaaaa

SEQ ID NO: 27045 - DNA, 1647 bp, Homo sapiens
ggtcaccaggacaacgggcgtcgccggcgccgtgtgacttcgggctgtgggctcgctcgcggctcttcggccatggttttctcaaacaatgatgaaggccttattaacaaaaagttacccaaagaacttctgttaagaatattttccttcttggatatagtaactttgtgccgatgtgcacagatttccaaggcttggaacatcttagccctggatggaagcaactggcaaagaatagatctttttaactttcaaacagatgtagagggtcgagtggtggaaaatatctcgaagcgatgcggtggattcctgaggaagctcagcttgcgaggctgcattggtgttggggattcctccttgaagacctttgcacagaactgccgaaacattgaacatttgaacctcaatggatgcacaaaaatcactgacagcacgtgttatagccttagcagattctgttccaagctgaaacatctggatctgacctcctgtgtgtctattacaaacagctccttgaaggggatcagtgagggctgccgaaacctggagtacctgaacctctcttggtgtgatcagatcacgaaggatggcatcgaggcactggtgcgaggttgtcgaggcctgaaagccctgctcctgaggggctgcacacagttagaagatgaagctctgaaacacattcagaattactgccatgagcttgtgagcctcaacttgcagtcctgctcacgtatcacggatgaaggtgtggtgcagatatgcaggggctgtcaccggctacaggctctctgcctttcgggttgcagcaacctcacagatgcctctcttacagccctgggtttgaactgtccgcgactgcaaattttggaggctgcccgatgctcccatttgactgacgcaggttttacacttttagctcggaattgccacgaattggagaagatggatcttgaagaatgcatcctgataaccgacagcacactcatccagctctccattcactgtcctaaactgcaagccctgagcctgtcccactgtgaactcatcacagatgatgggatcctgcacctgagcaacagtacctgtggccatgagaggctgcgggtactggagttggacaactgcctcctcatcactgatgtggccctggaacacctagagaactgccgaggcctggagcgcctcgagctgtacgactgccagcaggttacccgtgcaggcatcaagcggatgcgggctcagctccctcatgtcaaagtccacgcctactttgctcccgtcaccccaccgacagcagtggcaggaagtggacagcgactgtgcaggtgctgtgtcattctctgacagcagctgcctgggcccaaggggtgatgaggcatcctttcctctagaagacctgagtcttcctgaccgactccaccatcacccaatctgttgattctccattgggaaaggcatttacagtttcccaacaggcacctatcaagatttaagaatggcgaagacaagaaaggcgccaggagctacacaggcaagaccatttaacaaaagggaaaaagtaaggcctaggaagagcgacttgagccctggtaccgctaactgagtcagcgacacccgagtaccgagccggtttgctcagacctgagg

SEQ ID NO: 27046 - DNA, 2455 bp, Homo sapiens
  misc_feature (154)..(154): n is a, c, g, or t
  misc_feature (219)..(219): n is a, c, g, or t
ggtcaccaggacaacgggcgtcgccggcgccgtgtgacttcgggctgtgggctcgctcgcggctcttcggccatggttttctcaaacaatgatgaaggccttattaacaaaaagttacccaaagaacttctgttaagaatgctgttcagcttgntgttaaattttacttggtctaatccagaatgtactaagtatgtacatagcattggtctggattcnttttgtaatgtgaatattttccttcttggatatagtaactttgtgccgatgtgcacagatttccaaggcttggaacatcttagccctggatggaagcaactggcaaagaatagatctttttaactttcaaacagatgtagagggtcgagtggtggaaaatatctcgaagcgatgcggtggattcctgaggaagctcagcttgcgaggctgcattggtgttggggattcctccttgaagacctttgcacagaactgccgaaacattgaacatttgaacctcaatggatgcacaaaaatcactgacagcacgtgttatagccttagcagattctgttccaagctgaaacatctggatctgacctcctgtgtgtctattacaaacagctccttgaaggggatcagtgagggctgccgaaacctggagtacctgaacctctcttggtgtgatcagatcacgaaggatggcatcgaggcactggtgcgaggttgtcgaggcctgaaagccctgctcctgaggggctgcacacagttagaagatgaagctctgaaacacattcagaattactgccatgagcttgtgagcctcaacttgcagtcctgctcacgtatcacggatgaaggtgtggtgcagatatgcaggggctgtcaccggctacaggctctctgcctttcgggttgcagcaacctcacagatgcctctcttacagccctgggtttgaactgtccgcgactgcaaattttggaggctgcccgatgctcccatttgactgacgcaggttttacacttttagctcggaattgccacgaattggagaagatggatcttgaagaatgcatcctgataaccgacagcacactcatccagctctccattcactgtcctaaactgcaagccctgagcctgtcccactgtgaactcatcacagatgatgggatcctgcacctgagcaacagtacctgtggccatgagaggctgcgggtactggagttggacaactgcctcctcatcactgatgtggccctggaacacctagagaactgccgaggcctggagcgcctcgagctgtacgactgccagcaggttacccgtgcaggcatcaagcggatgcgggctcagctccctcatgtcaaagtccacgcctactttgctcccgtcaccccaccgacagcagtggcaggaagtggacagcgactgtgcaggtgctgtgtcattctctgacagcagctgcctgggcccaaggggtgatgaggcatcctttcctctagaagacctgagtcttcctgaccgactccaccatcacccaatctgttgattctccattgggaaaggcatttacaggtaaaagacttctgtatggattgcagttactctggtgatagttttcacctttattctgctgtgaaacaatcaaatcaaagccttgtgtcagttaacacatgacaagtggtctcaatgcagctaggaccatgccagaaacctggatctcttaagagattggtacctacctaggtacgaaagttctacccttggcatactcagcattcctcaaaaagaccatcagtgttagcacaaactgagcagaaaaaataagctgttgattttctacctgatacttaagccagtggcctactttaattcacaattccattttgattagcaggacttttccactttgaagataaatagcaactttatcaaagtgactgtactgcaaattaattcataatgcctgatagttttatatatagagacttatgtggaaggcatgttaataggtttccatgagacaccaaagaaaagaggactctatactgggtggagcagggtcttcacctttttgtttctgtcaacttgtcatatacacctccagggaccaaaaacaaaagcagctcggagtctgtgttgcctgattggaaagtagaagctctggtgtatgctacagcacataacacatttttactaaaggaaaaaagctaattatgtccatgcctctcgtaaaactggggggaaccttaaagagaaagaactaaggcttaagttatctgtagtataatcaattagaagtaatgaatggatgcatgtaaaatggatgtgattttttttcaagcttattttgaaatcttaaaaatcaggttacaccatagctactcaaaagttttacacacttaaaactcagatcagtaagtgttggtaccttttagactcataaaattgaataaaccattgcaatgcttt

SEQ ID NO: 27047 - DNA, 2515 bp, Homo sapiens
  misc_feature (214)..(214): n is a, c, g, or t
  misc_feature (279)..(279): n is a, c, g, or t
agcgggaggggttccagctacagtgcaggactacacctacctgccaacttttcccatgggccttcaattagtacagtggaataggagttcggatgctggggcaagggaaagagagctaagaagggtcctgctgaggttttctcaaacaatgatgaaggccttattaacaaaaagttacccaaagaacttctgttaagaatgctgttcagcttgntgttaaattttacttggtctaatccagaatgtactaagtatgtacatagcattggtctggattcnttttgtaatgtgaatattttccttcttggatatagtaactttgtgccgatgtgcacagatttccaaggcttggaacatcttagccctggatggaagcaactggcaaagaatagatctttttaactttcaaacagatgtagagggtcgagtggtggaaaatatctcgaagcgatgcggtggattcctgaggaagctcagcttgcgaggctgcattggtgttggggattcctccttgaagacctttgcacagaactgccgaaacattgaacatttgaacctcaatggatgcacaaaaatcactgacagcacgtgttatagccttagcagattctgttccaagctgaaacatctggatctgacctcctgtgtgtctattacaaacagctccttgaaggggatcagtgagggctgccgaaacctggagtacctgaacctctcttggtgtgatcagatcacgaaggatggcatcgaggcactggtgcgaggttgtcgaggcctgaaagccctgctcctgaggggctgcacacagttagaagatgaagctctgaaacacattcagaattactgccatgagcttgtgagcctcaacttgcagtcctgctcacgtatcacggatgaaggtgtggtgcagatatgcaggggctgtcaccggctacaggctctctgcctttcgggttgcagcaacctcacagatgcctctcttacagccctgggtttgaactgtccgcgactgcaaattttggaggctgcccgatgctcccatttgactgacgcaggttttacacttttagctcggaattgccacgaattggagaagatggatcttgaagaatgcatcctgataaccgacagcacactcatccagctctccattcactgtcctaaactgcaagccctgagcctgtcccactgtgaactcatcacagatgatgggatcctgcacctgagcaacagtacctgtggccatgagaggctgcgggtactggagttggacaactgcctcctcatcactgatgtggccctggaacacctagagaactgccgaggcctggagcgcctcgagctgtacgactgccagcaggttacccgtgcaggcatcaagcggatgcgggctcagctccctcatgtcaaagtccacgcctactttgctcccgtcaccccaccgacagcagtggcaggaagtggacagcgactgtgcaggtgctgtgtcattctctgacagcagctgcctgggcccaaggggtgatgaggcatcctttcctctagaagacctgagtcttcctgaccgactccaccatcacccaatctgttgattctccattgggaaaggcatttacaggtaaaagacttctgtatggattgcagttactctggtgatagttttcacctttattctgctgtgaaacaatcaaatcaaagccttgtgtcagttaacacatgacaagtggtctcaatgcagctaggaccatgccagaaacctggatctcttaagagattggtacctacctaggtacgaaagttctacccttggcatactcagcattcctcaaaaagaccatcagtgttagcacaaactgagcagaaaaaataagctgttgattttctacctgatacttaagccagtggcctactttaattcacaattccattttgattagcaggacttttccactttgaagataaatagcaactttatcaaagtgactgtactgcaaattaattcataatgcctgatagttttatatatagagacttatgtggaaggcatgttaataggtttccatgagacaccaaagaaaagaggactctatactgggtggagcagggtcttcacctttttgtttctgtcaacttgtcatatacacctccagggaccaaaaacaaaagcagctcggagtctgtgttgcctgattggaaagtagaagctctggtgtatgctacagcacataacacatttttactaaaggaaaaaagctaattatgtccatgcctctcgtaaaactggggggaaccttaaagagaaagaactaaggcttaagttatctgtagtataatcaattagaagtaatgaatggatgcatgtaaaatggatgtgattttttttcaagcttattttgaaatcttaaaaatcaggttacaccatagctactcaaaagttttacacacttaaaactcagatcagtaagtgttggtaccttttagactcataaaattgaataaaccattgcaatgcttt

SEQ ID NO: 27048 - DNA, 2380 bp, Homo sapiens
ggtcaccaggacaacgggcgtcgccggcgccgtgtgacttcgggctgtgggctcgctcgcggctcttcggccatggttttctcaaacaatgatgaaggccttattaacaaaaagttacccaaagaacttctgttaagaatattttccttcttggatatagtaactttgtgccgatgtgcacagatttccaaggcttggaacatcttagccctggatggaagcaactggcaaagaatagatctttttaactttcaaacagatgtagagggtcgagtggtggaaaatatctcgaagcgatgcggtggattcctgaggaagctcagcttgcgaggctgcattggtgttggggattcctccttgaagacctttgcacagaactgccgaaacattgaacatttgaacctcaatggatgcacaaaaatcactgacagtgcgtctgctctttttcagcacgtgttatagccttagcagattctgttccaagctgaaacatctggatctgacctcctgtgtgtctattacaaacagctccttgaaggggatcagtgagggctgccgaaacctggagtacctgaacctctcttggtgtgatcagatcacgaaggatggcatcgaggcactggtgcgaggttgtcgaggcctgaaagccctgctcctgaggggctgcacacagttagaagatgaagctctgaaacacattcagaattactgccatgagcttgtgagcctcaacttgcagtcctgctcacgtatcacggatgaaggtgtggtgcagatatgcaggggctgtcaccggctacaggctctctgcctttcgggttgcagcaacctcacagatgcctctcttacagccctgggtttgaactgtccgcgactgcaaattttggaggctgcccgatgctcccatttgactgacgcaggttttacacttttagctcggaattgccacgaattggagaagatggatcttgaagaatgcatcctgataaccgacagcacactcatccagctctccattcactgtcctaaactgcaagccctgagcctgtcccactgtgaactcatcacagatgatgggatcctgcacctgagcaacagtacctgtggccatgagaggctgcgggtactggagttggacaactgcctcctcatcactgatgtggccctggaacacctagagaactgccgaggcctggagcgcctcgagctgtacgactgccagcaggttacccgtgcaggcatcaagcggatgcgggctcagctccctcatgtcaaagtccacgcctactttgctcccgtcaccccaccgacagcagtggcaggaagtggacagcgactgtgcaggtgctgtgtcattctctgacagcagctgcctgggcccaaggggtgatgaggcatcctttcctctagaagacctgagtcttcctgaccgactccaccatcacccaatctgttgattctccattgggaaaggcatttacaggtaaaagacttctgtatggattgcagttactctggtgatagttttcacctttattctgctgtgaaacaatcaaatcaaagccttgtgtcagttaacacatgacaagtggtctcaatgcagctaggaccatgccagaaacctggatctcttaagagattggtacctacctaggtacgaaagttctacccttggcatactcagcattcctcaaaaagaccatcagtgttagcacaaactgagcagaaaaaataagctgttgattttctacctgatacttaagccagtggcctactttaattcacaattccattttgattagcaggacttttccactttgaagataaatagcaactttatcaaagtgactgtactgcaaattaattcataatgcctgatagttttatatatagagacttatgtggaaggcatgttaataggtttccatgagacaccaaagaaaagaggactctatactgggtggagcagggtcttcacctttttgtttctgtcaacttgtcatatacacctccagggaccaaaaacaaaagcagctcggagtctgtgttgcctgattggaaagtagaagctctggtgtatgctacagcacataacacatttttactaaaggaaaaaagctaattatgtccatgcctctcgtaaaactggggggaaccttaaagagaaagaactaaggcttaagttatctgtagtataatcaattagaagtaatgaatggatgcatgtaaaatggatgtgattttttttcaagcttattttgaaatcttaaaaatcaggttacaccatagctactcaaaagttttacacacttaaaactcagatcagtaagtgttggtaccttttagactcataaaattgaataaaccattgcaatgcttt

SEQ ID NO: 27049 - DNA, 1781 bp, Homo sapiens
tgattaaatgtctcagtctgttttgtgctgctactacagactggataatttgtaatgaacagaaacttctcatagttctgaaggctgggaagtccaggggctggcatctgctgagggcattcttgctgtgtcatcccattgcagaagggcaaaaaggctagcttccagcttttttttaggacttgagccttggaataagggtcctgcaaacatttactcatgtcttcctgttccagagcctgtcccactgtgaactcatcacagatgatgggatcctgcacctgagcaacagtacctgtggccatgagaggctgcgggtactggagttggacaactgcctcctcatcactgatgtggccctggaacacctagagaactgccgaggcctggagcgcctcgagctgtacgactgccagcaggttacccgtgcaggcatcaagcggatgcgggctcagctccctcatgtcaaagtccacgcctactttgctcccgtcaccccaccgacagcagtggcaggaagtggacagcgactgtgcaggtgctgtgtcattctctgacagcagctgcctgggcccaaggggtgatgaggcatcctttcctctagaagacctgagtcttcctgaccgactccaccatcacccaatctgttgattctccattgggaaaggcatttacaggtaaaagacttctgtatggattgcagttactctggtgatagttttcacctttattctgctgtgaaacaatcaaatcaaagccttgtgtcagttaacacatgacaagtggtctcaatgcagctaggaccatgccagaaacctggatctcttaagagattggtacctacctaggtacgaaagttctacccttggcatactcagcattcctcaaaaagaccatcagtgttagcacaaactgagcagaaaaaataagctgttgattttctacctgatacttaagccagtggcctactttaattcacaattccattttgattagcaggacttttccactttgaagataaatagcaactttatcaaagtgactgtactgcaaattaattcataatgcctgatagttttatatatagagacttatgtggaaggcatgttaataggtttccatgagacaccaaagaaaagaggactctatactgggtggagcagggtcttcacctttttgtttctgtcaacttgtcatatacacctccagggaccaaaaacaaaagcagctcggagtctgtgttgcctgattggaaagtagaagctctggtgtatgctacagcacataacacatttttactaaaggaaaaaagctaattatgtccatgcctctcgtaaaactggggggaaccttaaagagaaagaactaaggcttaagttatctgtagtataatcaattagaagtaatgaatggatgcatgtaaaatggatgtgattttttttcaagcttattttgaaatcttaaaaatcaggttacaccatagctactcaaaagttttacacacttaaaactcagatcagtaagtgttggtaccttttagactcataaaattgaataaaccattgcaatgctttaaaaaaaattaagtcagagggttttattgctatgattttatggcagacacatccaagcaaaaccattttccaaatgcagaccttcctgatgttatctgaaatctgataaaatgaccctactctctgctgtggttcattctcgctccatgctgtccatatttatgatctttattaagaacctgtcaatcagtcatcaccaccttcatt

SEQ ID NO: 27050 - DNA, 1629 bp, Homo sapiens
agtttttctgacattattcacctgttaaagatgaaagagccctcccaccacaacaagaagctgtttgggttctctttctgtaagagcctgtcccactgtgaactcatcacagatgatgggatcctgcacctgagcaacagtacctgtggccatgagaggctgcgggtactggagttggacaactgcctcctcatcactgatgtggccctggaacacctagagaactgccgaggcctggagcgcctcgagctgtacgactgccagcaggttacccgtgcaggcatcaagcggatgcgggctcagctccctcatgtcaaagtccacgcctactttgctcccgtcaccccaccgacagcagtggcaggaagtggacagcgactgtgcaggtgctgtgtcattctctgacagcagctgcctgggcccaaggggtgatgaggcatcctttcctctagaagacctgagtcttcctgaccgactccaccatcacccaatctgttgattctccattgggaaaggcatttacaggtaaaagacttctgtatggattgcagttactctggtgatagttttcacctttattctgctgtgaaacaatcaaatcaaagccttgtgtcagttaacacatgacaagtggtctcaatgcagctaggaccatgccagaaacctggatctcttaagagattggtacctacctaggtacgaaagttctacccttggcatactcagcattcctcaaaaagaccatcagtgttagcacaaactgagcagaaaaaataagctgttgattttctacctgatacttaagccagtggcctactttaattcacaattccattttgattagcaggacttttccactttgaagataaatagcaactttatcaaagtgactgtactgcaaattaattcataatgcctgatagttttatatatagagacttatgtggaaggcatgttaataggtttccatgagacaccaaagaaaagaggactctatactgggtggagcagggtcttcacctttttgtttctgtcaacttgtcatatacacctccagggaccaaaaacaaaagcagctcggagtctgtgttgcctgattggaaagtagaagctctggtgtatgctacagcacataacacatttttactaaaggaaaaaagctaattatgtccatgcctctcgtaaaactggggggaaccttaaagagaaagaactaaggcttaagttatctgtagtataatcaattagaagtaatgaatggatgcatgtaaaatggatgtgattttttttcaagcttattttgaaatcttaaaaatcaggttacaccatagctactcaaaagttttacacacttaaaactcagatcagtaagtgttggtaccttttagactcataaaattgaataaaccattgcaatgctttaaaaaaaattaagtcagagggttttattgctatgattttatggcagacacatccaagcaaaaccattttccaaatgcagaccttcctgatgttatctgaaatctgataaaatgaccctactctctgctgtggttcattctcgctccatgctgtccatatttatgatctttattaagaacctgtcaatcagtcatcaccaccttcatt

SEQ ID NO: 27051 - DNA, 733 bp, Homo sapiens
ggtcaccaggacaacgggcgtcgccggcgccgtgtgacttcgggctgtgggctcgctcgcggctcttcggccatggttttctcaaacaatgatgaaggccttattaacaaaaagttacccaaagaacttctgttaagaatattttccttcttggatatagtaactttgtgccgatgtgcacagatttccaaggcttggaacatcttagccctggatggaagcaactggcaaagaatagatctttttaactttcaaacagatgtagagggtcgagtggtggaaaatatctcgaagcgatgcggtggattcctgaggaagctcagcttgcgaggctgcattggtgttggggattcctccttgaagacctttgcacagaactgccgaaacattgaacatttgaacctcaatggatgcacaaaaatcactgacagcacgtgttatagccttagcagattctgttccaagctgaaacatctggatctgacctcctgtgtgtctattacaaacagctccttgaaggggatcagtgagggctgccgaaacctggagtacctgaacctctcttggtgtgatcagatcacgaaggatggcatcgaggcactggtgcgaggttgtcgaggcctgaaagccctgctcctgaggggctgcacacaggaggtcagatccagatgtttcggcttggaacagaatctgctaaggctatcacacgtgctgtcagtgatttttggtcgac

SEQ ID NO: 27052 - DNA, 494 bp, Homo sapiens
aaatggtttctctggaaaggctctagggtaagcaagtgacagcatggcacagtactagaagatttgcccccttggttcaaattgatttttttgtagagcggagggagcagggagctaggcctctattctcatgattcggtgatgactcaccaagctgtgggtaaaggagaactgattgataggtagtctaggactctgcttctcaaaacgtggtccctagactagcagcactggcatcacctgggagtttctttgaactgcagactgtcgagccccattctagatctatcatcagaatctgcactgtgacaagaaccctagctgattgttacgcgctttaattaagtttgagggagcgctgttctaagcgtgaatggtttcatatgccctctagtggctgtccagcaacttgcagggagctttaaaatgttttctcattttaggacctttgcacagaactgccgaaacattgaacatttgaacctcaatggatg

SEQ ID NO: 27053 - DNA, 617 bp, Homo sapiens
caaatgggctttgtcatcaagctttttttgacagtgttatttgaggctcaggcatctgagcctgttcagtgcatctaccaccaaaagagggcttatgctagagagttggtcttcaaatagaaccagttatggtctttcctgtgtccattacttagaacaagggaaatataagcttaatgagttctaaggtaatttgtattgtgtgtccaaaatagcttctgaacatgcaaacacttaatatttcactgtagtgatgtaaagttatagtgcacttgtatatttcagattgaggaatcttgaaaaaacttatgtatccaggtggcggattagagtttatctttcaagttataattatcctgaaatgttaacaccatctcgtttttgtgtttttttcctctctctgtagaatattttccttcttggatatagtaactttgtgccgatgtgcacagatttccaaggtagagtattcaccagattttttaatcaataaatatcaagttttattagaatgagttttagttcaaattactgaaaattaaaattttattatcttttatacttaatataacataatggtataattttgcatttgatgattaacttaatatacatca

SEQ ID NO: 27054 - DNA, 370 bp, Homo sapiens
attcccacataaagataaatgaacaatggaataccaataaaggcctacgaaagtggaatcacaaataagcataccatagtcagagcgtgaactatggcccaccctgcccagctcagggattggcgggcgatgttaccccctcagggattggcgggcggaagtcccgcccctcgccggctgaggggccgccctgagggccagcactggcgtctgcggccgcagcagcactttttgcacagtctggggcggggttccccggcttccaagtcgctgtttcgtcaaagcacgagggccgcctgtggccttaattcctaacggcggccccggttctcccttctcggcaataaaccaggcctagttttgtagctgc

SEQ ID NO: 27055 - DNA, 5919 bp, Homo sapiens
  misc_feature (17)..(17): n is a, c, g, or t
ctcggctctaccttgtntcacagagtggagactgggatgaaggatgtggtgaactgcgttgggggtatgggtgccctgctgcccctgctggagcgagtagctgcacagcccaaagaggctgaagcaggtccagctgaaacgcatgacctcgtgggtcctgaactgacctctggtcacaacacccagggcctggttctcccattgggtaaatcttcagaggaacggatggagaggaacgcagtggctgcttttctgctgatgctgcggaacttccttcagggtcacatggtgaaccaagagagcctggtgcagtgccaggggcctgccatcatcggggccctcctgcgaaaggtcccaagctgggccatggacatgaacgtgctcatgtccgcccagctgctgatggagcaggtggcagctgagggcagcgggcccctcctgtacctactctaccagcatttgctcttcaactttcacctctggaccctcagtgacttcgccgtgcgcctcggtcacatccagtacatgtccagcatagttcgggagcacagacagaagctgcggaagaagtacggcgtccagtttatcttggatgctctgcgcacccactacagcccgcagcgggagcgccccctggctgctgacgacctacgcaccgtgcagacctccctcctgggcctggcgagggagttcctggtgcggagtctctcagcagatgacgtgcaggtcacgcagaccatgctgagctttttggcggccacaggcgatgacggtcaggcggtgggtgcgctggacctgctgctggccctgctgcacggttccctggtgcaggagtccttggctgtctttctgttggagccagggaacctcgaagtgctactggccctgctagtgcggccagggtcactgcccctgctgcccgatcgagtctgcaagatcctgcgcagactgcagcagaatgagcggctacctgagcggagccgccagcgcctccggctgcgggagtgtggtctccagggtctggttgcctgcttgcctgaggggactgtttccccccagctctgccagggcctctacaagctgttcctgggggcagattgcctgaacctctcagatctgctggctgtggtacagctgtccctccaggctgacctcagcgttcgcctagacatctgtcgccagcttttccacctcatctacggacagccagatgtagtgcggcttctggcccgacaggctggctggcaagatgtgctgacccggctatatgtcctggaggctgccacagccggcagcccccctccgtcttccccagagtcacctacctcccccaagccagccccacccaagccacccactgagtcacctgctgagccttcagatgtcttcctgccctcagaggccccctgccctgaccctgatggcttttaccatgctctctccccattctgcacgccctttgacctgggcctggaacggtctagtgtaggatcaggcaacactgctggtggtggcggcagcagtgggactcttactccagccagccagcccggcactccttcgccactggatgggccgcggccctttcctgctgctcctggccgccacagctccagtctctccaatgtgctggaggacggcagcctcccggagcccaccattagcggggatgatacctcgaacaccagcaacccacagcaaacctctgaggaagagttgtgcaatctgctcaccaacgtgctgttctcggtgacgtggcgtggcgtggaaggcagcgatgaggctgcctggcgggagcgtggccaggttttctcagtgctcacccagctgggggcctcagccacacttgtgcgcccaccagactgcatcaagcgcagcctcctggagatgatgctggagtcagccctgaccgacatcaaagaggcccccgtgggggtcctggccagcctcacccagcaagcgctttggctgctgcgtctgctgcaggacttcctgtgtgctgaaggccatggtaaccaggaactgtggagtgagaagctctttgaaggtgtatgcagcctacttgatcgcctgggagcctggccccacctggccaacggcacagctgatctccgtgagatggcgcagattggcctacggcttgtacttggctacatcctgctggaagacccacagctgcatgcccaggcctacgtgagattgcacatgctgctacagactgcagtgccagcccgccgcgaggaggcctgctatgtgctctccaagctggaggctgcactggggcgggtgctgaacacctcttccttggagtcagccactgatgaggcagggtccccacttgcagctgcagcagctgcagcagctgcagagcgctgctcctggctggtgccactggtgcgcacgctgctagaccgtgcctatgagccgctggggctgcagtggggactgccctccctgccacccaccaatggcagccccaccttctttgaagacttccaggctttttgtgccacacccgaatggcgccacttcatcgacaaacaggtacagccaaccatgtcccagttcgaaatggacacgtatgctaagagccacgaccttatgtcaggtttctggaatgcctgctatgacatgcttatgagcagtgggcagcggcgccagtgggagcgcgcccagagtcgtcgggccttccaggagctggtgctggaacctgcgcagaggcgggcgcgcctggaggggctacgctacacggcagtgctgaagcagcaggcaacgcagcactccatggccctgctgcactggggggcgctgtggcgccagctcgccagcccatgtggggcctgggcgctgagggacactcccatcccccgctggaaactgtccagcgccgagacatattcacgcatgcgtctgaagctggtgcccaaccatcacttcgaccctcacctggaagccagcgctctccgagacaatctgggtgaggttcccctgacacccaccgaggaggcctcactgcctctggcagtgaccaaagaggccaaagtgagcaccccacccgagttgctgcaggaggaccagctcggcgaggacgagctggctgagctggagaccccgatggaggcagcagaactggatgagcagcgtgagaagctggtgctgtcggccgagtgccagctggtgacggtagtggccgtggtcccagggctgctggaggtcaccacacagaatgtatacttctacgatggcagcactgagcgcgtggaaaccgaggagggcatcggctatgatttccggcgcccactggcccagctgcgtgaggtccacctgcggcgtttcaacctgcgccgttcagcacttgagctcttctttatcgatcaggccaactacttcctcaacttcccatgcaaggtgggcacgaccccagtctcatctcctagccagactcccagaccccagcctggccccatcccaccccatacccaggtacggaaccaggtgtactcgtggctcctgcgcctacggcccccctctcaaggctacctaagcagccgctccccccaggagatgctgcgtgcctcaggccttacccagaaatgggtacagcgtgagatatccaacttcgagtacttgatgcaactcaacaccattgcggggcggacctacaatgacctgtctcagtaccctgtggtatgaaagctttgaggacccagcagggaccattgacaagttccactatggcacccactactccaatgcagcaggcgtgatgcactacctcatccgcgtggagcccttcacctccctgcacgtccagctgcaaagtggccgctttgactgctccgaccggcagttccactcggtggcggcagcctggcaggcacgcctggagagccctgccgatgtgaaggagctcatcccggaattcttctactttcctgacttcctggagaaccagaacggttttgacctgggctgtctccagctgaccaacgagaaggtaggcgatgtggtgctacccccgtgggccagctctcctgaggacttcatccagcagcaccgccaggctctggagtcggagtatgtgtctgcacacctacacgagtggatcgacctcatctttggctacaagcagcgggggccagccgccgaggaggccctcaatgtcttctattactgcacctatgagggggctgtagacctggaccatgtgacagatgagcgggaacggaaggctctggagggcattatcagcaactttgggcagactccctgtcagctgctgaaggagccacatccaactcggctctcagctgaggaagcagcccatcgccttgcacgcctggacactaactcacctagcatcttccagcacctggacgaactcaaggcattcttcgcagaggttgtcagtgatggtgtacccctggtgctagccctggtcccccaccggcagccccactccttcatcacccagggttccccagacctgttggtgactgtgagtgccagtgggctgctgggcacccacagctggttgccctatgaccgcaacataagcaactacttcagcttcagcaaagaccccaccatgggcagccacaagacgcagcgactgctgagtggcccgtgggtgccaggcagtggtgtgagtggacaagcactggcagtggccccggatggaaagctgctattcagcggtggccactgggatggcagcctgcgggtgactgcactaccccgtggcaagctgttgagccagctcagctgccaccttgatgtagtaacctgccttgcactggacacctgtggcatctacctcatctcaggctcccgggacaccacgtgcatggtgtggcggctcctgcatcagggtggtctgtcagtaggcctggcaccaaagcctgtgcaggtcctgtatgggcatggggctgcagtgagctgtgtggccatcagcactgaacttgacatggctgtgtctggatctgaggatggaactgtgatcatacacactgtacgccgcggacagtttgtagcggcactacggcctctgggtgccacattccctggacctattttccacctggcattggggtccgaaggccagattgtggtacagagctcagcgtgggaacgtcctggggcccaggtcacctactccttgcacctgtattcagtcaatgggaagttgcgggcttcactgcccctggcagagcagcctacagccctgacggtgacagaggactttgtgttgctgggcaccgcccagtgcgccctgcacatcctccaactaaacacactgctcccggccgcgcctcccttgcccatgaaggtggccatccgcagcgtggccgtgaccaaggagcgcagccacgtgctggtgggcctggaggatggcaagctcatcgtggtggtcgcggggcagccctctgaggtgcgcagcagccagttcgcgcggaagctgtggcggtcctcgcggcgcatctcccaggtgtcctcgggagagacggaatacaaccctactgaggcgcgctgaacctggccagtccggctgctcgggccccgcccccggcaggcctggcccgggaggccccgcccagaagtcggcgggaacaccccggggtgggcagcccaggggggtgagcggggcccaccctgcccagctcagggattggcgggcgatgttaccccctcagggattggcgggcggaagtcccgcccctcgccggctgaggggccgccctgagggccagcactggcgtctgcggccgcagcagcactttttgcacagtctggggcggggttccccggcttccaagtcgctgtttcgtcaaagcacgagggccgcctgtggccttaattcctaacggcggccccggttctcccttctcggcaataaaccaggcctagttttgtagctgc

SEQ ID NO: 27056 - DNA, 6273 bp, Homo sapiens
ctagaggatccccagactcggcaccgttcgctgccctccctcagtgagcctttctcctcctgctgtatcggctccgctggataccgcatcgactctaccctcgcaggcacccaggacactcggtggggcagccccacatccctggagggtgagctgggggctgtggccatctttcacgaagccctgcaggcgacggctctgaggaccctgtgcaccctggggcccaatgagacggcacccttcaagcctgagggggagctgcatgagctcagcaccaggctgctcctccattactcacctcaggcttgtaagaacaacatctgcctggacctgtcccccagtcatgggcttgatgggcgcctgacgggccacagagtggagacctgggatgtgaaggatgtggtgaactgcgttgggggtatgggtgccctgctgcccctgctggagcgagtagctgcacagcccaaagaggctgaagcaggtccagctgaaacgcatgacctcgtgggtcctgaactgacctctggtcacaacacccagggcctggttctcccattgggtaaatcttcagaggaacggatggagaggaacgcagtggctgcttttctgctgatgctgcggaacttccttcagggtcacatggtgaaccaagagagcctggtgcagtgccaggggcctgccatcatcggggccctcctgcgaaaggtcccaagctgggccatggacatgaacgtgctcatgtccgcccagctgctgatggagcaggtggcagctgagggcagcgggcccctcctgtacctactctaccagcatttgctcttcaactttcacctctggaccctcagtgacttcgccgtgcgcctcggtcacatccagtacatgtccagcatagttcgggagcacagacagaagctgcggaagaagtacggcgtccagtttatcttggatgctctgcgcacccactacagcccgcagcgggagcgccccctggctgctgacgacctacgcaccgtgcagacctccctcctgggcctggcgagggagttcctggtgcggagtctctcagcagatgacgtgcaggtcacgcagaccatgctgagctttttggcggccacaggcgatgacggtcaggcggtgggtgcgctggacctgctgctggccctgctgcacggttccctggtgcaggagtccttggctgtctttctgttggagccagggaacctcgaagtgctactggccctgctagtgcggccagggtcactgcccctgctgcccgatcgagtctgcaagatcctgcgcagactgcagcagaatgagcggctacctgagcggagccgccagcgcctccggctgcgggagtgtggtctccagggtctggttgcctgcttgcctgaggggactgtttccccccagctctgccagggcctctacaagctgttcctgggggcagattgcctgaacctctcagatctgctggctgtggtacagctgtccctccaggctgacctcagcgttcgcctagacatctgtcgccagcttttccacctcatctacggacagccagatgtagtgcggcttctggcccgacaggctggctggcaagatgtgctgacccggctatatgtcctggaggctgccacagccggcagcccccctccgtcttccccagagtcacctacctcccccaagccagccccacccaagccacccactgagtcacctgctgagccttcagatgtcttcctgccctcagaggccccctgccctgaccctgatggcttttaccatgctctctccccattctgcacgccctttgacctgggcctggaacggtctagtgtaggatcaggcaacactgctggtggtggcggcagcagtgggactcttactccagccagccagcccggcactccttcgccactggatgggccgcggccctttcctgctgctcctggccgccacagctccagtctctccaatgtgctggaggacggcagcctcccggagcccaccattagcggggatgatacctcgaacaccagcaacccacagcaaacctctgaggaagagttgtgcaatctgctcaccaacgtgctgttctcggtgacgtggcgtggcgtggaaggcagcgatgaggctgcctggcgggagcgtggccaggttttctcagtgctcacccagctgggggcctcagccacacttgtgcgcccaccagactgcatcaagcgcagcctcctggagatgatgctggagtcagccctgaccgacatcaaagaggcccccgtgggggtcctggccagcctcacccagcaagcgctttggctgctgcgtctgctgcaggacttcctgtgtgctgaaggccatggtaaccaggaactgtggagtgagaagctctttgaaggtgtatgcagcctacttgatcgcctgggagcctggccccacctggccaacggcacagctgatctccgtgagatggcgcagattggcctacggcttgtacttggctacatcctgctggaagacccacagctgcatgcccaggcctacgtgagattgcacatgctgctacagactgcagtgccagcccgccgcgaggaggcctgctatgtgctctccaagctggaggctgcactggggcgggtgctgaacacctcttccttggagtcagccactgatgaggcagggtccccacttgcagctgcagcagctgcagcagctgcagagcgctgctcctggctggtgccactggtgcgcacgctgctagaccgtgcctatgagccgctggggctgcagtggggactgccctccctgccacccaccaatggcagccccaccttctttgaagacttccaggctttttgtgccacacccgaatggcgccacttcatcgacaaacaggtacagccaaccatgtcccagttcgaaatggacacgtatgctaagagccacgaccttatgtcaggtttctggaatgcctgctatgacatgcttatgagcagtgggcagcggcgccagtgggagcgcgcccagagtcgtcgggccttccaggagctggtgctggaacctgcgcagaggcgggcgcgcctggaggggctacgctacacggcagtgctgaagcagcaggcaacgcagcactccatggccctgctgcactggggggcgctgtggcgccagctcgccagcccatgtggggcctgggcgctgagggacactcccatcccccgctggaaactgtccagcgccgagacatattcacgcatgcgtctgaagctggtgcccaaccatcacttcgaccctcacctggaagccagcgctctccgagacaatctgggtgaggttcccctgacacccaccgaggaggcctcactgcctctggcagtgaccaaagaggccaaagtgagcaccccacccgagttgctgcaggaggaccagctcggcgaggacgagctggctgagctggagaccccgatggaggcagcagaactggatgagcagcgtgagaagctggtgctgtcggccgagtgccagctggtgacggtagtggccgtggtcccagggctgctggaggtcaccacacagaatgtatacttctacgatggcagcactgagcgcgtggaaaccgaggagggcatcggctatgatttccggcgcccactggcccagctgcgtgaggtccacctgcggcgtttcaacctgcgccgttcagcacttgagctcttctttatcgatcaggccaactacttcctcaacttcccatgcaaggtgggcacgaccccagtctcatctcctagccagactcccagaccccagcctggccccatcccaccccatacccaggtacggaaccaggtgtactcgtggctcctgcgcctacggcccccctctcaaggctacctaagcagccgctccccccaggagatgctgcgtgcctcaggccttacccagaaatgggtacagcgtgagatatccaacttcgagtacttgatgcaactcaacaccattgcggggcggacctacaatgacctgtctcagtaccctgtggtatgaaagctttgaggacccagcagggaccattgacaagttccactatggcacccactactccaatgcagcaggcgtgatgcactacctcatccgcgtggagcccttcacctccctgcacgtccagctgcaaagtggccgctttgactgctccgaccggcagttccactcggtggcggcagcctggcaggcacgcctggagagccctgccgatgtgaaggagctcatcccggaattcttctactttcctgacttcctggagaaccagaacggttttgacctgggctgtctccagctgaccaacgagaaggtaggcgatgtggtgctacccccgtgggccagctctcctgaggacttcatccagcagcaccgccaggctctggagtcggagtatgtgtctgcacacctacacgagtggatcgacctcatctttggctacaagcagcgggggccagccgccgaggaggccctcaatgtcttctattactgcacctatgagggggctgtagacctggaccatgtgacagatgagcgggaacggaaggctctggagggcattatcagcaactttgggcagactccctgtcagctgctgaaggagccacatccaactcggctctcagctgaggaagcagcccatcgccttgcacgcctggacactaactcacctagcatcttccagcacctggacgaactcaaggcattcttcgcagaggttgtcagtgatggtgtacccctggtgctagccctggtcccccaccggcagccccactccttcatcacccagggttccccagacctgttggtgactgtgagtgccagtgggctgctgggcacccacagctggttgccctatgaccgcaacataagcaactacttcagcttcagcaaagaccccaccatgggcagccacaagacgcagcgactgctgagtggcccgtgggtgccaggcagtggtgtgagtggacaagcactggcagtggccccggatggaaagctgctattcagcggtggccactgggatggcagcctgcgggtgactgcactaccccgtggcaagctgttgagccagctcagctgccaccttgatgtagtaacctgccttgcactggacacctgtggcatctacctcatctcaggctcccgggacaccacgtgcatggtgtggcggctcctgcatcagggtggtctgtcagtaggcctggcaccaaagcctgtgcaggtcctgtatgggcatggggctgcagtgagctgtgtggccatcagcactgaacttgacatggctgtgtctggatctgaggatggaactgtgatcatacacactgtacgccgcggacagtttgtagcggcactacggcctctgggtgccacattccctggacctattttccacctggcattggggtccgaaggccagattgtggtacagagctcagcgtgggaacgtcctggggcccaggtcacctactccttgcacctgtattcagtcaatgggaagttgcgggcttcactgcccctggcagagcagcctacagccctgacggtgacagaggactttgtgttgctgggcaccgcccagtgcgccctgcacatcctccaactaaacacactgctcccggccgcgcctcccttgcccatgaaggtggccatccgcagcgtggccgtgaccaaggagcgcagccacgtgctggtgggcctggaggatggcaagctcatcgtggtggtcgcggggcagccctctgaggtgcgcagcagccagttcgcgcggaagctgtggcggtcctcgcggcgcatctcccaggtgtcctcgggagagacggaatacaaccctactgaggcgcgctgaacctggccagtccggctgctcgggccccgcccccggcaggcctggcccgggaggccccgcccagaagtcggcgggaacaccccggggtgggcagcccaggggggtgagcggggcccaccctgcccagctcagggattggcgggcgatgttaccccctcagggattggcgggcggaagtcccgcccctcgccggctgaggggccgccctgagggccagcactggcgtctgcggccgcagcagcactttttgcacagtctggggcggggttccccggcttccaagtcgctgtttcgtcaaagcacgagggccgcctgtggccttaattcctaacggcggccccggttctcccttctcggcaataaaccaggcctagttttgtagctgc

SEQ ID NO: 27057 - DNA, 6044 bp, Homo sapiens
  misc_feature (17)..(17): n is a, c, g, or t
ctcggctctaccttgtntcacagagtggagactgggatgaaggatgtggtgaactgcgttgggggtatgggtgccctgctgcccctgctggagcgagtagctgcacagcccaaagaggctgaagcaggtccagctgaaacgcatgacctcgtgggtcctgaactgacctctggtcacaacacccagggcctggttctcccattgggtaaatcttcagaggaacggatggagaggaacgcagtggctgcttttctgctgatgctgcggaacttccttcagggtcacatggtgaaccaagagagcctggtgcagtgccaggggcctgccatcatcggggccctcctgcgaaaggtcccaagctgggccatggacatgaacgtgctcatgtccgcccagctgctgatggagcaggtggcagctgagggcagcgggcccctcctgtacctactctaccagcatttgctcttcaactttcacctctggaccctcagtgacttcgccgtgcgcctcggtcacatccagtacatgtccagcatagttcgggagcacagacagaagctgcggaagaagtacggcgtccagtttatcttggatgctctgcgcacccactacagcccgcagcgggagcgccccctggctgctgacgacctacgcaccgtgcagacctccctcctgggcctggcgagggagttcctggtgcggagtctctcagcagatgacgtgcaggtcacgcagaccatgctgagctttttggcggccacaggcgatgacggtcaggcggtgggtgcgctggacctgctgctggccctgctgcacggttccctggtgcaggagtccttggctgtctttctgttggagccagggaacctcgaagtgctactggccctgctagtgcggccagggtcactgcccctgctgcccgatcgagtctgcaagatcctgcgcagactgcagcagaatgagcggctacctgagcggagccgccagcgcctccggctgcgggagtgtggtctccagggtctggttgcctgcttgcctgaggggactgtttccccccagctctgccagggcctctacaagctgttcctgggggcagattgcctgaacctctcagatctgctggctgtggtacagctgtccctccaggctgacctcagcgttcgcctagacatctgtcgccagcttttccacctcatctacggacagccagatgtagtgcggcttctggcccgacaggctggctggcaagatgtgctgacccggctatatgtcctggaggctgccacagccggcagcccccctccgtcttccccagagtcacctacctcccccaagccagccccacccaagccacccactgagtcacctgctgagccttcagatgtcttcctgccctcagaggccccctgccctgaccctgatggcttttaccatgctctctccccattctgcacgccctttgacctgggcctggaacggtctagtgtaggatcaggcaacactgctggtggtggcggcagcagtgggactcttactccagccagccagcccggcactccttcgccactggatgggccgcggccctttcctgctgctcctggccgccacagctccagtctctccaatgtgctggaggacggcagcctcccggagcccaccattagcggggatgatacctcgaacaccagcaacccacagcaaacctctgaggaagagttgtgcaatctgctcaccaacgtgctgttctcggtgacgtggcgtggcgtggaaggcagcgatgaggctgcctggcgggagcgtggccaggttttctcagtgctcacccagctgggggcctcagccacacttgtgcgcccaccagactgcatcaagcgcagcctcctggagatgatgctggagtcagccctgaccgacatcaaagaggcccccgtgggggtcctggccagcctcacccagcaagcgctttggctgctgcgtctgctgcaggacttcctgtgtgctgaaggccatggtaaccaggaactgtggagtgagaagctctttgaaggtgtatgcagcctacttgatcgcctgggagcctggccccacctggccaacggcacagctgatctccgtgagatggcgcagattggcctacggcttgtacttggctacatcctgctggaagacccacagctgcatgcccaggcctacgtgagattgcacatgctgctacagactgcagtgccagcccgccgcgaggaggcctgctatgtgctctccaagctggaggctgcactggggcgggtgctgaacacctcttccttggagtcagccactgatgaggcagggtccccacttgcagctgcagcagctgcagcagctgcagagcgctgctcctggctggtgccactggtgcgcacgctgctagaccgtgcctatgagccgctggggctgcagtggggactgccctccctgccacccaccaatggcagccccaccttctttgaagacttccaggctttttgtgccacacccgaatggcgccacttcatcgacaaacaggtacagccaaccatgtcccagttcgaaatggacacgtatgctaagagccacgaccttatgtcaggtttctggaatgcctgctatgacatgcttatgagcagtgggcagcggcgccagtgggagcgcgcccagagtcgtcgggccttccaggagctggtgctggaacctgcgcagaggcgggcgcgcctggaggggctacgctacacggcagtgctgaagcagcaggcaacgcagcactccatggccctgctgcactggggggcgctgtggcgccagctcgccagcccatgtggggcctgggcgctgagggacactcccatcccccgctggaaactgtccagcgccgagacatattcacgcatgcgtctgaagctggtgcccaaccatcacttcgaccctcacctggaagccagcgctctccgagacaatctgggtgaggttcccctgacacccaccgaggaggcctcactgcctctggcagtgaccaaagaggccaaagtgagcaccccacccgagttgctgcaggaggaccagctcggcgaggacgagctggctgagctggagaccccgatggaggcagcagaactggatgagcagcgtgagaagctggtgctgtcggccgagtgccagctggtgacggtagtggccgtggtcccagggctgctggaggtcaccacacagaatgtatacttctacgatggcagcactgagcgcgtggaaaccgaggagggcatcggctatgatttccggcgcccactggcccagctgcgtgaggtccacctgcggcgtttcaacctgcgccgttcagcacttgagctcttctttatcgatcaggccaactacttcctcaacttcccatgcaaggtgggcacgaccccagtctcatctcctagccagactcccagaccccagcctggccccatcccaccccatacccaggtacggaaccaggtgtactcgtggctcctgcgcctacggcccccctctcaaggctacctaagcagccgctccccccaggagatgctgcgtgcctcaggccttacccagaaatgggtacagcgtgagatatccaacttcgagtacttgatgcaactcaacaccattgcggggcggacctacaatgacctgtctcagtaccctgtgttcccctgggtcctgcaggactacgtgtccccaaccctggacctcagcaacccagccgtcttccgggacctgtctaagcccatcggtgtggtgaaccccaagcatgcccagctcgtgagggagaagtatgaaagctttgaggacccagcagggaccattgacaagttccactatggcacccactactccaatgcagcaggcgtgatgcactacctcatccgcgtggagcccttcacctccctgcacgtccagctgcaaagtggccgctttgactgctccgaccggcagttccactcggtggcggcagcctggcaggcacgcctggagagccctgccgatgtgaaggagctcatcccggaattcttctactttcctgacttcctggagaaccagaacggttttgacctgggctgtctccagctgaccaacgagaaggtaggcgatgtggtgctacccccgtgggccagctctcctgaggacttcatccagcagcaccgccaggctctggagtcggagtatgtgtctgcacacctacacgagtggatcgacctcatctttggctacaagcagcgggggccagccgccgaggaggccctcaatgtcttctattactgcacctatgagggggctgtagacctggaccatgtgacagatgagcgggaacggaaggctctggagggcattatcagcaactttgggcagactccctgtcagctgctgaaggagccacatccaactcggctctcagctgaggaagcagcccatcgccttgcacgcctggacactaactcacctagcatcttccagcacctggacgaactcaaggcattcttcgcagaggttgtcagtgatggtgtacccctggtgctagccctggtcccccaccggcagccccactccttcatcacccagggttccccagacctgttggtgactgtgagtgccagtgggctgctgggcacccacagctggttgccctatgaccgcaacataagcaactacttcagcttcagcaaagaccccaccatgggcagccacaagacgcagcgactgctgagtggcccgtgggtgccaggcagtggtgtgagtggacaagcactggcagtggccccggatggaaagctgctattcagcggtggccactgggatggcagcctgcgggtgactgcactaccccgtggcaagctgttgagccagctcagctgccaccttgatgtagtaacctgccttgcactggacacctgtggcatctacctcatctcaggctcccgggacaccacgtgcatggtgtggcggctcctgcatcagggtggtctgtcagtaggcctggcaccaaagcctgtgcaggtcctgtatgggcatggggctgcagtgagctgtgtggccatcagcactgaacttgacatggctgtgtctggatctgaggatggaactgtgatcatacacactgtacgccgcggacagtttgtagcggcactacggcctctgggtgccacattccctggacctattttccacctggcattggggtccgaaggccagattgtggtacagagctcagcgtgggaacgtcctggggcccaggtcacctactccttgcacctgtattcagtcaatgggaagttgcgggcttcactgcccctggcagagcagcctacagccctgacggtgacagaggactttgtgttgctgggcaccgcccagtgcgccctgcacatcctccaactaaacacactgctcccggccgcgcctcccttgcccatgaaggtggccatccgcagcgtggccgtgaccaaggagcgcagccacgtgctggtgggcctggaggatggcaagctcatcgtggtggtcgcggggcagccctctgaggtgcgcagcagccagttcgcgcggaagctgtggcggtcctcgcggcgcatctcccaggtgtcctcgggagagacggaatacaaccctactgaggcgcgctgaacctggccagtccggctgctcgggccccgcccccggcaggcctggcccgggaggccccgcccagaagtcggcgggaacaccccggggtgggcagcccaggggggtgagcggggcccaccctgcccagctcagggattggcgggcgatgttaccccctcagggattggcgggcggaagtcccgcccctcgccggctgaggggccgccctgagggccagcactggcgtctgcggccgcagcagcactttttgcacagtctggggcggggttccccggcttccaagtcgctgtttcgtcaaagcacgagggccgcctgtggccttaattcctaacggcggccccggttctcccttctcggcaataaaccaggcctagttttgtagctgc

SEQ ID NO: 27058 - DNA, 5954 bp, Homo sapiens
  misc_feature (17)..(17): n is a, c, g, or t
ctcggctctaccttgtntcacagagtggagactgggatgaaggatgtggtgaactgcgttgggggtatgggtgccctgctgcccctgctggagcgagtagctgcacagcccaaagaggctgaagcaggtccagctgaaacgcatgacctcgtgggtcctgaactgacctctggtcacaacacccagggcctggttctcccattgggtaaatcttcagaggaacggatggagaggaacgcagtggctgcttttctgctgatgctgcggaacttccttcagggtcacatggtgaaccaagagagcctggtgcagtgccaggggcctgccatcatcggggccctcctgcgaaaggtcccaagctgggccatggacatgaacgtgctcatgtccgcccagctgctgatggagcaggtggcagctgagggcagcgggcccctcctgtacctactctaccagcatttgctcttcaactttcacctctggaccctcagtgacttcgccgtgcgcctcggtcacatccagtacatgtccagcatagttcgggagcacagacagaagctgcggaagaagtacggcgtccagtttatcttggatgctctgcgcacccactacagcccgcagcgggagcgccccctggctgctgacgacctacgcaccgtgcagacctccctcctgggcctggcgagggagttcctggtgcggagtctctcagcagatgacgtgcaggtcacgcagaccatgctgagctttttggcggccacaggcgatgacggtcaggcggtgggtgcgctggacctgctgctggccctgctgcacggttccctggtgcaggagtccttggctgtctttctgttggagccagggaacctcgaagtgctactggccctgctagtgcggccagggtcactgcccctgctgcccgatcgagtctgcaagatcctgcgcagactgcagcagaatgagcggctacctgagcggagccgccagcgcctccggctgcgggagtgtggtctccagggtctggttgcctgcttgcctgaggggactgtttccccccagctctgccagggcctctacaagctgttcctgggggcagattgcctgaacctctcagatctgctggctgtggtacagctgtccctccaggctgacctcagcgttcgcctagacatctgtcgccagcttttccacctcatctacggacagccagatgtagtgcggcttctggcccgacaggctggctggcaagatgtgctgacccggctatatgtcctggaggctgccacagccggcagcccccctccgtcttccccagagtcacctacctcccccaagccagccccacccaagccacccactgagtcacctgctgagccttcagatgtcttcctgccctcagaggccccctgccctgaccctgatggcttttaccatgctctctccccattctgcacgccctttgacctgggcctggaacggtctagtgtaggatcaggcaacactgctggtggtggcggcagcagtgggactcttactccagccagccagcccggcactccttcgccactggatgggccgcggccctttcctgctgctcctggccgccacagctccagtctctccaatgtgctggaggacggcagcctcccggagcccaccattagcggggatgatacctcgaacaccagcaacccacagcaaacctctgaggaagagttgtgcaatctgctcaccaacgtgctgttctcggtgacgtggcgtggcgtggaaggcagcgatgaggctgcctggcgggagcgtggccaggttttctcagtgctcacccagctgggggcctcagccacacttgtgcgcccaccagactgcatcaagcgcagcctcctggagatgatgctggagtcagccctgaccgacatcaaagaggcccccgtgggggtcctggccagcctcacccagcaagcgctttggctgctgcgtctgctgcaggacttcctgtgtgctgaaggccatggtaaccaggaactgtggagtgagaagctctttgaaggtgtatgcagcctacttgatcgcctgggagcctggccccacctggccaacggcacagctgatctccgtgagatggcgcagattggcctacggcttgtacttggctacatcctgctggaagacccacagctgcatgcccaggcctacgtgagattgcacatgctgctacagactgcagtgccagcccgccgcgaggaggcctgctatgtgctctccaagctggaggctgcactggggcgggtgctgaacacctcttccttggagtcagccactgatgaggcagggtccccacttgcagctgcagcagctgcagcagctgcagagcgctgctcctggctggtgccactggtgcgcacgctgctagaccgtgcctatgagccgctggggctgcagtggggactgccctccctgccacccaccaatggcagccccaccttctttgaagacttccaggctttttgtgccacacccgaatggcgccacttcatcgacaaacaggtacagccaaccatgtcccagttcgaaatggacacgtatgctaagagccacgaccttatgtcaggtttctggaatgcctgctatgacatgcttatgagcagtgggcagcggcgccagtgggagcgcgcccagagtcgtcgggccttccaggagctggtgctggaacctgcgcagaggcgggcgcgcctggaggggctacgctacacggcagtgctgaagcagcaggcaacgcagcactccatggccctgctgcactggggggcgctgtggcgccagctcgccagcccatgtggggcctgggcgctgagggacactcccatcccccgctggaaactgtccagcgccgagacatattcacgcatgcgtctgaagctggtgcccaaccatcacttcgaccctcacctggaagccagcgctctccgagacaatctgggtgaggttcccctgacacccaccgaggaggcctcactgcctctggcagtgaccaaagaggccaaagtgagcaccccacccgagttgctgcaggaggaccagctcggcgaggacgagctggctgagctggagaccccgatggaggcagcagaactggatgagcagcgtgagaagctggtgctgtcggccgagtgccagctggtgacggtagtggccgtggtcccagggctgctggaggtcaccacacagaatgtatacttctacgatggcagcactgagcgcgtggaaaccgaggagggcatcggctatgatttccggcgcccactggcccagctgcgtgaggtccacctgcggcgtttcaacctgcgccgttcagcacttgagctcttctttatcgatcaggccaactacttcctcaacttcccatgcaaggtgggcacgaccccagtctcatctcctagccagactcccagaccccagcctggccccatcccaccccatacccaggtacggaaccaggtgtactcgtggctcctgcgcctacggcccccctctcaaggctacctaagcagccgctccccccaggagatgctgcgtgcctcaggccttacccagaaatgggtacagcgtgagatatccaacttcgagtacttgatgcaactcaacaccattgcggggcggacctacaatgacctgtctcagtaccctgtgttcccctgggtcctgcaggactacgtgtccccaaccctggacctcagcaacccagccgtcttccgggacctgtctaagcccatcggtgtggtgaaccccaagcatgcccagctcgtgagggagaagtatgaaagctttgaggacccagcagggaccattgacaagttccactatggcacccactactccaatgcagcaggcgtgatgcactacctcatccgcgtggagcccttcacctccctgcacgtccagctgcaaagtggccgctttgactgctccgaccggcagttccactcggtggcggcagcctggcaggcacgcctggagagccctgccgatgtgaaggagctcatcccggaattcttctactttcctgacttcctggagaaccagaacggttttgacctgggctgtctccagctgaccaacgagaaggtaggcgatgtggtgctacccccgtgggccagctctcctgaggacttcatccagcagcaccgccaggctctggagtcggagtatgtgtctgcacacctacacgagtggatcgacctcatctttggctacaagcagcgggggccagccgccgaggaggccctcaatgtcttctattactgcacctatgagggggctgtagacctggaccatgtgacagatgagcgggaacggaaggctctggagggcattatcagcaactttgggcagactccctgtcagctgctgaaggagccacatccaactcggctctcagctgaggaagcagcccatcgccttgcacgcctggacactaactcacctagcatcttccagcacctggacgaactcaaggcattcttcgcagaggtgactgtgagtgccagtgggctgctgggcacccacagctggttgccctatgaccgcaacataagcaactacttcagcttcagcaaagaccccaccatgggcagccacaagacgcagcgactgctgagtggcccgtgggtgccaggcagtggtgtgagtggacaagcactggcagtggccccggatggaaagctgctattcagcggtggccactgggatggcagcctgcgggtgactgcactaccccgtggcaagctgttgagccagctcagctgccaccttgatgtagtaacctgccttgcactggacacctgtggcatctacctcatctcaggctcccgggacaccacgtgcatggtgtggcggctcctgcatcagggtggtctgtcagtaggcctggcaccaaagcctgtgcaggtcctgtatgggcatggggctgcagtgagctgtgtggccatcagcactgaacttgacatggctgtgtctggatctgaggatggaactgtgatcatacacactgtacgccgcggacagtttgtagcggcactacggcctctgggtgccacattccctggacctattttccacctggcattggggtccgaaggccagattgtggtacagagctcagcgtgggaacgtcctggggcccaggtcacctactccttgcacctgtattcagtcaatgggaagttgcgggcttcactgcccctggcagagcagcctacagccctgacggtgacagaggactttgtgttgctgggcaccgcccagtgcgccctgcacatcctccaactaaacacactgctcccggccgcgcctcccttgcccatgaaggtggccatccgcagcgtggccgtgaccaaggagcgcagccacgtgctggtgggcctggaggatggcaagctcatcgtggtggtcgcggggcagccctctgaggtgcgcagcagccagttcgcgcggaagctgtggcggtcctcgcggcgcatctcccaggtgtcctcgggagagacggaatacaaccctactgaggcgcgctgaacctggccagtccggctgctcgggccccgcccccggcaggcctggcccgggaggccccgcccagaagtcggcgggaacaccccggggtgggcagcccaggggggtgagcggggcccaccctgcccagctcagggattggcgggcgatgttaccccctcagggattggcgggcggaagtcccgcccctcgccggctgaggggccgccctgagggccagcactggcgtctgcggccgcagcagcactttttgcacagtctggggcggggttccccggcttccaagtcgctgtttcgtcaaagcacgagggccgcctgtggccttaattcctaacggcggccccggttctcccttctcggcaataaaccaggcctagttttgtagctgc

SEQ ID NO: 27059 - DNA, 6129 bp, Homo sapiens
  misc_feature (17)..(17): n is a, c, g, or t
ctcggctctaccttgtntcacagagtggagactgggatgaaggatgtggtgaactgcgttgggggtatgggtgccctgctgcccctgctggagcgagtagctgcacagcccaaagaggctgaagcaggtccagctgaaacgcatgacctcgtgggtcctgaactgacctctggtcacaacacccagggcctggttctcccattgggtaaatcttcagaggaacggatggagaggaacgcagtggctgcttttctgctgatgctgcggaacttccttcagggtcacatggtgaaccaagagagcctggtgcagtgccaggggcctgccatcatcggggccctcctgcgaaaggtcccaagctgggccatggacatgaacgtgctcatgtccgcccagctgctgatggagcaggtggcagctgagggcagcgggcccctcctgtacctactctaccagcatttgctcttcaactttcacctctggaccctcagtgacttcgccgtgcgcctcggtcacatccagtacatgtccagcatagttcgggagcacagacagaagctgcggaagaagtacggcgtccagtttatcttggatgctctgcgcacccactacagcccgcagcgggagcgccccctggctgctgacgacctacgcaccgtgcagacctccctcctgggcctggcgagggagttcctggtgcggagtctctcagcagatgacgtgcaggtcacgcagaccatgctgagctttttggcggccacaggcgatgacggtcaggcggtgggtgcgctggacctgctgctggccctgctgcacggttccctggtgcaggagtccttggctgtctttctgttggagccagggaacctcgaagtgctactggccctgctagtgcggccagggtcactgcccctgctgcccgatcgagtctgcaagatcctgcgcagactgcagcagaatgagcggctacctgagcggagccgccagcgcctccggctgcgggagtgtggtctccagggtctggttgcctgcttgcctgaggggactgtttccccccagctctgccagggcctctacaagctgttcctgggggcagattgcctgaacctctcagatctgctggctgtggtacagctgtccctccaggctgacctcagcgttcgcctagacatctgtcgccagcttttccacctcatctacggacagccagatgtagtgcggcttctggcccgacaggctggctggcaagatgtgctgacccggctatatgtcctggaggctgccacagccggcagcccccctccgtcttccccagagtcacctacctcccccaagccagccccacccaagccacccactgagtcacctgctgagccttcagatgtcttcctgccctcagaggccccctgccctgaccctgatggcttttaccatgctctctccccattctgcacgccctttgacctgggcctggaacggtctagtgtaggatcaggcaacactgctggtggtggcggcagcagtgggactcttactccagccagccagcccggcactccttcgccactggatgggccgcggccctttcctgctgctcctggccgccacagctccagtctctccaatgtgctggaggacggcagcctcccggagcccaccattagcggggatgatacctcgaacaccagcaacccacagcaaacctctgaggaagagttgtgcaatctgctcaccaacgtgctgttctcggtgacgtggcgtggcgtggaaggcagcgatgaggctgcctggcgggagcgtggccaggttttctcagtgctcacccagctgggggcctcagccacacttgtgcgcccaccagactgcatcaagcgcagcctcctggagatgatgctggagtcagccctgaccgacatcaaagaggcccccgtgggggtcctggccagcctcacccagcaagcgctttggctgctgcgtctgctgcaggacttcctgtgtgctgaaggccatggtaaccaggaactgtggagtgagaagctctttgaaggtgtatgcagcctacttgatcgcctgggagcctggccccacctggccaacggcacagctgatctccgtgagatggcgcagattggcctacggcttgtacttggctacatcctgctggaagacccacagctgcatgcccaggcctacgtgagattgcacatgctgctacagactgcagtgccagcccgccgcgaggaggcctgctatgtgctctccaagctggaggctgcactggggcgggtgctgaacacctcttccttggagtcagccactgatgaggcagggtccccacttgcagctgcagcagctgcagcagctgcagagcgctgctcctggctggtgccactggtgcgcacgctgctagaccgtgcctatgagccgctggggctgcagtggggactgccctccctgccacccaccaatggcagccccaccttctttgaagacttccaggctttttgtgccacacccgaatggcgccacttcatcgacaaacaggtacagccaaccatgtcccagttcgaaatggacacgtatgctaagagccacgaccttatgtcaggtttctggaatgcctgctatgacatgcttatgagcagtgggcagcggcgccagtgggagcgcgcccagagtcgtcgggccttccaggagctggtgctggaacctgcgcagaggcgggcgcgcctggaggggctacgctacacggcagtgctgaagcagcaggcaacgcagcactccatggccctgctgcactggggggcgctgtggcgccagctcgccagcccatgtggggcctgggcgctgagggacactcccatcccccgctggaaactgtccagcgccgagacatattcacgcatgcgtctgaagctggtgcccaaccatcacttcgaccctcacctggaagccagcgctctccgagacaatctgggtgaggttcccctgacacccaccgaggaggcctcactgcctctggcagtgaccaaagaggccaaagtgagcaccccacccgagttgctgcaggaggaccagctcggcgaggacgagctggctgagctggagaccccgatggaggcagcagaactggatgagcagcgtgagaagctggtgctgtcggccgagtgccagctggtgacggtagtggccgtggtcccagggctgctggaggtcaccacacagaatgtatacttctacgatggcagcactgagcgcgtggaaaccgaggagggcatcggctatgatttccggcgcccactggcccagctgcgtgaggtccacctgcggcgtttcaacctgcgccgttcagcacttgagctcttctttatcgatcaggccaactacttcctcaacttcccatgcaaggtgggcacgaccccagtctcatctcctagccagactcccagaccccagcctggccccatcccaccccatacccaggtacggaaccaggtgtactcgtggctcctgcgcctacggcccccctctcaaggctacctaagcagccgctccccccaggagatgctgcgtgcctcaggccttacccagaaatgggtacagcgtgagatatccaacttcgagtacttgatgcaactcaacaccattgcggggcggacctacaatgacctgtctcagtaccctgtgttcccctgggtcctgcaggactacgtgtccccaaccctggacctcagcaacccagccgtcttccgggacctgtctaagcccatcggtgtggtgaaccccaagcatgcccagctcgtgagggagaagtatgaaagctttgaggacccagcagggaccattgacaagttccactatggcacccactactccaatgcagcaggcgtgatgcactacctcatccgcgtggagcccttcacctccctgcacgtccagctgcaaagtggccgctttgactgctccgaccggcagttccactcggtggcggcagcctggcaggcacgcctggagagccctgccgatgtgaaggagctcatcccggaattcttctactttcctgacttcctggagaaccagaacggttttgacctgggctgtctccagctgaccaacgagaaggtaggcgatgtggtgctacccccgtgggccagctctcctgaggacttcatccagcagcaccgccaggctctggagtcggagtatgtgtctgcacacctacacgagtggatcgacctcatctttggctacaagcagcgggggccagccgccgaggaggccctcaatgtcttctattactgcacctatgagggggctgtagacctggaccatgtgacagatgagcgggaacggaaggctctggagggcattatcagcaactttgggcagactccctgtcagctgctgaaggagccacatccaactcggctctcagctgaggaagcagcccatcgccttgcacgcctggacactaactcacctagcatcttccagcacctggacgaactcaaggcattcttcgcagaggttgtcagtgatggtgtacccctggtgctagccctggtcccccaccggcagccccactccttcatcacccagggttccccagacctgttggtaagtgcattgtgcagagccccagctcagctccactcccccttgcctctgccagaaacccacctctgccccctcctgcctgcaggtgactgtgagtgccagtgggctgctgggcacccacagctggttgccctatgaccgcaacataagcaactacttcagcttcagcaaagaccccaccatgggcagccacaagacgcagcgactgctgagtggcccgtgggtgccaggcagtggtgtgagtggacaagcactggcagtggccccggatggaaagctgctattcagcggtggccactgggatggcagcctgcgggtgactgcactaccccgtggcaagctgttgagccagctcagctgccaccttgatgtagtaacctgccttgcactggacacctgtggcatctacctcatctcaggctcccgggacaccacgtgcatggtgtggcggctcctgcatcagggtggtctgtcagtaggcctggcaccaaagcctgtgcaggtcctgtatgggcatggggctgcagtgagctgtgtggccatcagcactgaacttgacatggctgtgtctggatctgaggatggaactgtgatcatacacactgtacgccgcggacagtttgtagcggcactacggcctctgggtgccacattccctggacctattttccacctggcattggggtccgaaggccagattgtggtacagagctcagcgtgggaacgtcctggggcccaggtcacctactccttgcacctgtattcagtcaatgggaagttgcgggcttcactgcccctggcagagcagcctacagccctgacggtgacagaggactttgtgttgctgggcaccgcccagtgcgccctgcacatcctccaactaaacacactgctcccggccgcgcctcccttgcccatgaaggtggccatccgcagcgtggccgtgaccaaggagcgcagccacgtgctggtgggcctggaggatggcaagctcatcgtggtggtcgcggggcagccctctgaggtgcgcagcagccagttcgcgcggaagctgtggcggtcctcgcggcgcatctcccaggtgtcctcgggagagacggaatacaaccctactgaggcgcgctgaacctggccagtccggctgctcgggccccgcccccggcaggcctggcccgggaggccccgcccagaagtcggcgggaacaccccggggtgggcagcccaggggggtgagcggggcccaccctgcccagctcagggattggcgggcgatgttaccccctcagggattggcgggcggaagtcccgcccctcgccggctgaggggccgccctgagggccagcactggcgtctgcggccgcagcagcactttttgcacagtctggggcggggttccccggcttccaagtcgctgtttcgtcaaagcacgagggccgcctgtggccttaattcctaacggcggccccggttctcccttctcggcaataaaccaggcctagttttgtagctgc

SEQ ID NO: 27060 - DNA, 6303 bp, Homo sapiens
  misc_feature (17)..(17): n is a, c, g, or t
ctcggctctaccttgtntcacagagtggagactgggatgaaggatgtggtgaactgcgttgggggtatgggtgccctgctgcccctgctggagcgagtagctgcacagcccaaagaggctgaagcaggtccagctgaaacgcatgacctcgtgggtcctgaactgacctctggtcacaacacccagggcctggttctcccattgggtaaatcttcagaggaacggatggagaggaacgcagtggctgcttttctgctgatgctgcggaacttccttcagggtcacatggtgaaccaagagagcctggtgcagtgccaggggcctgccatcatcggggccctcctgcgaaaggtcccaagctgggccatggacatgaacgtgctcatgtccgcccagctgctgatggagcaggtggcagctgagggcagcgggcccctcctgtacctactctaccagcatttgctcttcaactttcacctctggaccctcagtgacttcgccgtgcgcctcggtcacatccagtacatgtccagcatagttcgggagcacagacagaagctgcggaagaagtacggcgtccagtttatcttggatgctctgcgcacccactacagcccgcagcgggagcgccccctggctgctgacgacctacgcaccgtgcagacctccctcctgggcctggcgagggagttcctggtgcggagtctctcagcagatgacgtgcaggtcacgcagaccatgctgagctttttggcggccacaggcgatgacggtcaggcggtgggtgcgctggacctgctgctggccctgctgcacggttccctggtgcaggagtccttggctgtctttctgttggagccagggaacctcgaagtgctactggccctgctagtgcggccagggtcactgcccctgctgcccgatcgagtctgcaagatcctgcgcagactgcagcagaatgagcggctacctgagcggagccgccagcgcctccggctgcgggagtgtggtctccagggtctggttgcctgcttgcctgaggggactgtttccccccagctctgccagggcctctacaagctgttcctgggggcagattgcctgaacctctcagatctgctggctgtggtacagctgtccctccaggctgacctcagcgttcgcctagacatctgtcgccagcttttccacctcatctacggacagccagatgtagtgcggcttctggcccgacaggctggctggcaagatgtgctgacccggctatatgtcctggaggctgccacagccggcagcccccctccgtcttccccagagtcacctacctcccccaagccagccccacccaagccacccactgagtcacctgctgagccttcagatgtcttcctgccctcagaggccccctgccctgaccctgatggcttttaccatgctctctccccattctgcacgccctttgacctgggcctggaacggtctagtgtaggatcaggcaacactgctggtggtggcggcagcagtgggactcttactccagccagccagcccggcactccttcgccactggatgggccgcggccctttcctgctgctcctggccgccacagctccagtctctccaatgtgctggaggacggcagcctcccggagcccaccattagcggggatgatacctcgaacaccagcaacccacagcaaacctctgaggaagagttgtgcaatctgctcaccaacgtgctgttctcggtgacgtggcgtggcgtggaaggcagcgatgaggctgcctggcgggagcgtggccaggttttctcagtgctcacccagctgggggcctcagccacacttgtgcgcccaccagactgcatcaagcgcagcctcctggagatgatgctggagtcagccctgaccgacatcaaagaggcccccgtgggggtcctggccagcctcacccagcaagcgctttggctgctgcgtctgctgcaggacttcctgtgtgctgaaggccatggtaaccaggaactgtggagtgagaagctctttgaaggtgtatgcagcctacttgatcgcctgggagcctggccccacctggccaacggcacagctgatctccgtgagatggcgcagattggcctacggcttgtacttggctacatcctgctggaagacccacagctgcatgcccaggcctacgtgagattgcacatgctgctacagactgcagtgccagcccgccgcgaggaggcctgctatgtgctctccaagctggaggctgcactggggcgggtgctgaacacctcttccttggagtcagccactgatgaggcagggtccccacttgcagctgcagcagctgcagcagctgcagagcgctgctcctggctggtgccactggtgcgcacgctgctagaccgtgcctatgagccgctggggctgcagtggggactgccctccctgccacccaccaatggcagccccaccttctttgaagacttccaggctttttgtgccacacccgaatggcgccacttcatcgacaaacaggtacagccaaccatgtcccagttcgaaatggacacgtatgctaagagccacgaccttatgtcaggtttctggaatgcctgctatgacatgcttatgagcagtgggcagcggcgccagtgggagcgcgcccagagtcgtcgggccttccaggagctggtgctggaacctgcgcagaggcgggcgcgcctggaggggctacgctacacggcagtgctgaagcagcaggcaacgcagcactccatggccctgctgcactggggggcgctgtggcgccagctcgccagcccatgtggggcctgggcgctgagggacactcccatcccccgctggaaactgtccagcgccgagacatattcacgcatgcgtctgaagctggtgcccaaccatcacttcgaccctcacctggaagccagcgctctccgagacaatctgggtgaggttcccctgacacccaccgaggaggcctcactgcctctggcagtgaccaaagaggccaaagtgagcaccccacccgagttgctgcaggaggaccagctcggcgaggacgagctggctgagctggagaccccgatggaggcagcagaactggatgagcagcgtgagaagctggtgctgtcggccgagtgccagctggtgacggtagtggccgtggtcccagggctgctggaggtcaccacacagaatgtatacttctacgatggcagcactgagcgcgtggaaaccgaggagggcatcggctatgatttccggcgcccactggcccagctgcgtgaggtccacctgcggcgtttcaacctgcgccgttcagcacttgagctcttctttatcgatcaggccaactacttcctcaacttcccatgcaaggtgggcacgaccccagtctcatctcctagccagactcccagaccccagcctggccccatcccaccccatacccaggtacggaaccaggtgtactcgtggctcctgcgcctacggcccccctctcaaggctacctaagcagccgctccccccaggagatgctgcgtgcctcaggccttacccagaaatgggtacagcgtgagatatccaacttcgagtacttgatgcaactcaacaccattgcggggcggacctacaatgacctgtctcagtaccctgtgttcccctgggtcctgcaggactacgtgtccccaaccctggacctcagcaacccagccgtcttccgggacctgtctaagcccatcggtgtggtgaaccccaagcatgcccagctcgtgagggagaagtatgaaagctttgaggacccagcagggaccattgacaagttccactatggcacccactactccaatgcagcaggcgtgatgcactacctcatccgcgtggagcccttcacctccctgcacgtccagctgcaaagtggccgctttgactgctccgaccggcagttccactcggtggcggcagcctggcaggcacgcctggagagccctgccgatgtgaaggagctcatcccggaattcttctactttcctgacttcctggagaaccagaacggttttgacctgggctgtctccagctgaccaacgagaaggtaggcgatgtggtgctacccccgtgggccagctctcctgaggacttcatccagcagcaccgccaggctctggagtcggagtatgtgtctgcacacctacacgagtggatcgacctcatctttggctacaagcagcgggggccagccgccgaggaggccctcaatgtcttctattactgcacctatgagggggctgtagacctggaccatgtgacagatgagcgggaacggaaggctctggagggcattatcagcaactttgggcagactccctgtcagctgctgaaggagccacatccaactcggctctcagctgaggaagcagcccatcgccttgcacgcctggacactaactcacctagcatcttccagcacctggacgaactcaaggcattcttcgcagaggttgtcagtgatggtgtacccctggtgctagccctggtcccccaccggcagccccactccttcatcacccagggttccccagacctgttggtaagtgcattgtgcagagccccagctcagctccactcccccttgcctctgccagaaacccacctctgccccctcctgcctgcaggtgactgtgagtgccagtgggctgctgggcacccacagctggttgccctatgaccgcaacataagcaactacttcagcttcagcaaagaccccaccatgggcagccacaagtaggacagagggctgtgggtggggtgggctacaaatgccctgcacccggaattattcccctccctaatcagaatgtaggccagctgcaggggaaaggtctggccaggctccctgagggcctgggtctcttccatgtggcctggcctcacttgctatccccctcactgggtcaggacgcagcgactgctgagtggcccgtgggtgccaggcagtggtgtgagtggacaagcactggcagtggccccggatggaaagctgctattcagcggtggccactgggatggcagcctgcgggtgactgcactaccccgtggcaagctgttgagccagctcagctgccaccttgatgtagtaacctgccttgcactggacacctgtggcatctacctcatctcaggctcccgggacaccacgtgcatggtgtggcggctcctgcatcagggtggtctgtcagtaggcctggcaccaaagcctgtgcaggtcctgtatgggcatggggctgcagtgagctgtgtggccatcagcactgaacttgacatggctgtgtctggatctgaggatggaactgtgatcatacacactgtacgccgcggacagtttgtagcggcactacggcctctgggtgccacattccctggacctattttccacctggcattggggtccgaaggccagattgtggtacagagctcagcgtgggaacgtcctggggcccaggtcacctactccttgcacctgtattcagtcaatgggaagttgcgggcttcactgcccctggcagagcagcctacagccctgacggtgacagaggactttgtgttgctgggcaccgcccagtgcgccctgcacatcctccaactaaacacactgctcccggccgcgcctcccttgcccatgaaggtggccatccgcagcgtggccgtgaccaaggagcgcagccacgtgctggtgggcctggaggatggcaagctcatcgtggtggtcgcggggcagccctctgaggtgcgcagcagccagttcgcgcggaagctgtggcggtcctcgcggcgcatctcccaggtgtcctcgggagagacggaatacaaccctactgaggcgcgctgaacctggccagtccggctgctcgggccccgcccccggcaggcctggcccgggaggccccgcccagaagtcggcgggaacaccccggggtgggcagcccaggggggtgagcggggcccaccctgcccagctcagggattggcgggcgatgttaccccctcagggattggcgggcggaagtcccgcccctcgccggctgaggggccgccctgagggccagcactggcgtctgcggccgcagcagcactttttgcacagtctggggcggggttccccggcttccaagtcgctgtttcgtcaaagcacgagggccgcctgtggccttaattcctaacggcggccccggttctcccttctcggcaataaaccaggcctagttttgtagctgc

SEQ ID NO: 27061 - DNA, 6203 bp, Homo sapiens
  misc_feature (17)..(17): n is a, c, g, or t
ctcggctctaccttgtntcacagagtggagactgggatgaaggatgtggtgaactgcgttgggggtatgggtgccctgctgcccctgctggagcgagtagctgcacagcccaaagaggctgaagcaggtccagctgaaacgcatgacctcgtgggtcctgaactgacctctggtcacaacacccagggcctggttctcccattgggtaaatcttcagaggaacggatggagaggaacgcagtggctgcttttctgctgatgctgcggaacttccttcagggtcacatggtgaaccaagagagcctggtgcagtgccaggggcctgccatcatcggggccctcctgcgaaaggtcccaagctgggccatggacatgaacgtgctcatgtccgcccagctgctgatggagcaggtggcagctgagggcagcgggcccctcctgtacctactctaccagcatttgctcttcaactttcacctctggaccctcagtgacttcgccgtgcgcctcggtcacatccagtacatgtccagcatagttcgggagcacagacagaagctgcggaagaagtacggcgtccagtttatcttggatgctctgcgcacccactacagcccgcagcgggagcgccccctggctgctgacgacctacgcaccgtgcagacctccctcctgggcctggcgagggagttcctggtgcggagtctctcagcagatgacgtgcaggtcacgcagaccatgctgagctttttggcggccacaggcgatgacggtcaggcggtgggtgcgctggacctgctgctggccctgctgcacggttccctggtgcaggagtccttggctgtctttctgttggagccagggaacctcgaagtgctactggccctgctagtgcggccagggtcactgcccctgctgcccgatcgagtctgcaagatcctgcgcagactgcagcagaatgagcggctacctgagcggagccgccagcgcctccggctgcgggagtgtggtctccagggtctggttgcctgcttgcctgaggggactgtttccccccagctctgccagggcctctacaagctgttcctgggggcagattgcctgaacctctcagatctgctggctgtggtacagctgtccctccaggctgacctcagcgttcgcctagacatctgtcgccagcttttccacctcatctacggacagccagatgtagtgcggcttctggcccgacaggctggctggcaagatgtgctgacccggctatatgtcctggaggctgccacagccggcagcccccctccgtcttccccagagtcacctacctcccccaagccagccccacccaagccacccactgagtcacctgctgagccttcagatgtcttcctgccctcagaggccccctgccctgaccctgatggcttttaccatgctctctccccattctgcacgccctttgacctgggcctggaacggtctagtgtaggatcaggcaacactgctggtggtggcggcagcagtgggactcttactccagccagccagcccggcactccttcgccactggatgggccgcggccctttcctgctgctcctggccgccacagctccagtctctccaatgtgctggaggacggcagcctcccggagcccaccattagcggggatgatacctcgaacaccagcaacccacagcaaacctctgaggaagagttgtgcaatctgctcaccaacgtgctgttctcggtgacgtggcgtggcgtggaaggcagcgatgaggctgcctggcgggagcgtggccaggttttctcagtgctcacccagctgggggcctcagccacacttgtgcgcccaccagactgcatcaagcgcagcctcctggagatgatgctggagtcagccctgaccgacatcaaagaggcccccgtgggggtcctggccagcctcacccagcaagcgctttggctgctgcgtctgctgcaggacttcctgtgtgctgaaggccatggtaaccaggaactgtggagtgagaagctctttgaaggtgtatgcagcctacttgatcgcctgggagcctggccccacctggccaacggcacagctgatctccgtgagatggcgcagattggcctacggcttgtacttggctacatcctgctggaagacccacagctgcatgcccaggcctacgtgagattgcacatgctgctacagactgcagtgccagcccgccgcgaggaggcctgctatgtgctctccaagctggaggctgcactggggcgggtgctgaacacctcttccttggagtcagccactgatgaggcagggtccccacttgcagctgcagcagctgcagcagctgcagagcgctgctcctggctggtgccactggtgcgcacgctgctagaccgtgcctatgagccgctggggctgcagtggggactgccctccctgccacccaccaatggcagccccaccttctttgaagacttccaggctttttgtgccacacccgaatggcgccacttcatcgacaaacaggtacagccaaccatgtcccagttcgaaatggacacgtatgctaagagccacgaccttatgtcaggtttctggaatgcctgctatgacatgcttatgagcagtgggcagcggcgccagtgggagcgcgcccagagtcgtcgggccttccaggagctggtgctggaacctgcgcagaggcgggcgcgcctggaggggctacgctacacggcagtgctgaagcagcaggcaacgcagcactccatggccctgctgcactggggggcgctgtggcgccagctcgccagcccatgtggggcctgggcgctgagggacactcccatcccccgctggaaactgtccagcgccgagacatattcacgcatgcgtctgaagctggtgcccaaccatcacttcgaccctcacctggaagccagcgctctccgagacaatctgggtgaggttcccctgacacccaccgaggaggcctcactgcctctggcagtgaccaaagaggccaaagtgagcaccccacccgagttgctgcaggaggaccagctcggcgaggacgagctggctgagctggagaccccgatggaggcagcagaactggatgagcagcgtgagaagctggtgctgtcggccgagtgccagctggtgacggtagtggccgtggtcccagggctgctggaggtcaccacacagaatgtatacttctacgatggcagcactgagcgcgtggaaaccgaggagggcatcggctatgatttccggcgcccactggcccagctgcgtgaggtccacctgcggcgtttcaacctgcgccgttcagcacttgagctcttctttatcgatcaggccaactacttcctcaacttcccatgcaaggtgggcacgaccccagtctcatctcctagccagactcccagaccccagcctggccccatcccaccccatacccaggtacggaaccaggtgtactcgtggctcctgcgcctacggcccccctctcaaggctacctaagcagccgctccccccaggagatgctgcgtgcctcaggccttacccagaaatgggtacagcgtgagatatccaacttcgagtacttgatgcaactcaacaccattgcggggcggacctacaatgacctgtctcagtaccctgtgttcccctgggtcctgcaggactacgtgtccccaaccctggacctcagcaacccagccgtcttccgggacctgtctaagcccatcggtgtggtgaaccccaagcatgcccagctcgtgagggagaagtatgaaagctttgaggacccagcagggaccattgacaagttccactatggcacccactactccaatgcagcaggcgtgatgcactacctcatccgcgtggagcccttcacctccctgcacgtccagctgcaaagtggccgctttgactgctccgaccggcagttccactcggtggcggcagcctggcaggcacgcctggagagccctgccgatgtgaaggagctcatcccggaattcttctactttcctgacttcctggagaaccagaacggttttgacctgggctgtctccagctgaccaacgagaaggtaggcgatgtggtgctacccccgtgggccagctctcctgaggacttcatccagcagcaccgccaggctctggagtcggagtatgtgtctgcacacctacacgagtggatcgacctcatctttggctacaagcagcgggggccagccgccgaggaggccctcaatgtcttctattactgcacctatgagggggctgtagacctggaccatgtgacagatgagcgggaacggaaggctctggagggcattatcagcaactttgggcagactccctgtcagctgctgaaggagccacatccaactcggctctcagctgaggaagcagcccatcgccttgcacgcctggacactaactcacctagcatcttccagcacctggacgaactcaaggcattcttcgcagaggttgtcagtgatggtgtacccctggtgctagccctggtcccccaccggcagccccactccttcatcacccagggttccccagacctgttggtgactgtgagtgccagtgggctgctgggcacccacagctggttgccctatgaccgcaacataagcaactacttcagcttcagcaaagaccccaccatgggcagccacaagacgcagcgactgctgagtggcccgtgggtgccaggcagtggtgtgagtggacaagcactggcagtggccccggatggaaagctgctattcagcggtggccactgggatggcagcctgcgggtgactgcactaccccgtggcaagctgttgagccagctcagctgccaccttgatgtagtaacctgccttgcactggacacctgtggcatctacctcatctcaggctcccgggacaccacgtgcatggtgtggcggctcctgcatcaggtgtgcctcgtgggcagctctgtggggcccccgtagcccagacctgcagcccatccgtccctcagtggccttccagtcctgtcctcctctagtcttggacaaggccttcatttcctgagcctcaggggacagtcctaagccaaccctggtcctccacagggtggtctgtcagtaggcctggcaccaaagcctgtgcaggtcctgtatgggcatggggctgcagtgagctgtgtggccatcagcactgaacttgacatggctgtgtctggatctgaggatggaactgtgatcatacacactgtacgccgcggacagtttgtagcggcactacggcctctgggtgccacattccctggacctattttccacctggcattggggtccgaaggccagattgtggtacagagctcagcgtgggaacgtcctggggcccaggtcacctactccttgcacctgtattcagtcaatgggaagttgcgggcttcactgcccctggcagagcagcctacagccctgacggtgacagaggactttgtgttgctgggcaccgcccagtgcgccctgcacatcctccaactaaacacactgctcccggccgcgcctcccttgcccatgaaggtggccatccgcagcgtggccgtgaccaaggagcgcagccacgtgctggtgggcctggaggatggcaagctcatcgtggtggtcgcggggcagccctctgaggtgcgcagcagccagttcgcgcggaagctgtggcggtcctcgcggcgcatctcccaggtgtcctcgggagagacggaatacaaccctactgaggcgcgctgaacctggccagtccggctgctcgggccccgcccccggcaggcctggcccgggaggccccgcccagaagtcggcgggaacaccccggggtgggcagcccaggggggtgagcggggcccaccctgcccagctcagggattggcgggcgatgttaccccctcagggattggcgggcggaagtcccgcccctcgccggctgaggggccgccctgagggccagcactggcgtctgcggccgcagcagcactttttgcacagtctggggcggggttccccggcttccaagtcgctgtttcgtcaaagcacgagggccgcctgtggccttaattcctaacggcggccccggttctcccttctcggcaataaaccaggcctagttttgtagctgc

SEQ ID NO: 27062 - DNA, 6140 bp, Homo sapiens
  misc_feature (17)..(17): n is a, c, g, or t
ctcggctctaccttgtntcacagagtggagactgggatgaaggatgtggtgaactgcgttgggggtatgggtgccctgctgcccctgctggagcgagtagctgcacagcccaaagaggctgaagcaggtccagctgaaacgcatgacctcgtgggtcctgaactgacctctggtcacaacacccagggcctggttctcccattgggtaaatcttcagaggaacggatggagaggaacgcagtggctgcttttctgctgatgctgcggaacttccttcagggtcacatggtgaaccaagagagcctggtgcagtgccaggggcctgccatcatcggggccctcctgcgaaaggtcccaagctgggccatggacatgaacgtgctcatgtccgcccagctgctgatggagcaggtggcagctgagggcagcgggcccctcctgtacctactctaccagcatttgctcttcaactttcacctctggaccctcagtgacttcgccgtgcgcctcggtcacatccagtacatgtccagcatagttcgggagcacagacagaagctgcggaagaagtacggcgtccagtttatcttggatgctctgcgcacccactacagcccgcagcgggagcgccccctggctgctgacgacctacgcaccgtgcagacctccctcctgggcctggcgagggagttcctggtgcggagtctctcagcagatgacgtgcaggtcacgcagaccatgctgagctttttggcggccacaggcgatgacggtcaggcggtgggtgcgctggacctgctgctggccctgctgcacggttccctggtgcaggagtccttggctgtctttctgttggagccagggaacctcgaagtgctactggccctgctagtgcggccagggtcactgcccctgctgcccgatcgagtctgcaagatcctgcgcagactgcagcagaatgagcggctacctgagcggagccgccagcgcctccggctgcgggagtgtggtctccagggtctggttgcctgcttgcctgaggggactgtttccccccagctctgccagggcctctacaagctgttcctgggggcagattgcctgaacctctcagatctgctggctgtggtacagctgtccctccaggctgacctcagcgttcgcctagacatctgtcgccagcttttccacctcatctacggacagccagatgtagtgcggcttctggcccgacaggctggctggcaagatgtgctgacccggctatatgtcctggaggctgccacagccggcagcccccctccgtcttccccagagtcacctacctcccccaagccagccccacccaagccacccactgagtcacctgctgagccttcagatgtcttcctgccctcagaggccccctgccctgaccctgatggcttttaccatgctctctccccattctgcacgccctttgacctgggcctggaacggtctagtgtaggatcaggcaacactgctggtggtggcggcagcagtgggactcttactccagccagccagcccggcactccttcgccactggatgggccgcggccctttcctgctgctcctggccgccacagctccagtctctccaatgtgctggaggacggcagcctcccggagcccaccattagcggggatgatacctcgaacaccagcaacccacagcaaacctctgaggaagagttgtgcaatctgctcaccaacgtgctgttctcggtgacgtggcgtggcgtggaaggcagcgatgaggctgcctggcgggagcgtggccaggttttctcagtgctcacccagctgggggcctcagccacacttgtgcgcccaccagactgcatcaagcgcagcctcctggagatgatgctggagtcagccctgaccgacatcaaagaggcccccgtgggggtcctggccagcctcacccagcaagcgctttggctgctgcgtctgctgcaggacttcctgtgtgctgaaggccatggtaaccaggaactgtggagtgagaagctctttgaaggtgtatgcagcctacttgatcgcctgggagcctggccccacctggccaacggcacagctgatctccgtgagatggcgcagattggcctacggcttgtacttggctacatcctgctggaagacccacagctgcatgcccaggcctacgtgagattgcacatgctgctacagactgcagtgccagcccgccgcgaggaggcctgctatgtgctctccaagctggaggctgcactggggcgggtgctgaacacctcttccttggagtcagccactgatgaggcagggtccccacttgcagctgcagcagctgcagcagctgcagagcgctgctcctggctggtgccactggtgcgcacgctgctagaccgtgcctatgagccgctggggctgcagtggggactgccctccctgccacccaccaatggcagccccaccttctttgaagacttccaggctttttgtgccacacccgaatggcgccacttcatcgacaaacaggtacagccaaccatgtcccagttcgaaatggacacgtatgctaagagccacgaccttatgtcaggtttctggaatgcctgctatgacatgcttatgagcagtgggcagcggcgccagtgggagcgcgcccagagtcgtcgggccttccaggagctggtgctggaacctgcgcagaggcgggcgcgcctggaggggctacgctacacggcagtgctgaagcagcaggcaacgcagcactccatggccctgctgcactggggggcgctgtggcgccagctcgccagcccatgtggggcctgggcgctgagggacactcccatcccccgctggaaactgtccagcgccgagacatattcacgcatgcgtctgaagctggtgcccaaccatcacttcgaccctcacctggaagccagcgctctccgagacaatctgggtgaggttcccctgacacccaccgaggaggcctcactgcctctggcagtgaccaaagaggccaaagtgagcaccccacccgagttgctgcaggaggaccagctcggcgaggacgagctggctgagctggagaccccgatggaggcagcagaactggatgagcagcgtgagaagctggtgctgtcggccgagtgccagctggtgacggtagtggccgtggtcccagggctgctggaggtcaccacacagaatgtatacttctacgatggcagcactgagcgcgtggaaaccgaggagggcatcggctatgatttccggcgcccactggcccagctgcgtgaggtccacctgcggcgtttcaacctgcgccgttcagcacttgagctcttctttatcgatcaggccaactacttcctcaacttcccatgcaaggtgggcacgaccccagtctcatctcctagccagactcccagaccccagcctggccccatcccaccccatacccaggtacggaaccaggtgtactcgtggctcctgcgcctacggcccccctctcaaggctacctaagcagccgctccccccaggagatgctgcgtgcctcaggccttacccagaaatgggtacagcgtgagatatccaacttcgagtacttgatgcaactcaacaccattgcggggcggacctacaatgacctgtctcagtaccctgtgttcccctgggtcctgcaggactacgtgtccccaaccctggacctcagcaacccagccgtcttccgggacctgtctaagcccatcggtgtggtgaaccccaagcatgcccagctcgtgagggagaagtatgaaagctttgaggacccagcagggaccattgacaagttccactatggcacccactactccaatgcagcaggcgtgatgcactacctcatccgcgtggagcccttcacctccctgcacgtccagctgcaaagtggccgctttgactgctccgaccggcagttccactcggtggcggcagcctggcaggcacgcctggagagccctgccgatgtgaaggagctcatcccggaattcttctactttcctgacttcctggagaaccagaacggttttgacctgggctgtctccagctgaccaacgagaaggtaggcgatgtggtgctacccccgtgggccagctctcctgaggacttcatccagcagcaccgccaggctctggagtcggagtatgtgtctgcacacctacacgagtggatcgacctcatctttggctacaagcagcgggggccagccgccgaggaggccctcaatgtcttctattactgcacctatgagggggctgtagacctggaccatgtgacagatgagcgggaacggaaggctctggagggcattatcagcaactttgggcagactccctgtcagctgctgaaggagccacatccaactcggctctcagctgaggaagcagcccatcgccttgcacgcctggacactaactcacctagcatcttccagcacctggacgaactcaaggcattcttcgcagaggttgtcagtgatggtgtacccctggtgctagccctggtcccccaccggcagccccactccttcatcacccagggttccccagacctgttggtgactgtgagtgccagtgggctgctgggcacccacagctggttgccctatgaccgcaacataagcaactacttcagcttcagcaaagaccccaccatgggcagccacaagacgcagcgactgctgagtggcccgtgggtgccaggcagtggtgtgagtggacaagcactggcagtggccccggatggaaagctgctattcagcggtggccactgggatggcagcctgcgggtgactgcactaccccgtggcaagctgttgagccagctcagctgccaccttgatgtagtaacctgccttgcactggacacctgtggcatctacctcatctcaggctcccgggacaccacgtgcatggtgtggcggctcctgcatcagggtggtctgtcagtaggcctggcaccaaagcctgtgcaggtcctgtatgggcatggggctgcagtgagctgtgtggccatcagcactgaacttgacatggctgtgtctggatctgaggtgtgtgtatgcatgtgccctggggagggtgagtttcctgggcaatccccctggagcccagactcctgcccaggaccctaagttgccttcctgcaggatggaactgtgatcatacacactgtacgccgcggacagtttgtagcggcactacggcctctgggtgccacattccctggacctattttccacctggcattggggtccgaaggccagattgtggtacagagctcagcgtgggaacgtcctggggcccaggtcacctactccttgcacctgtattcagtcaatgggaagttgcgggcttcactgcccctggcagagcagcctacagccctgacggtgacagaggactttgtgttgctgggcaccgcccagtgcgccctgcacatcctccaactaaacacactgctcccggccgcgcctcccttgcccatgaaggtggccatccgcagcgtggccgtgaccaaggagcgcagccacgtgctggtgggcctggaggatggcaagctcatcgtggtggtcgcggggcagccctctgaggtgcgcagcagccagttcgcgcggaagctgtggcggtcctcgcggcgcatctcccaggtgtcctcgggagagacggaatacaaccctactgaggcgcgctgaacctggccagtccggctgctcgggccccgcccccggcaggcctggcccgggaggccccgcccagaagtcggcgggaacaccccggggtgggcagcccaggggggtgagcggggcccaccctgcccagctcagggattggcgggcgatgttaccccctcagggattggcgggcggaagtcccgcccctcgccggctgaggggccgccctgagggccagcactggcgtctgcggccgcagcagcactttttgcacagtctggggcggggttccccggcttccaagtcgctgtttcgtcaaagcacgagggccgcctgtggccttaattcctaacggcggccccggttctcccttctcggcaataaaccaggcctagttttgtagctgc

SEQ ID NO: 27063 - DNA, 5927 bp, Homo sapiens
  misc_feature (17)..(17): n is a, c, g, or t
ctcggctctaccttgtntcacagagtggagactgggatgaaggatgtggtgaactgcgttgggggtatgggtgccctgctgcccctgctggagcgagtagctgcacagcccaaagaggctgaagcaggtccagctgaaacgcatgacctcgtgggtcctgaactgacctctggtcacaacacccagggcctggttctcccattgggtaaatcttcagaggaacggatggagaggaacgcagtggctgcttttctgctgatgctgcggaacttccttcagggtcacatggtgaaccaagagagcctggtgcagtgccaggggcctgccatcatcggggccctcctgcgaaaggtcccaagctgggccatggacatgaacgtgctcatgtccgcccagctgctgatggagcaggtggcagctgagggcagcgggcccctcctgtacctactctaccagcatttgctcttcaactttcacctctggaccctcagtgacttcgccgtgcgcctcggtcacatccagtacatgtccagcatagttcgggagcacagacagaagctgcggaagaagtacggcgtccagtttatcttggatgctctgcgcacccactacagcccgcagcgggagcgccccctggctgctgacgacctacgcaccgtgcagacctccctcctgggcctggcgagggagttcctggtgcggagtctctcagcagatgacgtgcaggtcacgcagaccatgctgagctttttggcggccacaggcgatgacggtcaggcggtgggtgcgctggacctgctgctggccctgctgcacggttccctggtgcaggagtccttggctgtctttctgttggagccagggaacctcgaagtgctactggccctgctagtgcggccagggtcactgcccctgctgcccgatcgagtctgcaagatcctgcgcagactgcagcagaatgagcggctacctgagcggagccgccagcgcctccggctgcgggagtgtggtctccagggtctggttgcctgcttgcctgaggggactgtttccccccagctctgccagggcctctacaagctgttcctgggggcagattgcctgaacctctcagatctgctggctgtggtacagctgtccctccaggctgacctcagcgttcgcctagacatctgtcgccagcttttccacctcatctacggacagccagatgtagtgcggcttctggcccgacaggctggctggcaagatgtgctgacccggctatatgtcctggaggctgccacagccggcagcccccctccgtcttccccagagtcacctacctcccccaagccagccccacccaagccacccactgagtcacctgctgagccttcagatgtcttcctgccctcagaggccccctgccctgaccctgatggcttttaccatgctctctccccattctgcacgccctttgacctgggcctggaacggtctagtgtaggatcaggcaacactgctggtggtggcggcagcagtgggactcttactccagccagccagcccggcactccttcgccactggatgggccgcggccctttcctgctgctcctggccgccacagctccagtctctccaatgtgctggaggacggcagcctcccggagcccaccattagcggggatgatacctcgaacaccagcaacccacagcaaacctctgaggaagagttgtgcaatctgctcaccaacgtgctgttctcggtgacgtggcgtggcgtggaaggcagcgatgaggctgcctggcgggagcgtggccaggttttctcagtgctcacccagctgggggcctcagccacacttgtgcgcccaccagactgcatcaagcgcagcctcctggagatgatgctggagtcagccctgaccgacatcaaagaggcccccgtgggggtcctggccagcctcacccagcaagcgctttggctgctgcgtctgctgcaggacttcctgtgtgctgaaggccatggtaaccaggaactgtggagtgagaagctctttgaaggtgtatgcagcctacttgatcgcctgggagcctggccccacctggccaacggcacagctgatctccgtgagatggcgcagattggcctacggcttgtacttggctacatcctgctggaagacccacagctgcatgcccaggcctacgtgagattgcacatgctgctacagactgcagtgccagcccgccgcgaggaggcctgctatgtgctctccaagctggaggctgcactggggcgggtgctgaacacctcttccttggagtcagccactgatgaggcagggtccccacttgcagctgcagcagctgcagcagctgcagagcgctgctcctggctggtgccactggtgcgcacgctgctagaccgtgcctatgagccgctggggctgcagtggggactgccctccctgccacccaccaatggcagccccaccttctttgaagacttccaggctttttgtgccacacccgaatggcgccacttcatcgacaaacaggtacagccaaccatgtcccagttcgaaatggacacgtatgctaagagccacgaccttatgtcaggtttctggaatgcctgctatgacatgcttatgagcagtgggcagcggcgccagtgggagcgcgcccagagtcgtcgggccttccaggagctggtgctggaacctgcgcagaggcgggcgcgcctggaggggctacgctacacggcagtgctgaagcagcaggcaacgcagcactccatggccctgctgcactggggggcgctgtggcgccagctcgccagcccatgtggggcctgggcgctgagggacactcccatcccccgctggaaactgtccagcgccgagacatattcacgcatgcgtctgaagctggtgcccaaccatcacttcgaccctcacctggaagccagcgctctccgagacaatctgggtgaggttcccctgacacccaccgaggaggcctcactgcctctggcagtgaccaaagaggccaaagtgagcaccccacccgagttgctgcaggaggaccagctcggcgaggacgagctggctgagctggagaccccgatggaggcagcagaactggatgagcagcgtgagaagctggtgctgtcggccgagtgccagctggtgacggtagtggccgtggtcccagggctgctggaggtcaccacacagaatgtatacttctacgatggcagcactgagcgcgtggaaaccgaggagggcatcggctatgatttccggcgcccactggcccagctgcgtgaggtccacctgcggcgtttcaacctgcgccgttcagcacttgagctcttctttatcgatcaggccaactacttcctcaacttcccatgcaaggtgggcacgaccccagtctcatctcctagccagactcccagaccccagcctggccccatcccaccccatacccaggtacggaaccaggtgtactcgtggctcctgcgcctacggcccccctctcaaggctacctaagcagccgctccccccaggagatgctgcgtgcctcaggccttacccagaaatgggtacagcgtgagatatccaacttcgagtacttgatgcaactcaacaccattgcggggcggacctacaatgacctgtctcagtaccctgtgttcccctgggtcctgcaggactacgtgtccccaaccctggacctcagcaacccagccgtcttccgggacctgtctaagcccatcggtgtggtgaaccccaagcatgcccagctcgtgagggagaagtatgaaagctttgaggacccagcagggaccattgacaagttccactatggcacccactactccaatgcagcaggcgtgatgcactacctcatccgcgtggagcccttcacctccctgcacgtccagctgcaaagtggccgctttgactgctccgaccggcagttccactcggtggcggcagcctggcaggcacgcctggagagccctgccgatgtgaaggagctcatcccggaattcttctactttcctgacttcctggagaaccagaacggttttgacctgggctgtctccagctgaccaacgagaaggtaggcgatgtggtgctacccccgtgggccagctctcctgaggacttcatccagcagcaccgccaggctctggagtcggagtatgtgtctgcacacctacacgagtggatcgacctcatctttggctacaagcagcgggggccagccgccgaggaggccctcaatgtcttctattactgcacctatgagggggctgtagacctggaccatgtgacagatgagcgggaacggaaggctctggagggcattatcagcaactttgggcagactccctgtcagctgctgaaggagccacatccaactcggctctcagctgaggaagcagcccatcgccttgcacgcctggacactaactcacctagcatcttccagcacctggacgaactcaaggcattcttcgcagaggttgtcagtgatggtgtacccctggtgctagccctggtcccccaccggcagccccactccttcatcacccagggttccccagacctgttggtgactgtgagtgccagtgggctgctgggcacccacagctggttgccctatgaccgcaacataagcaactacttcagcttcagcaaagaccccaccatgggcagccacaagacgcagcgactgctgagtggcccgtgggtgccaggcagtggtgtgagtggacaagcactggcagtggccccggatggaaagctgctattcagcggtggccactgggatggcagcctgcgggtgactgcactaccccgtggcaagctgttgagccagctcagctgccaccttgatgtagtaacctgccttgcactggacacctgtggcatctacctcatctcaggctcccgggacaccacgtgcatggtgtggcggctcctgcatcaggatggaactgtgatcatacacactgtacgccgcggacagtttgtagcggcactacggcctctgggtgccacattccctggacctattttccacctggcattggggtccgaaggccagattgtggtacagagctcagcgtgggaacgtcctggggcccaggtcacctactccttgcacctgtattcagtcaatgggaagttgcgggcttcactgcccctggcagagcagcctacagccctgacggtgacagaggactttgtgttgctgggcaccgcccagtgcgccctgcacatcctccaactaaacacactgctcccggccgcgcctcccttgcccatgaaggtggccatccgcagcgtggccgtgaccaaggagcgcagccacgtgctggtgggcctggaggatggcaagctcatcgtggtggtcgcggggcagccctctgaggtgcgcagcagccagttcgcgcggaagctgtggcggtcctcgcggcgcatctcccaggtgtcctcgggagagacggaatacaaccctactgaggcgcgctgaacctggccagtccggctgctcgggccccgcccccggcaggcctggcccgggaggccccgcccagaagtcggcgggaacaccccggggtgggcagcccaggggggtgagcggggcccaccctgcccagctcagggattggcgggcgatgttaccccctcagggattggcgggcggaagtcccgcccctcgccggctgaggggccgccctgagggccagcactggcgtctgcggccgcagcagcactttttgcacagtctggggcggggttccccggcttccaagtcgctgtttcgtcaaagcacgagggccgcctgtggccttaattcctaacggcggccccggttctcccttctcggcaataaaccaggcctagttttgtagctgc

SEQ ID NO: 27064 - DNA, 6218 bp, Homo sapiens
  misc_feature (17)..(17): n is a, c, g, or t
ctcggctctaccttgtntcacagagtggagactgggatgaaggatgtggtgaactgcgttgggggtatgggtgccctgctgcccctgctggagcgagtagctgcacagcccaaagaggctgaagcaggtccagctgaaacgcatgacctcgtgggtcctgaactgacctctggtcacaacacccagggcctggttctcccattgggtaaatcttcagaggaacggatggagaggaacgcagtggctgcttttctgctgatgctgcggaacttccttcagggtcacatggtgaaccaagagagcctggtgcagtgccaggggcctgccatcatcggggccctcctgcgaaaggtcccaagctgggccatggacatgaacgtgctcatgtccgcccagctgctgatggagcaggtggcagctgagggcagcgggcccctcctgtacctactctaccagcatttgctcttcaactttcacctctggaccctcagtgacttcgccgtgcgcctcggtcacatccagtacatgtccagcatagttcgggagcacagacagaagctgcggaagaagtacggcgtccagtttatcttggatgctctgcgcacccactacagcccgcagcgggagcgccccctggctgctgacgacctacgcaccgtgcagacctccctcctgggcctggcgagggagttcctggtgcggagtctctcagcagatgacgtgcaggtcacgcagaccatgctgagctttttggcggccacaggcgatgacggtcaggcggtgggtgcgctggacctgctgctggccctgctgcacggttccctggtgcaggagtccttggctgtctttctgttggagccagggaacctcgaagtgctactggccctgctagtgcggccagggtcactgcccctgctgcccgatcgagtctgcaagatcctgcgcagactgcagcagaatgagcggctacctgagcggagccgccagcgcctccggctgcgggagtgtggtctccagggtctggttgcctgcttgcctgaggggactgtttccccccagctctgccagggcctctacaagctgttcctgggggcagattgcctgaacctctcagatctgctggctgtggtacagctgtccctccaggctgacctcagcgttcgcctagacatctgtcgccagcttttccacctcatctacggacagccagatgtagtgcggcttctggcccgacaggctggctggcaagatgtgctgacccggctatatgtcctggaggctgccacagccggcagcccccctccgtcttccccagagtcacctacctcccccaagccagccccacccaagccacccactgagtcacctgctgagccttcagatgtcttcctgccctcagaggccccctgccctgaccctgatggcttttaccatgctctctccccattctgcacgccctttgacctgggcctggaacggtctagtgtaggatcaggcaacactgctggtggtggcggcagcagtgggactcttactccagccagccagcccggcactccttcgccactggatgggccgcggccctttcctgctgctcctggccgccacagctccagtctctccaatgtgctggaggacggcagcctcccggagcccaccattagcggggatgatacctcgaacaccagcaacccacagcaaacctctgaggaagagttgtgcaatctgctcaccaacgtgctgttctcggtgacgtggcgtggcgtggaaggcagcgatgaggctgcctggcgggagcgtggccaggttttctcagtgctcacccagctgggggcctcagccacacttgtgcgcccaccagactgcatcaagcgcagcctcctggagatgatgctggagtcagccctgaccgacatcaaagaggcccccgtgggggtcctggccagcctcacccagcaagcgctttggctgctgcgtctgctgcaggacttcctgtgtgctgaaggccatggtaaccaggaactgtggagtgagaagctctttgaaggtgtatgcagcctacttgatcgcctgggagcctggccccacctggccaacggcacagctgatctccgtgagatggcgcagattggcctacggcttgtacttggctacatcctgctggaagacccacagctgcatgcccaggcctacgtgagattgcacatgctgctacagactgcagtgccagcccgccgcgaggaggcctgctatgtgctctccaagctggaggctgcactggggcgggtgctgaacacctcttccttggagtcagccactgatgaggcagggtccccacttgcagctgcagcagctgcagcagctgcagagcgctgctcctggctggtgccactggtgcgcacgctgctagaccgtgcctatgagccgctggggctgcagtggggactgccctccctgccacccaccaatggcagccccaccttctttgaagacttccaggctttttgtgccacacccgaatggcgccacttcatcgacaaacaggtacagccaaccatgtcccagttcgaaatggacacgtatgctaagagccacgaccttatgtcaggtttctggaatgcctgctatgacatgcttatgagcagtgggcagcggcgccagtgggagcgcgcccagagtcgtcgggccttccaggagctggtgctggaacctgcgcagaggcgggcgcgcctggaggggctacgctacacggcagtgctgaagcagcaggcaacgcagcactccatggccctgctgcactggggggcgctgtggcgccagctcgccagcccatgtggggcctgggcgctgagggacactcccatcccccgctggaaactgtccagcgccgagacatattcacgcatgcgtctgaagctggtgcccaaccatcacttcgaccctcacctggaagccagcgctctccgagacaatctgggtgaggttcccctgacacccaccgaggaggcctcactgcctctggcagtgaccaaagaggccaaagtgagcaccccacccgagttgctgcaggaggaccagctcggcgaggacgagctggctgagctggagaccccgatggaggcagcagaactggatgagcagcgtgagaagctggtgctgtcggccgagtgccagctggtgacggtagtggccgtggtcccagggctgctggaggtcaccacacagaatgtatacttctacgatggcagcactgagcgcgtggaaaccgaggagggcatcggctatgatttccggcgcccactggcccagctgcgtgaggtccacctgcggcgtttcaacctgcgccgttcagcacttgagctcttctttatcgatcaggccaactacttcctcaacttcccatgcaaggtgggcacgaccccagtctcatctcctagccagactcccagaccccagcctggccccatcccaccccatacccaggtacggaaccaggtgtactcgtggctcctgcgcctacggcccccctctcaaggctacctaagcagccgctccccccaggagatgctgcgtgcctcaggccttacccagaaatgggtacagcgtgagatatccaacttcgagtacttgatgcaactcaacaccattgcggggcggacctacaatgacctgtctcagtaccctgtgttcccctgggtcctgcaggactacgtgtccccaaccctggacctcagcaacccagccgtcttccgggacctgtctaagcccatcggtgtggtgaaccccaagcatgcccagctcgtgagggagaagtatgaaagctttgaggacccagcagggaccattgacaagttccactatggcacccactactccaatgcagcaggcgtgatgcactacctcatccgcgtggagcccttcacctccctgcacgtccagctgcaaagtggccgctttgactgctccgaccggcagttccactcggtggcggcagcctggcaggcacgcctggagagccctgccgatgtgaaggagctcatcccggaattcttctactttcctgacttcctggagaaccagaacggttttgacctgggctgtctccagctgaccaacgagaaggtaggcgatgtggtgctacccccgtgggccagctctcctgaggacttcatccagcagcaccgccaggctctggagtcggagtatgtgtctgcacacctacacgagtggatcgacctcatctttggctacaagcagcgggggccagccgccgaggaggccctcaatgtcttctattactgcacctatgagggggctgtagacctggaccatgtgacagatgagcgggaacggaaggctctggagggcattatcagcaactttgggcagactccctgtcagctgctgaaggagccacatccaactcggctctcagctgaggaagcagcccatcgccttgcacgcctggacactaactcacctagcatcttccagcacctggacgaactcaaggcattcttcgcagaggttgtcagtgatggtgtacccctggtgctagccctggtcccccaccggcagccccactccttcatcacccagggttccccagacctgttggtgactgtgagtgccagtgggctgctgggcacccacagctggttgccctatgaccgcaacataagcaactacttcagcttcagcaaagaccccaccatgggcagccacaagacgcagcgactgctgagtggcccgtgggtgccaggcagtggtgtgagtggacaagcactggcagtggccccggatggaaagctgctattcagcggtggccactgggatggcagcctgcgggtgactgcactaccccgtggcaagctgttgagccagctcagctgccaccttgatgtagtaacctgccttgcactggacacctgtggcatctacctcatctcaggctcccgggacaccacgtgcatggtgtggcggctcctgcatcagggtggtctgtcagtaggcctggcaccaaagcctgtgcaggtcctgtatgggcatggggctgcagtgagctgtgtggccatcagcactgaacttgacatggctgtgtctggatctgaggtgtgtgtatgcatgtgccctggggagggtgagtttcctgggcaatccccctggagcccagactcctgcccaggaccctaagttgccttcctgcaggatggaactgtgatcatacacactgtacgccgcggacagtttgtagcggcactacggcctctgggtgccacattccctggacctattttccacctggcattggggtccgaaggccagattgtggtacagagctcagcgtgggaacgtcctggggcccaggtatggggaaggggtgcccagcaaagatggaggggcagttgggatcctgtccttgctgacactccctgcttcctccaggtcacctactccttgcacctgtattcagtcaatgggaagttgcgggcttcactgcccctggcagagcagcctacagccctgacggtgacagaggactttgtgttgctgggcaccgcccagtgcgccctgcacatcctccaactaaacacactgctcccggccgcgcctcccttgcccatgaaggtggccatccgcagcgtggccgtgaccaaggagcgcagccacgtgctggtgggcctggaggatggcaagctcatcgtggtggtcgcggggcagccctctgaggtgcgcagcagccagttcgcgcggaagctgtggcggtcctcgcggcgcatctcccaggtgtcctcgggagagacggaatacaaccctactgaggcgcgctgaacctggccagtccggctgctcgggccccgcccccggcaggcctggcccgggaggccccgcccagaagtcggcgggaacaccccggggtgggcagcccaggggggtgagcggggcccaccctgcccagctcagggattggcgggcgatgttaccccctcagggattggcgggcggaagtcccgcccctcgccggctgaggggccgccctgagggccagcactggcgtctgcggccgcagcagcactttttgcacagtctggggcggggttccccggcttccaagtcgctgtttcgtcaaagcacgagggccgcctgtggccttaattcctaacggcggccccggttctcccttctcggcaataaaccaggcctagttttgtagctgc

SEQ ID NO: 27065 - DNA, 2665 bp, Homo sapiens
cttggttcccccaagtgtaggtacctgccagtgggccaagctctgagcttggtcaagggtagatgtgccaatgaagacctggcctctgtccccagcctcactcccttcccctccctgcctagcctctattcctcaaaaggaatcctgttccaggacactctgtccttctcccctgtgacccctctaagtggtgctcccccaacctgtgggcaggctctgtgcccgccttcttgagggtgtgggcagggcagggtgggctggtaggccatcagggccctcatgcagcccctgctcgggtgggtggccagttcccctgggtcctgcaggactacgtgtccccaaccctggacctcagcaacccagccgtcttccgggacctgtctaagcccatcggtgtggtgaaccccaagcatgcccagctcgtgagggagaagtatgaaagctttgaggacccagcagggaccattgacaagttccactatggcacccactactccaatgcagcaggcgtgatgcactacctcatccgcgtggagcccttcacctccctgcacgtccagctgcaaagtggccgctttgactgctccgaccggcagttccactcggtggcggcagcctggcaggcacgcctggagagccctgccgatgtgaaggagctcatcccggaattcttctactttcctgacttcctggagaaccagaacggttttgacctgggctgtctccagctgaccaacgagaaggtaggcgatgtggtgctacccccgtgggccagctctcctgaggacttcatccagcagcaccgccaggctctggagtcggagtatgtgtctgcacacctacacgagtggatcgacctcatctttggctacaagcagcgggggccagccgccgaggaggccctcaatgtcttctattactgcacctatgagggggctgtagacctggaccatgtgacagatgagcgggaacggaaggctctggagggcattatcagcaactttgggcagactccctgtcagctgctgaaggagccacatccaactcggctctcagctgaggaagcagcccatcgccttgcacgcctggacactaactcacctagcatcttccagcacctggacgaactcaaggcattcttcgcagaggttgtcagtgatggtgtacccctggtgctagccctggtcccccaccggcagccccactccttcatcacccagggttccccagacctgttggtgactgtgagtgccagtgggctgctgggcacccacagctggttgccctatgaccgcaacataagcaactacttcagcttcagcaaagaccccaccatgggcagccacaagacgcagcgactgctgagtggcccgtgggtgccaggcagtggtgtgagtggacaagcactggcagtggccccggatggaaagctgctattcagcggtggccactgggatggcagcctgcgggtgactgcactaccccgtggcaagctgttgagccagctcagctgccaccttgatgtagtaacctgccttgcactggacacctgtggcatctacctcatctcaggctcccgggacaccacgtgcatggtgtggcggctcctgcatcagggtggtctgtcagtaggcctggcaccaaagcctgtgcaggtcctgtatgggcatggggctgcagtgagctgtgtggccatcagcactgaacttgacatggctgtgtctggatctgaggatggaactgtgatcatacacactgtacgccgcggacagtttgtagcggcactacggcctctgggtgccacattccctggacctattttccacctggcattggggtccgaaggccagattgtggtacagagctcagcgtgggaacgtcctggggcccaggtcacctactccttgcacctgtattcagtcaatgggaagttgcgggcttcactgcccctggcagagcagcctacagccctgacggtgacagaggactttgtgttgctgggcaccgcccagtgcgccctgcacatcctccaactaaacacactgctcccggccgcgcctcccttgcccatgaaggtggccatccgcagcgtggccgtgaccaaggagcgcagccacgtgctggtgggcctggaggatggcaagctcatcgtggtggtcgcggggcagccctctgaggtgcgcagcagccagttcgcgcggaagctgtggcggtcctcgcggcgcatctcccaggtgtcctcgggagagacggaatacaaccctactgaggcgcgctgaacctggccagtccggctgctcgggccccgcccccggcaggcctggcccgggaggccccgcccagaagtcggcgggaacaccccggggtgggcagcccaggggggtgagcggggcccaccctgcccagctcagggattggcgggcgatgttaccccctcagggattggcgggcggaagtcccgcccctcgccggctgaggggccgccctgagggccagcactggcgtctgcggccgcagcagcactttttgcacagtctggggcggggttccccggcttccaagtcgctgtttcgtcaaagcacgagggccgcctgtggccttaattcctaacggcggccccggttctcccttctcggcaataaaccaggcctagttttgtagctgc

SEQ ID NO: 27066 - DNA, 1662 bp, Homo sapiens
atggtgctgaccagccacttacccacaggagccacatccaactcggctctcagctgaggaagcagcccatcgccttgcacgcctggacactaactcacctagcatcttccagcacctggacgaactcaaggcattcttcgcagaggttgtcagtgatggtgtacccctggtgctagccctggtcccccaccggcagccccactccttcatcacccagggttccccagacctgttggtgactgtgagtgccagtgggctgctgggcacccacagctggttgccctatgaccgcaacataagcaactacttcagcttcagcaaagaccccaccatgggcagccacaagacgcagcgactgctgagtggcccgtgggtgccaggcagtggtgtgagtggacaagcactggcagtggccccggatggaaagctgctattcagcggtggccactgggatggcagcctgcgggtgactgcactaccccgtggcaagctgttgagccagctcagctgccaccttgatgtagtaacctgccttgcactggacacctgtggcatctacctcatctcaggctcccgggacaccacgtgcatggtgtggcggctcctgcatcagggtggtctgtcagtaggcctggcaccaaagcctgtgcaggtcctgtatgggcatggggctgcagtgagctgtgtggccatcagcactgaacttgacatggctgtgtctggatctgaggatggaactgtgatcatacacactgtacgccgcggacagtttgtagcggcactacggcctctgggtgccacattccctggacctattttccacctggcattggggtccgaaggccagattgtggtacagagctcagcgtgggaacgtcctggggcccaggtcacctactccttgcacctgtattcagtcaatgggaagttgcgggcttcactgcccctggcagagcagcctacagccctgacggtgacagaggactttgtgttgctgggcaccgcccagtgcgccctgcacatcctccaactaaacacactgctcccggccgcgcctcccttgcccatgaaggtggccatccgcagcgtggccgtgaccaaggagcgcagccacgtgctggtgggcctggaggatggcaagctcatcgtggtggtcgcggggcagccctctgaggtgcgcagcagccagttcgcgcggaagctgtggcggtcctcgcggcgcatctcccaggtgtcctcgggagagacggaatacaaccctactgaggcgcgctgaacctggccagtccggctgctcgggccccgcccccggcaggcctggcccgggaggccccgcccagaagtcggcgggaacaccccggggtgggcagcccaggggggtgagcggggcccaccctgcccagctcagggattggcgggcgatgttaccccctcagggattggcgggcggaagtcccgcccctcgccggctgaggggccgccctgagggccagcactggcgtctgcggccgcagcagcactttttgcacagtctggggcggggttccccggcttccaagtcgctgtttcgtcaaagcacgagggccgcctgtggccttaattcctaacggcggccccggttctcccttctcggcaataaaccaggcctagttttgtagctgc

SEQ ID NO: 27067 - DNA, 1174 bp, Homo sapiens
gactacaacacaaacaacaaaacaacggctaggtacgaggctgggtttacatggacacctgtggcatctacctcatctcaggctcccgggacaccacgtgcatggtgtggcggctcctgcatcagggtggtctgtcagtaggcctggcaccaaagcctgtgcaggtcctgtatgggcatggggctgcagtgagctgtgtggccatcagcactgaacttgacatggctgtgtctggatctgaggatggaactgtgatcatacacactgtacgccgcggacagtttgtagcggcactacggcctctgggtgccacattccctggacctattttccacctggcattggggtccgaaggccagattgtggtacagagctcagcgtgggaacgtcctggggcccaggtcacctactccttgcacctgtattcagtcaatgggaagttgcgggcttcactgcccctggcagagcagcctacagccctgacggtgacagaggactttgtgttgctgggcaccgcccagtgcgccctgcacatcctccaactaaacacactgctcccggccgcgcctcccttgcccatgaaggtggccatccgcagcgtggccgtgaccaaggagcgcagccacgtgctggtgggcctggaggatggcaagctcatcgtggtggtcgcggggcagccctctgaggtgcgcagcagccagttcgcgcggaagctgtggcggtcctcgcggcgcatctcccaggtgtcctcgggagagacggaatacaaccctactgaggcgcgctgaacctggccagtccggctgctcgggccccgcccccggcaggcctggcccgggaggccccgcccagaagtcggcgggaacaccccggggtgggcagcccaggggggtgagcggggcccaccctgcccagctcagggattggcgggcgatgttaccccctcagggattggcgggcggaagtcccgcccctcgccggctgaggggccgccctgagggccagcactggcgtctgcggccgcagcagcactttttgcacagtctggggcggggttccccggcttccaagtcgctgtttcgtcaaagcacgagggccgcctgtggccttaattcctaacggcggccccggttctcccttctcggcaataaaccaggcctagttttgtagctgc

SEQ ID NO: 27068 - DNA, 1162 bp, Homo sapiens
  misc_feature (102)..(102): n is a, c, g, or t
ttttgtgtaacccggtagacgatacgattcgacctcgtacccgtcccgcctactactacacgtgctggtagtagtagacgcaagcccgcctactactaccgncggcgtgtctgggtggtctgtcagtaggcctggcaccaaagcctgtgcaggtcctgtatgggcatggggctgcagtgagctgtgtggccatcagcactgaacttgacatggctgtgtctggatctgaggatggaactgtgatcatacacactgtacgccgcggacagtttgtagcggcactacggcctctgggtgccacattccctggacctattttccacctggcattggggtccgaaggccagattgtggtacagagctcagcgtgggaacgtcctggggcccaggtcacctactccttgcacctgtattcagtcaatgggaagttgcgggcttcactgcccctggcagagcagcctacagccctgacggtgacagaggactttgtgttgctgggcaccgcccagtgcgccctgcacatcctccaactaaacacactgctcccggccgcgcctcccttgcccatgaaggtggccatccgcagcgtggccgtgaccaaggagcgcagccacgtgctggtgggcctggaggatggcaagctcatcgtggtggtcgcggggcagccctctgaggtgcgcagcagccagttcgcgcggaagctgtggcggtcctcgcggcgcatctcccaggtgtcctcgggagagacggaatacaaccctactgaggcgcgctgaacctggccagtccggctgctcgggccccgcccccggcaggcctggcccgggaggccccgcccagaagtcggcgggaacaccccggggtgggcagcccaggggggtgagcggggcccaccctgcccagctcagggattggcgggcgatgttaccccctcagggattggcgggcggaagtcccgcccctcgccggctgaggggccgccctgagggccagcactggcgtctgcggccgcagcagcactttttgcacagtctggggcggggttccccggcttccaagtcgctgtttcgtcaaagcacgagggccgcctgtggccttaattcctaacggcggccccggttctcccttctcggcaataaaccaggcctagttttgtagctgc

SEQ ID NO: 27069 - DNA, 4704 bp, Homo sapiens
  misc_feature (17)..(17): n is a, c, g, or t
ctcggctctaccttgtntcacagagtggagactgggatgaaggatgtggtgaactgcgttgggggtatgggtgccctgctgcccctgctggagcgagtagctgcacagcccaaagaggctgaagcaggtccagctgaaacgcatgacctcgtgggtcctgaactgacctctggtcacaacacccagggcctggttctcccattgggtaaatcttcagaggaacggatggagaggaacgcagtggctgcttttctgctgatgctgcggaacttccttcagggtcacatggtgaaccaagagagcctggtgcagtgccaggggcctgccatcatcggggccctcctgcgaaaggtcccaagctgggccatggacatgaacgtgctcatgtccgcccagctgctgatggagcaggtggcagctgagggcagcgggcccctcctgtacctactctaccagcatttgctcttcaactttcacctctggaccctcagtgacttcgccgtgcgcctcggtcacatccagtacatgtccagcatagttcgggagcacagacagaagctgcggaagaagtacggcgtccagtttatcttggatgctctgcgcacccactacagcccgcagcgggagcgccccctggctgctgacgacctacgcaccgtgcagacctccctcctgggcctggcgagggagttcctggtgcggagtctctcagcagatgacgtgcaggtcacgcagaccatgctgagctttttggcggccacaggcgatgacggtcaggcggtgggtgcgctggacctgctgctggccctgctgcacggttccctggtgcaggagtccttggctgtctttctgttggagccagggaacctcgaagtgctactggccctgctagtgcggccagggtcactgcccctgctgcccgatcgagtctgcaagatcctgcgcagactgcagcagaatgagcggctacctgagcggagccgccagcgcctccggctgcgggagtgtggtctccagggtctggttgcctgcttgcctgaggggactgtttccccccagctctgccagggcctctacaagctgttcctgggggcagattgcctgaacctctcagatctgctggctgtggtacagctgtccctccaggctgacctcagcgttcgcctagacatctgtcgccagcttttccacctcatctacggacagccagatgtagtgcggcttctggcccgacaggctggctggcaagatgtgctgacccggctatatgtcctggaggctgccacagccggcagcccccctccgtcttccccagagtcacctacctcccccaagccagccccacccaagccacccactgagtcacctgctgagccttcagatgtcttcctgccctcagaggccccctgccctgaccctgatggcttttaccatgctctctccccattctgcacgccctttgacctgggcctggaacggtctagtgtaggatcaggcaacactgctggtggtggcggcagcagtgggactcttactccagccagccagcccggcactccttcgccactggatgggccgcggccctttcctgctgctcctggccgccacagctccagtctctccaatgtgctggaggacggcagcctcccggagcccaccattagcggggatgatacctcgaacaccagcaacccacagcaaacctctgaggaagagttgtgcaatctgctcaccaacgtgctgttctcggtgacgtggcgtggcgtggaaggcagcgatgaggctgcctggcgggagcgtggccaggttttctcagtgctcacccagctgggggcctcagccacacttgtgcgcccaccagactgcatcaagcgcagcctcctggagatgatgctggagtcagccctgaccgacatcaaagaggcccccgtgggggtcctggccagcctcacccagcaagcgctttggctgctgcgtctgctgcaggacttcctgtgtgctgaaggccatggtaaccaggaactgtggagtgagaagctctttgaaggtgtatgcagcctacttgatcgcctgggagcctggccccacctggccaacggcacagctgatctccgtgagatggcgcagattggcctacggcttgtacttggctacatcctgctggaagacccacagctgcatgcccaggcctacgtgagattgcacatgctgctacagactgcagtgccagcccgccgcgaggaggcctgctatgtgctctccaagctggaggctgcactggggcgggtgctgaacacctcttccttggagtcagccactgatgaggcagggtccccacttgcagctgcagcagctgcagcagctgcagagcgctgctcctggctggtgccactggtgcgcacgctgctagaccgtgcctatgagccgctggggctgcagtggggactgccctccctgccacccaccaatggcagccccaccttctttgaagacttccaggctttttgtgccacacccgaatggcgccacttcatcgacaaacaggtacagccaaccatgtcccagttcgaaatggacacgtatgctaagagccacgaccttatgtcaggtttctggaatgcctgctatgacatgcttatgagcagtgggcagcggcgccagtgggagcgcgcccagagtcgtcgggccttccaggagctggtgctggaacctgcgcagaggcgggcgcgcctggaggggctacgctacacggcagtgctgaagcagcaggcaacgcagcactccatggccctgctgcactggggggcgctgtggcgccagctcgccagcccatgtggggcctgggcgctgagggacactcccatcccccgctggaaactgtccagcgccgagacatattcacgcatgcgtctgaagctggtgcccaaccatcacttcgaccctcacctggaagccagcgctctccgagacaatctgggtgaggttcccctgacacccaccgaggaggcctcactgcctctggcagtgaccaaagaggccaaagtgagcaccccacccgagttgctgcaggaggaccagctcggcgaggacgagctggctgagctggagaccccgatggaggcagcagaactggatgagcagcgtgagaagctggtgctgtcggccgagtgccagctggtgacggtagtggccgtggtcccagggctgctggaggtcaccacacagaatgtatacttctacgatggcagcactgagcgcgtggaaaccgaggagggcatcggctatgatttccggcgcccactggcccagctgcgtgaggtccacctgcggcgtttcaacctgcgccgttcagcacttgagctcttctttatcgatcaggccaactacttcctcaacttcccatgcaaggtgggcacgaccccagtctcatctcctagccagactcccagaccccagcctggccccatcccaccccatacccaggtacggaaccaggtgtactcgtggctcctgcgcctacggcccccctctcaaggctacctaagcagccgctccccccaggagatgctgcgtgcctcaggccttacccagaaatgggtacagcgtgagatatccaacttcgagtacttgatgcaactcaacaccattgcggggcggacctacaatgacctgtctcagtaccctgtgttcccctgggtcctgcaggactacgtgtccccaaccctggacctcagcaacccagccgtcttccgggacctgtctaagcccatcggtgtggtgaaccccaagcatgcccagctcgtgagggagaagtatgaaagctttgaggacccagcagggaccattgacaagttccactatggcacccactactccaatgcagcaggcgtgatgcactacctcatccgcgtggagcccttcacctccctgcacgtccagctgcaaagtggccgctttgactgctccgaccggcagttccactcggtggcggcagcctggcaggcacgcctggagagccctgccgatgtgaaggagctcatcccggaattcttctactttcctgacttcctggagaaccagaacggttttgacctgggctgtctccagctgaccaacgagaaggtaggcgatgtggtgctacccccgtgggccagctctcctgaggacttcatccagcagcaccgccaggctctggagtcggagtatgtgtctgcacacctacacgagtggatcgacctcatctttggctacaagcagcgggggccagccgccgaggaggccctcaatgtcttctattactgcacctatgaggcgctgaacctggccagtccggctgctcgggccccgcccccggcaggcctggcccgggaggccccgcccagaagtcggcgggaacaccccggggtgggcagcccaggggggtgagcggggcccaccctgcccagctcagggattggcgggcgatgttaccccctcagggattggcgggcggaagtcccgcccctcgccggctgaggggccgccctgagggccagcactggcgtctgcggccgcagcagcactttttgcacagtctggggcggggttccccggcttccaagtcgctgtttcgtcaaagcacgagggccgcctgtggccttaattcctaacggcggccccggttctcccttctcggcaataaaccaggcctagttttgtagctgc

SEQ ID NO: 27070 - DNA, 265 bp, Homo sapiens
ggtgacgtggcgtggcgtggaaggcagcgatgaggctgcctggcgggagcgtggccaggttttctcagtgctcacccagctgggggcctcagccacacttgtgcgcccaccagactgcatcaagcgcaggtgagagggaaagtctggagggggaggggcttcaggaagcctcgggggaaggagagaagatagtcaggtagacccttgagttccccactcacccgccagcctcctggagatgatgctggagtcagccctgaccgac

SEQ ID NO: 27071 - DNA, 466 bp, Homo sapiens
gcatcggctatgatttccggcgcccactggcccagctgcgtgaggtccacctgcggcgtttcaacctgcgccgttcagcacttgagctcttctttatcgatcaggccaactacttcctcaacttcccatgcaaggtgggcacgaccccagtctcatctcctagccagactcccagaccccagcctggccccatcccaccccatacccaggtacggaaccaggtgtactcgtggctcctgcgcctacggcccccctctcaaggctacctaagcagccgctccccccaggagatgctgcgtgcctcaggccttacccaggtgagagccctgggtgtgagggatgtgaagtcgggaccctgaatcacggggcagtgctggacagcccacctggctcacatcttgtctgcccctgtccccagaaatgggtacagcgtgagatatccaacttcgagtacttgatgcaactc

SEQ ID NO: 27072 - DNA, 401 bp, Homo sapiens
tccccgcctttctttgggacctggctgggtgtgcctactgacctgccagcccgcagcgggagcgccccctggctgctgacgacctacgcaccgtgcagacctccctcctgggcctggcgagggagttcctggtgcggagtctctcagcagatgacgtgcaggtcacgcagaccatgctgagctttttggcggccacaggcgatgacggtcaggtaggctggaggttggggagcgggaggcttgggtgaggggagtgggggcccgacacagtgtgagaccctgcatccccaggcggtgggtgcgctggacctgctgctggccctgctgcacggttccctggtgcaggagtccttggctgtctttctgttggagccagggaacctcgaagtgctactggccct

SEQ ID NO: 27073 - DNA, 394 bp, Homo sapiens
gggctgtagacctggaccatgtgacagatgagcgggaacggaaggctctggagggcattatcagcaactttgggcagactccctgtcagctgctgaaggtaaggccagcttagaggatagtggccagggatgcccatgccatggtgctgaccagccacttacccacaggagccacatccaactcggctctcagctgaggaagcagcccatcgccttgcacgcctggacactaactcacctagcatcttccagcacctggacgaactcaaggcattcttcgcagaggtgaaaggaagacaagacctcaactttatattctgtgaaatgggtttaaccccactgtccttaccaaccacgtggggcagatgggaatcctaatcaaggtcactgattt

SEQ ID NO: 27074 - DNA, 6321 bp, Homo sapiens
  misc_feature (17)..(17): n is a, c, g, or t
ctcggctctaccttgtntcacagagtggagactgggatgaaggatgtggtgaactgcgttgggggtatgggtgccctgctgcccctgctggagcgagtagctgcacagcccaaagaggctgaagcaggtccagctgaaacgcatgacctcgtgggtcctgaactgacctctggtcacaacacccagggcctggttctcccattgggtaaatcttcagaggaacggatggagaggaacgcagtggctgcttttctgctgatgctgcggaacttccttcagggtcacatggtgaaccaagagagcctggtgcagtgccaggggcctgccatcatcggggccctcctgcgaaaggtcccaagctgggccatggacatgaacgtgctcatgtccgcccagctgctgatggagcaggtggcagctgagggcagcgggcccctcctgtacctactctaccagcatttgctcttcaactttcacctctggaccctcagtgacttcgccgtgcgcctcggtcacatccagtacatgtccagcatagttcgggagcacagacagaagctgcggaagaagtacggcgtccagtttatcttggatgctctgcgcacccactacagcccgcagcgggagcgccccctggctgctgacgacctacgcaccgtgcagacctccctcctgggcctggcgagggagttcctggtgcggagtctctcagcagatgacgtgcaggtcacgcagaccatgctgagctttttggcggccacaggcgatgacggtcaggcggtgggtgcgctggacctgctgctggccctgctgcacggttccctggtgcaggagtccttggctgtctttctgttggagccagggaacctcgaagtgctactggccctgctagtgcggccagggtcactgcccctgctgcccgatcgagtctgcaagatcctgcgcagactgcagcagaatgagcggctacctgagcggagccgccagcgcctccggctgcgggagtgtggtctccagggtctggttgcctgcttgcctgaggggactgtttccccccagctctgccagggcctctacaagctgttcctgggggcagattgcctgaacctctcagatctgctggctgtggtacagctgtccctccaggctgacctcagcgttcgcctagacatctgtcgccagcttttccacctcatctacggacagccagatgtagtgcggcttctggcccgacaggctggctggcaagatgtgctgacccggctatatgtcctggaggctgccacagccggcagcccccctccgtcttccccagagtcacctacctcccccaagccagccccacccaagccacccactgagtcacctgctgagccttcagatgtcttcctgccctcagaggccccctgccctgaccctgatggcttttaccatgctctctccccattctgcacgccctttgacctgggcctggaacggtctagtgtaggatcaggcaacactgctggtggtggcggcagcagtgggactcttactccagccagccagcccggcactccttcgccactggatgggccgcggccctttcctgctgctcctggccgccacagctccagtctctccaatgtgctggaggacggcagcctcccggagcccaccattagcggggatgatacctcgaacaccagcaacccacagcaaacctctgaggaagagttgtgcaatctgctcaccaacgtgctgttctcggtgacgtggcgtggcgtggaaggcagcgatgaggctgcctggcgggagcgtggccaggttttctcagtgctcacccagctgggggcctcagccacacttgtgcgcccaccagactgcatcaagcgcagcctcctggagatgatgctggagtcagccctgaccgacatcaaagaggcccccgtgggggtcctggccagcctcacccagcaagcgctttggctgctgcgtctgctgcaggacttcctgtgtgctgaaggccatggtaaccaggaactgtggagtgagaagctctttgaaggtgtatgcagcctacttgatcgcctgggagcctggccccacctggccaacggcacagctgatctccgtgagatggcgcagattggcctacggcttgtacttggctacatcctgctggaagacccacagctgcatgcccaggcctacgtgagattgcacatgctgctacagactgcagtgccagcccgccgcgaggaggcctgctatgtgctctccaagctggaggctgcactggggcgggtgctgaacacctcttccttggagtcagccactgatgaggcagggtccccacttgcagctgcagcagctgcagcagctgcagagcgctgctcctggctggtgccactggtgcgcacgctgctagaccgtgcctatgagccgctggggctgcagtggggactgccctccctgccacccaccaatggcagccccaccttctttgaagacttccaggctttttgtgccacacccgaatggcgccacttcatcgacaaacaggtacagccaaccatgtcccagttcgaaatggacacgtatgctaagagccacgaccttatgtcaggtttctggaatgcctgctatgacatgcttatgagcagtgggcagcggcgccagtgggagcgcgcccagagtcgtcgggccttccaggagctggtgctggaacctgcgcagaggcgggcgcgcctggaggggctacgctacacggcagtgctgaagcagcaggcaacgcagcactccatggccctgctgcactggggggcgctgtggcgccagctcgccagcccatgtggggcctgggcgctgagggacactcccatcccccgctggaaactgtccagcgccgagacatattcacgcatgcgtctgaagctggtgcccaaccatcacttcgaccctcacctggaagccagcgctctccgagacaatctgggtgaggttcccctgacacccaccgaggaggcctcactgcctctggcagtgaccaaagaggccaaagtgagcaccccacccgagttgctgcaggaggaccagctcggcgaggacgagctggctgagctggagaccccgatggaggcagcagaactggatgagcagcgtgagaagctggtgctgtcggccgagtgccagctggtgacggtagtggccgtggtcccagggctgctggaggtcaccacacagaatgtatacttctacgatggcagcactgagcgcgtggaaaccgaggagggcatcggctatgatttccggcgcccactggcccagctgcgtgaggtccacctgcggcgtttcaacctgcgccgttcagcacttgagctcttctttatcgatcaggccaactacttcctcaacttcccatgcaaggtgggcacgaccccagtctcatctcctagccagactcccagaccccagcctggccccatcccaccccatacccaggtacggaaccaggtgtactcgtggctcctgcgcctacggcccccctctcaaggctacctaagcagccgctccccccaggagatgctgcgtgcctcaggccttacccagaaatgggtacagcgtgagatatccaacttcgagtacttgatgcaactcaacaccattgcggggcggacctacaatgacctgtctcagtaccctgtgttcccctgggtcctgcaggactacgtgtccccaaccctggacctcagcaacccagccgtcttccgggacctgtctaagcccatcggtgtggtgaaccccaagcatgcccagctcgtgagggagaagtatgaaagctttgaggacccagcagggaccattgacaagttccactatggcacccactactccaatgcagcaggcgtgatgcactacctcatccgcgtggagcccttcacctccctgcacgtccagctgcaaagtggccgctttgactgctccgaccggcagttccactcggtggcggcagcctggcaggcacgcctggagagccctgccgatgtgaaggagctcatcccggaattcttctactttcctgacttcctggagaaccagaacggttttgacctgggctgtctccagctgaccaacgagaaggtaggcgatgtggtgctacccccgtgggccagctctcctgaggacttcatccagcagcaccgccaggctctggagtcggagtatgtgtctgcacacctacacgagtggatcgacctcatctttggctacaagcagcgggggccagccgccgaggaggccctcaatgtcttctattactgcacctatgagggggctgtagacctggaccatgtgacagatgagcgggaacggaaggctctggagggcattatcagcaactttgggcagactccctgtcagctgctgaaggagccacatccaactcggctctcagctgaggaagcagcccatcgccttgcacgcctggacactaactcacctagcatcttccagcacctggacgaactcaaggcattcttcgcagaggttgtcagtgatggtgtacccctggtgctagccctggtcccccaccggcagccccactccttcatcacccagggttccccagacctgttggtgactgtgagtgccagtgggctgctgggcacccacagctggttgccctatgaccgcaacataagcaactacttcagcttcagcaaagaccccaccatgggcagccacaagacgcagcgactgctgagtggcccgtgggtgccaggcagtggtgtgagtggacaagcactggcagtggccccggatggaaagctgctattcagcggtggccactgggatggcagcctgcgggtgactgcactaccccgtggcaagctgttgagccagctcagctgccaccttggtatgaacagccttggagctggggagaatgaggcacacaggtatggggccgggttctgaggctggccagggcggatgtgactcctccgttctgcctgtaccctccccttcccatgcagatgtagtaacctgccttgcactggacacctgtggcatctacctcatctcaggctcccgggacaccacgtgcatggtgtggcggctcctgcatcaggtgtgcctcgtgggcagctctgtggggcccccgtagcccagacctgcagcccatccgtccctcagtggccttccagtcctgtcctcctctagtcttggacaaggccttcatttcctgagcctcaggggacagtcctaagccaaccctggtcctccacagggtggtctgtcagtaggcctggcaccaaagcctgtgcaggtcctgtatgggcatggggctgcagtgagctgtgtggccatcagcactgaacttgacatggctgtgtctggatctgaggatggaactgtgatcatacacactgtacgccgcggacagtttgtagcggcactacggcctctgggtgccacattccctggacctattttccacctggcattggggtccgaaggccagattgtggtacagagctcagcgtgggaacgtcctggggcccaggtcacctactccttgcacctgtattcagtcaatgggaagttgcgggcttcactgcccctggcagagcagcctacagccctgacggtgacagaggactttgtgttgctgggcaccgcccagtgcgccctgcacatcctccaactaaacacactgctcccggccgcgcctcccttgcccatgaaggtggccatccgcagcgtggccgtgaccaaggagcgcagccacgtgctggtgggcctggaggatggcaagctcatcgtggtggtcgcggggcagccctctgaggtgcgcagcagccagttcgcgcggaagctgtggcggtcctcgcggcgcatctcccaggtgtcctcgggagagacggaatacaaccctactgaggcgcgctgaacctggccagtccggctgctcgggccccgcccccggcaggcctggcccgggaggccccgcccagaagtcggcgggaacaccccggggtgggcagcccaggggggtgagcggggcccaccctgcccagctcagggattggcgggcgatgttaccccctcagggattggcgggcggaagtcccgcccctcgccggctgaggggccgccctgagggccagcactggcgtctgcggccgcagcagcactttttgcacagtctggggcggggttccccggcttccaagtcgctgtttcgtcaaagcacgagggccgcctgtggccttaattcctaacggcggccccggttctcccttctcggcaataaaccaggcctagttttgtagctgc

SEQ ID NO: 27075 - DNA, 2412 bp, Homo sapiens
agaattctcgcctgccacgcgggcggactacaatgacctgtctcagtaccctgtgttcccctgggtcctgcaggactacgtgtccccaaccctggacctcagcaacccagccgtcttccgggacctgtctaagcccatcggtgtggtgaaccccaagcatgcccagctcgtgagggagaagtatgaaagctttgaggacccagcagggaccattgacaagttccactatggcacccactactccaatgcagcaggcgtgatgcactacctcatccgcgtggagcccttcacctccctgcacgtccagctgcaaagtggccgctttgactgctccgaccggcagttccactcggtggcggcagcctggcaggcacgcctggagagccctgccgatgtgaaggagctcatcccggaattcttctactttcctgacttcctggagaaccagaacggttttgacctgggctgtctccagctgaccaacgagaaggtaggcgatgtggtgctacccccgtgggccagctctcctgaggacttcatccagcagcaccgccaggctctggagtcggagtatgtgtctgcacacctacacgagtggatcgacctcatctttggctacaagcagcgggggccagccgccgaggaggccctcaatgtcttctattactgcacctatgagggggctgtagacctggaccatgtgacagatgagcgggaacggaaggctctggagggcattatcagcaactttgggcagactccctgtcagctgctgaaggagccacatccaactcggctctcagctgaggaagcagcccatcgccttgcacgcctggacactaactcacctagcatcttccagcacctggacgaactcaaggcattcttcgcagaggttgtcagtgatggtgtacccctggtgctagccctggtcccccaccggcagccccactccttcatcacccagggttccccagacctgttggtgactgtgagtgccagtgggctgctgggcacccacagctggttgccctatgaccgcaacataagcaactacttcagcttcagcaaagaccccaccatgggcagccacaagacgcagcgactgctgagtggcccgtgggtgccaggcagtggtgtgagtggacaagcactggcagtggccccggatggaaagctgctattcagcggtggccactgggatggcagcctgcgggtgactgcactaccccgtggcaagctgttgagccagctcagctgccaccttgatgtagtaacctgccttgcactggacacctgtggcatctacctcatctcaggctcccgggacaccacgtgcatggtgtggcggctcctgcatcagggtggtctgtcagtaggcctggcaccaaagcctgtgcaggtcctgtatgggcatggggctgcagtgagctgtgtggccatcagcactgaacttgacatggctgtgtctggatctgaggatggaactgtgatcatacacactgtacgccgcggacagtttgtagcggcactacggcctctgggtgccacattccctggacctattttccacctggcattggggtccgaaggccagattgtggtacagagctcagcgtgggaacgtcctggggcccaggtcacctactccttgcacctgtattcagtcaatgggaagttgcgggcttcactgcccctggcagagcagcctacagccctgacggtgacagaggactttgtgttgctgggcaccgcccagtgcgccctgcacatcctccaactaaacacactgctcccggccgcgcctcccttgcccatgaaggtggccatccgcagcgtggccgtgaccaaggagcgcagccacgtgctggtgggcctggaggatggcaagctcatcgtggtggtcgcggggcagccctctgaggtgcgcagcagccagttcgcgcggaagctgtggcggtcctcgcggcgcatctcccaggtgtcctcgggagagacggaatacaaccctactgaggcgcgctgaacctggccagtccggctgctcgggccccgcccccggcaggcctggcccgggaggccccgcccagaagtcggcgggaacaccccggggtgggcagcccaggggggtgagcggggcccaccctgcccagctcagggattggcgggcgatgttaccccctcagggattggcgggcggaagtcccgcccctcgccggctgaggggccgccctgagggccagcactggcgtctgcggccgcagcagcactttttgcacagtctggggcggggttccccggcttccaagtcgctgtttcgtcaaagcacgagggccgcctgtggccttaattcctaacggcggccccggttctcccttctcggcaataaaccaggcctagttttgtagctgc

SEQ ID NO: 27076 - DNA, 1998 bp, Homo sapiens
acgatggtcctcagctcaacgatggtcctcagctcaacgttttgacctgggctgtctccagctgaccaacgagaaggtaggcgatgtggtgctacccccgtgggccagctctcctgaggacttcatccagcagcaccgccaggctctggagtcggagtatgtgtctgcacacctacacgagtggatcgacctcatctttggctacaagcagcgggggccagccgccgaggaggccctcaatgtcttctattactgcacctatgagggggctgtagacctggaccatgtgacagatgagcgggaacggaaggctctggagggcattatcagcaactttgggcagactccctgtcagctgctgaaggagccacatccaactcggctctcagctgaggaagcagcccatcgccttgcacgcctggacactaactcacctagcatcttccagcacctggacgaactcaaggcattcttcgcagaggttgtcagtgatggtgtacccctggtgctagccctggtcccccaccggcagccccactccttcatcacccagggttccccagacctgttggtgactgtgagtgccagtgggctgctgggcacccacagctggttgccctatgaccgcaacataagcaactacttcagcttcagcaaagaccccaccatgggcagccacaagacgcagcgactgctgagtggcccgtgggtgccaggcagtggtgtgagtggacaagcactggcagtggccccggatggaaagctgctattcagcggtggccactgggatggcagcctgcgggtgactgcactaccccgtggcaagctgttgagccagctcagctgccaccttgatgtagtaacctgccttgcactggacacctgtggcatctacctcatctcaggctcccgggacaccacgtgcatggtgtggcggctcctgcatcagggtggtctgtcagtaggcctggcaccaaagcctgtgcaggtcctgtatgggcatggggctgcagtgagctgtgtggccatcagcactgaacttgacatggctgtgtctggatctgaggatggaactgtgatcatacacactgtacgccgcggacagtttgtagcggcactacggcctctgggtgccacattccctggacctattttccacctggcattggggtccgaaggccagattgtggtacagagctcagcgtgggaacgtcctggggcccaggtcacctactccttgcacctgtattcagtcaatgggaagttgcgggcttcactgcccctggcagagcagcctacagccctgacggtgacagaggactttgtgttgctgggcaccgcccagtgcgccctgcacatcctccaactaaacacactgctcccggccgcgcctcccttgcccatgaaggtggccatccgcagcgtggccgtgaccaaggagcgcagccacgtgctggtgggcctggaggatggcaagctcatcgtggtggtcgcggggcagccctctgaggtgcgcagcagccagttcgcgcggaagctgtggcggtcctcgcggcgcatctcccaggtgtcctcgggagagacggaatacaaccctactgaggcgcgctgaacctggccagtccggctgctcgggccccgcccccggcaggcctggcccgggaggccccgcccagaagtcggcgggaacaccccggggtgggcagcccaggggggtgagcggggcccaccctgcccagctcagggattggcgggcgatgttaccccctcagggattggcgggcggaagtcccgcccctcgccggctgaggggccgccctgagggccagcactggcgtctgcggccgcagcagcactttttgcacagtctggggcggggttccccggcttccaagtcgctgtttcgtcaaagcacgagggccgcctgtggccttaattcctaacggcggccccggttctcccttctcggcaataaaccaggcctagttttgtagctgc

SEQ ID NO: 27077 - DNA, 1245 bp, Homo sapiens
ctacaggattaagttaagcgtcggtggccactgggatggcagcctgcgggtgactgcactaccccgtggcaagctgttgagccagctcagctgccaccttgatgtagtaacctgccttgcactggacacctgtggcatctacctcatctcaggctcccgggacaccacgtgcatggtgtggcggctcctgcatcagggtggtctgtcagtaggcctggcaccaaagcctgtgcaggtcctgtatgggcatggggctgcagtgagctgtgtggccatcagcactgaacttgacatggctgtgtctggatctgaggatggaactgtgatcatacacactgtacgccgcggacagtttgtagcggcactacggcctctgggtgccacattccctggacctattttccacctggcattggggtccgaaggccagattgtggtacagagctcagcgtgggaacgtcctggggcccaggtcacctactccttgcacctgtattcagtcaatgggaagttgcgggcttcactgcccctggcagagcagcctacagccctgacggtgacagaggactttgtgttgctgggcaccgcccagtgcgccctgcacatcctccaactaaacacactgctcccggccgcgcctcccttgcccatgaaggtggccatccgcagcgtggccgtgaccaaggagcgcagccacgtgctggtgggcctggaggatggcaagctcatcgtggtggtcgcggggcagccctctgaggtgcgcagcagccagttcgcgcggaagctgtggcggtcctcgcggcgcatctcccaggtgtcctcgggagagacggaatacaaccctactgaggcgcgctgaacctggccagtccggctgctcgggccccgcccccggcaggcctggcccgggaggccccgcccagaagtcggcgggaacaccccggggtgggcagcccaggggggtgagcggggcccaccctgcccagctcagggattggcgggcgatgttaccccctcagggattggcgggcggaagtcccgcccctcgccggctgaggggccgccctgagggccagcactggcgtctgcggccgcagcagcactttttgcacagtctggggcggggttccccggcttccaagtcgctgtttcgtcaaagcacgagggccgcctgtggccttaattcctaacggcggccccggttctcccttctcggcaataaaccaggcctagttttgtagctgc

SEQ ID NO: 27078 - DNA, 1811 bp, Homo sapiens
gcaggctgtactggcccgaggtcgtatgattgggcagccacaagtaggacagagggctgtgggtggggtgggctacaaatgccctgcacccggaattattcccctccctaatcagaatgtaggccagctgcaggggaaaggtctggccaggctccctgagggcctgggtctcttccatgtggcctggcctcacttgctatccccctcactgggtcaggacgcagcgactgctgagtggcccgtgggtgccaggcagtggtgtgagtggacaagcactggcagtggccccggatggaaagctgctattcagcggtggccactgggatggcagcctgcgggtgactgcactaccccgtggcaagctgttgagccagctcagctgccaccttggtatgaacagccttggagctggggagaatgaggcacacaggtatggggccgggttctgaggctggccagggcggatgtgactcctccgttctgcctgtaccctccccttcccatgcagatgtagtaacctgccttgcactggacacctgtggcatctacctcatctcaggctcccgggacaccacgtgcatggtgtggcggctcctgcatcaggtgtgcctcgtgggcagctctgtggggcccccgtagcccagacctgcagcccatccgtccctcagtggccttccagtcctgtcctcctctagtcttggacaaggccttcatttcctgagcctcaggggacagtcctaagccaaccctggtcctccacagggtggtctgtcagtaggcctggcaccaaagcctgtgcaggtcctgtatgggcatggggctgcagtgagctgtgtggccatcagcactgaacttgacatggctgtgtctggatctgaggatggaactgtgatcatacacactgtacgccgcggacagtttgtagcggcactacggcctctgggtgccacattccctggacctattttccacctggcattggggtccgaaggccagattgtggtacagagctcagcgtgggaacgtcctggggcccaggtcacctactccttgcacctgtattcagtcaatgggaagttgcgggcttcactgcccctggcagagcagcctacagccctgacggtgacagaggactttgtgttgctgggcaccgcccagtgcgccctgcacatcctccaactaaacacactgctcccggccgcgcctcccttgcccatgaaggtggccatccgcagcgtggccgtgaccaaggagcgcagccacgtgctggtgggcctggaggatggcaagctcatcgtggtggtcgcggggcagccctctgaggtgcgcagcagccagttcgcgcggaagctgtggcggtcctcgcggcgcatctcccaggtgtcctcgggagagacggaatacaaccctactgaggcgcgctgaacctggccagtccggctgctcgggccccgcccccggcaggcctggcccgggaggccccgcccagaagtcggcgggaacaccccggggtgggcagcccaggggggtgagcggggcccaccctgcccagctcagggattggcgggcgatgttaccccctcagggattggcgggcggaagtcccgcccctcgccggctgaggggccgccctgagggccagcactggcgtctgcggccgcagcagcactttttgcacagtctggggcggggttccccggcttccaagtcgctgtttcgtcaaagcacgagggccgcctgtggccttaattcctaacggcggccccggttctcccttctcggcaataaaccaggcctagttttgtagctgc

SEQ ID NO: 27079 - DNA, 5864 bp, Homo sapiens
  misc_feature (17)..(17): n is a, c, g, or t
ctcggctctaccttgtntcacagagtggagactgggatgaaggatgtggtgaactgcgttgggggtatgggtgccctgctgcccctgctggagcgagtagctgcacagcccaaagaggctgaagcaggtccagctgaaacgcatgacctcgtgggtcctgaactgacctctggtcacaacacccagggcctggttctcccattgggtaaatcttcagaggaacggatggagaggaacgcagtggctgcttttctgctgatgctgcggaacttccttcagggtcacatggtgaaccaagagagcctggtgcagtgccaggggcctgccatcatcggggccctcctgcgaaaggtcccaagctgggccatggacatgaacgtgctcatgtccgcccagctgctgatggagcaggtggcagctgagggcagcgggcccctcctgtacctactctaccagcatttgctcttcaactttcacctctggaccctcagtgacttcgccgtgcgcctcggtcacatccagtacatgtccagcatagttcgggagcacagacagaagctgcggaagaagtacggcgtccagtttatcttggatgctctgcgcacccactacagcccgcagcgggagcgccccctggctgctgacgacctacgcaccgtgcagacctccctcctgggcctggcgagggagttcctggtgcggagtctctcagcagatgacgtgcaggtcacgcagaccatgctgagctttttggcggccacaggcgatgacggtcaggcggtgggtgcgctggacctgctgctggccctgctgcacggttccctggtgcaggagtccttggctgtctttctgttggagccagggaacctcgaagtgctactggccctgctagtgcggccagggtcactgcccctgctgcccgatcgagtctgcaagatcctgcgcagactgcagcagaatgagcggctacctgagcggagccgccagcgcctccggctgcgggagtgtggtctccagggtctggttgcctgcttgcctgaggggactgtttccccccagctctgccagggcctctacaagctgttcctgggggcagattgcctgaacctctcagatctgctggctgtggtacagctgtccctccaggctgacctcagcgttcgcctagacatctgtcgccagcttttccacctcatctacggacagccagatgtagtgcggcttctggcccgacaggctggctggcaagatgtgctgacccggctatatgtcctggaggctgccacagccggcagcccccctccgtcttccccagagtcacctacctcccccaagccagccccacccaagccacccactgagtcacctgctgagccttcagatgtcttcctgccctcagaggccccctgccctgaccctgatggcttttaccatgctctctccccattctgcacgccctttgacctgggcctggaacggtctagtgtaggatcaggcaacactgctggtggtggcggcagcagtgggactcttactccagccagccagcccggcactccttcgccactggatgggccgcggccctttcctgctgctcctggccgccacagctccagtctctccaatgtgctggaggacggcagcctcccggagcccaccattagcggggatgatacctcgaacaccagcaacccacagcaaacctctgaggaagagttgtgcaatctgctcaccaacgtgctgttctcggtgacgtggcgtggcgtggaaggcagcgatgaggctgcctggcgggagcgtggccaggttttctcagtgctcacccagctgggggcctcagccacacttgtgcgcccaccagactgcatcaagcgcagcctcctggagatgatgctggagtcagccctgaccgacatcaaagaggcccccgtgggggtcctggccagcctcacccagcaagcgctttggctgctgcgtctgctgcaggacttcctgtgtgctgaaggccatggtaaccaggaactgtggagtgagaagctctttgaaggtgtatgcagcctacttgatcgcctgggagcctggccccacctggccaacggcacagctgatctccgtgagatggcgcagattggcctacggcttgtacttggctacatcctgctggaagacccacagctgcatgcccaggcctacgtgagattgcacatgctgctacagactgcagtgccagcccgccgcgaggaggcctgctatgtgctctccaagctggaggctgcactggggcgggtgctgaacacctcttccttggagtcagccactgatgaggcagggtccccacttgcagctgcagcagctgcagcagctgcagagcgctgctcctggctggtgccactggtgcgcacgctgctagaccgtgcctatgagccgctggggctgcagtggggactgccctccctgccacccaccaatggcagccccaccttctttgaagacttccaggctttttgtgccacacccgaatggcgccacttcatcgacaaacaggtacagccaaccatgtcccagttcgaaatggacacgtatgctaagagccacgaccttatgtcaggtttctggaatgcctgctatgacatgcttatgagcagtgggcagcggcgccagtgggagcgcgcccagagtcgtcgggccttccaggagctggtgctggaacctgcgcagaggcgggcgcgcctggaggggctacgctacacggcagtgctgaagcagcaggcaacgcagcactccatggccctgctgcactggggggcgctgtggcgccagctcgccagcccatgtggggcctgggcgctgagggacactcccatcccccgctggaaactgtccagcgccgagacatattcacgcatgcgtctgaagctggtgcccaaccatcacttcgaccctcacctggaagccagcgctctccgagacaatctgggtgaggttcccctgacacccaccgaggaggcctcactgcctctggcagtgaccaaagaggccaaagtgagcaccccacccgagttgctgcaggaggaccagctcggcgaggacgagctggctgagctggagaccccgatggaggcagcagaactggatgagcagcgtgagaagctggtgctgtcggccgagtgccagctggtgacggtagtggccgtggtcccagggctgctggaggtcaccacacagaatgtatacttctacgatggcagcactgagcgcgtggaaaccgaggagggcatcggctatgatttccggcgcccactggcccagctgcgtgaggtccacctgcggcgtttcaacctgcgccgttcagcacttgagctcttctttatcgatcaggccaactacttcctcaacttcccatgcaaggtgggcacgaccccagtctcatctcctagccagactcccagaccccagcctggccccatcccaccccatacccaggtacggaaccaggtgtactcgtggctcctgcgcctacggcccccctctcaaggctacctaagcagccgctccccccaggagatgctgcgtgcctcaggccttacccagaaatgggtacagcgtgagatatccaacttcgagtacttgatgcaactcaacaccattgcggggcggacctacaatgacctgtctcagtaccctgtgttcccctgggtcctgcaggactacgtgtccccaaccctggacctcagcaacccagccgtcttccgggacctgtctaagcccatcggtgtggtgaaccccaagcatgcccagctcgtgagggagaagtatgaaagctttgaggacccagcagggaccattgacaagttccactatggcacccactactccaatgcagcaggcgtgatgcactacctcatccgcgtggagcccttcacctccctgcacgtccagctgcaaagtggccgctttgactgctccgaccggcagttccactcggtggcggcagcctggcaggcacgcctggagagccctgccgatgtgaaggagctcatcccggaattcttctactttcctgacttcctggagaaccagaacggttttgacctgggctgtctccagctgaccaacgagaaggtaggcgatgtggtgctacccccgtgggccagctctcctgaggacttcatccagcagcaccgccaggctctggagtcggagtatgtgtctgcacacctacacgagtggatcgacctcatctttggctacaagcagcgggggccagccgccgaggaggccctcaatgtcttctattactgcacctatgagggggctgtagacctggaccatgtgacagatgagcgggaacggaaggctctggagggcattatcagcaactttgggcagactccctgtcagctgctgaaggagccacatccaactcggctctcagctgaggaagcagcccatcgccttgcacgcctggacactaactcacctagcatcttccagcacctggacgaactcaaggcattcttcgcagaggttgtcagtgatggtgtacccctggtgctagccctggtcccccaccggcagccccactccttcatcacccagggttccccagacctgttggtgactgtgagtgccagtgggctgctgggcacccacagctggttgccctatgaccgcaacataagcaactacttcagcttcagcaaagaccccaccatgggcagccacaagacgcagcgactgctgagtggcccgtgggtgccaggcagtggtgtgagtggacaagcactggcagtggccccggatggaaagctgctattcagcggtggccactgggatggcagcctgcgggtgactgcactaccccgtggcaagctgttgagccagctcagctgccaccttgatgtagtaacctgccttgcactggacacctgtggcatctacctcatctcaggctcccgggacaccacgtgcatggtgtggcggctcctgcatcagggtggtctgtcagtaggcctggcaccaaagcctgtgcaggtcctgtatgggcatggggctgcagtgagctgtgtggccatcagcactgaacttgacatggctgtgtctggatctgaggatggaactgtgatcatacacactgtacgccgcggacagtttgtagcggcactacggcctctgggtgccacattccctggacctattttccacctggcattggggtccgaaggccagattgtggtacagagctcagcgtgggaacgtcctggggcccaggtatggggaaggggtgcccagcaaagatggaggggcagttgggatcctgtccttgctgacactccctgcttcctccaggtcacctactccttgcacctgtattcagtcaatgggaagttgcgggcttcactgcccctggcagagcagcctacagccctgacggtgacagaggactttgtgttgctgggcaccgcccagtgcgccctgcacatcctccaactaaacacactgctcccggccgcgcctcccttgcccatgaaggtggccatccgcagcgtggccgtgaccaaggagcgcagccacgtgctggtgggcctggaggatggcaagctcatcgtggtggtcgcggggcagccctctgaggtgaggatggggcgggggtggggaggcccctcgccggctgaggggccgccctgagggccagcactggcgtctgcggccgcagcagcactttttgcacagtctggggcggggttccccggcttccaagtcgctgtttcgtcaaagcacgagggccgcctgtggccttaattcctaacggcggccccggttctcccttctcggcaataaaccaggcctagttttgtagctgc

SEQ ID NO: 27080 - DNA, 862 bp, Homo sapiens
ctagaggatccccagactcggcaccgttcgctgccctccctcagtgagcctttctcctcctgctgtatcggctccgctggataccgcatcgactctaccctcgcaggcacccaggacactcggtggggcagccccacatccctggagggtgagctgggggctgtggccatctttcacgaagccctgcaggcgacggctctgaggaccctgtgcaccctggggcccaatgagacggcacccttcaagcctgagggggagctgcatgagctcagcaccaggctgctcctccattactcacctcaggtatttgggggccccaggggagtggttggctcgactgtgctacttccccggctcccacactctgcctgccaccccctcctccctctgaccctggctgcctgcccattcccctatccctaggcttgtaagaacaacatctgcctggacctgtcccccagtcatgggcttgatgggcgcctgacgggccacagagtggagacctgggatgtgaaggatgtggtgaactgcgttgggggtatgggtgccctgctgcccctgctggagcgagtagctgcacagcccaaagaggctgaagcaggtccagctgaaacgcatgacctcgtgggtcctgaactgacctctggtcacaacacccagggcctggttctcccattgggtaaatcttcagaggaacggatggagaggaacgcagtggctgcttttctgctgatgctgcggaacttccttcagggtcacatggtgaaccaagagagcctggtgcagtgccaggggcctgccatcatcggggccctcctgcgaaaggtccaagctgggcatggactgaacgtctcatgtctgc

SEQ ID NO: 27081 - DNA, 638 bp, Homo sapiens
ttgtgcttgtatatttctggttttgcaatttccagatcatatattacctaaaattttatattctgcttttttccccatttaccattttttcattatataaatttatatatactcttcataaatatttgtagtggctgcataatagtctatcatataggatttttatatgctttcaggttttttcaaataataatggaatttttttcaaatcatttttgtaatagatataacaaataagtccccaaataagtctttaccctaattctgccctgcagaagtaaccattatttattaatagttttctgtgtatctttatatgaacattattatgcataagtttttgtctacgtttttggttattttcttatgatacatatctacaaatagattactagattaaacaatatgaaagtaattttttcctaattgtatatgatggtactatttagaaaacatgaaaaataatgtgttaagggggaaagtaaaaggcacccataattccacaactcagaaatgaacattatttggtatacttccttacacgtatacatacacatatacaaactcacaagtatgtggggagagggataaatatgtatatgatatatctatctgtctataaatatttgtatatatag

SEQ ID NO: 27082 - DNA, 311 bp, Homo sapiens
tttttttttctaaggcactttaggcatacttttaaaaacaaaatttagtttttatacatacttacctttcaaaaacaaaatttagtttatatacatatatatcttaaaagcaggccaggcgtggtggctcacgcctgtaattccagcactttgggaggccaaggcgggaggatcacttgaggtcaggagtttgagaccagcctagccaacatggtgaaaccccgtctctactaaaaatacaaaaaaattagccaggtgtggtggtgggcacctgtaatccaagttacttgggaggctgaggcacaaggatc

SEQ ID NO: 27083 - DNA, 631 bp, Homo sapiens
atgattcagagaaaggagttgcttctgaccggggggaaaacaaagaaattatcatggaagagatgtcatttgattttgctttgaagtagtagttcatgtaaaaatttatgtgagaggctttttaggcagaaggaatagcctgagaaaaggcatagtggcatgcaaatgtggtttgtgtgtaagaaagttggttattctgtttggcttcgatttggcttatcaaagagagttctgggagaaaagttgttcaacattggtttgaggccaaataatggatatccctagatgccagacaagtgaagatttttaaactggggacaatgacgtaatcagagtatactttagaaatattaatgtgacaacagatgaataggggaaattttaggaaaagaaactggatcagataagtaggagggagacaagtctggaagcaatcaatgtgtaggataaactgggacctgctctcagctgaggcaattaaactggaaaagaaatagattgaaaagatactacagaagaagcagtacagaagttgggggactgaaggagagggagccactgcaggtgctagctgcttaaggggataccagtccttttacagatataatagatacagcttctgaggtggagg

SEQ ID NO: 27084 - DNA, 494 bp, Homo sapiens
taaaatatttcattgtgttttatttaggaaaaaaatggtagatgaaagcggaaccaacaggggcattccgtttgtggtttgctgagattccctggaaagcaagcttgggaggccagggtctgtcagaacacaagaccaatgtcttctccaaaacttggatgaacagaaggtgcttacaagctgacagggagttatggggaaggaagcagaatttccagtttggttccaagtcttttctggtcttgacctttagcctaaaaacagagggcccagttgttctccattattactgtaactcaaaaggagacacatgggtccgggagagagttgggaggcaatactaggtttgcacgttctgagttcatggacacccaaggaactgcccctccctaggataactagagccaagccactggacccttctcatcctgtggccttgtctacaattttaatcattttgaagatgaaggttttgaagatgaaggcccagcctc

SEQ ID NO: 27085 - DNA, 183 bp, Homo sapiens
tacttgttcagggcctttatttttctttctatttcatatacacccacactgaacagtctgcattgtgttaataaataaccagcagcaactaagtgaacagaggagggtttcgatgttgctgtcaggtaccagacagttgcttggcactgcggatacagttctctacatatgagctgcatgctc

SEQ ID NO: 27086 - DNA, 1464 bp, Homo sapiens
tattttataaatataattttattacttggaaatacatacaaaaattcaaacacagctaaaaaacagttgctaagcagaggtcctatccaacctggtttaatgaacataaagttattatcagcataaaacttgagtcctgaaacaacttactgtcttcagggtcttcaaataatgggtttaaaaacagataactgttttgttctttacagctatttaaatctttcccccaaatacagagtactaacatttgtttggttcatgaggttttattttagaaaaatagctaaagctattagctaatgatttgaaaactgcagtacgtttgctcatttccagtcttctgtcaccttacattctccatggtttctcaaaaattcccaacagttgttaatagaaagcatttgcaacctccagcagctctctaggatacagaagtgtgggtctaacaaccttgaaatcatttaaggtgacaataattttttttttttttacttttcatttttgcaatttcatgtcattttattttggtccagccatatctccttgtaggagaaaaaaaaactgagttattctgttcttcctgattgtcaatccattacactactttatccattcctttttgccctcaggtttaaaaaagaaaaaaaaaaaagccttcttgacaaccttagcattttctataaatttaagcttattgtgagcttgaacatttcaaacacttctatatttcactctcctctctgtagcttttgtcatgccagttttcccttcttttgcaaatgatctttgacaacctggcttcatcagagagctctgagatgccttagatgcccattctctatcttattggctaggttcttttaatttaaagaaaaaaataatttgtagaatgtcatctaaaagtttccatccttttatggtccccctcacaatttgaaaaactcgaagaggtagctggctaagaagcagaaaggcccccttttggttctggggactcaaccgtgttcttcagtctggtcttgcatcctctcttcccagctgagaagcctgaggccccgagtagatcagataaaccggggaagacttctaccctgaaatgggtctgattcacggttcagagggggaacaagtaagtctaaatttgagacgtgcttccacactattctttctcaaactttaaagtgaacatacttccttgcttgcaatctgttgatggatctcttctgcctacaatatatactacaaaccccttagtctggcacacaaggccctgtgtgaccagctcccatttctttttctagcttccccaaccccaaatgccttactaaaagaacttttttctctaatgcattaggctgtttcatacctttgctcagattattccctctcagccagatccctacctcctgagaacacctattcatctttttaaagctcaaaataaaaataatgtcctcaaatctc

SEQ ID NO: 27087 - DNA, 407 bp, Homo sapiens
aatacttctctctgcattatacagctgttatagccttttgattttgaggatacgatgtgagtgtagctttcacttgggttgcagggtagttgctgtgcacaactgcaaggactttggactcagaaagatatgaattaaaaatcccatctctcctgattagtaagctgtgtgatcttgaccaagctatgcagcctatctgagtctctgtcctgatggataaagcaaataacaataccaacctgtagggttgatatgagaatgaaagataaggtatatcaatgcttagcacatggtacaccttgagtatctggtatgtgttattttcactcttggttgttattattattcttacaattattatgcattggctaggtccaggtgagacatgaggaaacacactcatgatt

SEQ ID NO: 27088 - DNA, 511 bp, Homo sapiens
agcaatctctcatatttatttgagaattttcctgtacacttgctcatttatttttctatattatttattttagactcatcttgtctagttaaaaaatagtgttgacacttgtttgaataatgttaggtttataggtttttagattaggaagaattgacatctctatgatgttaaattatcttttctaaaacatagtgtatcttttcatgtgttcatgatcttcagtagtactttatgaccctcaataatgctttatttgaatatagtttttataccttgttaagttttagctttttgtcattgttcattatatgttcattgtattcataaaatatatgaatatacatattttgtacccaaaccaatagtgaatttacctgaagaatccaagagaatcactaaaactactataaataataaacccgttctgtcatctgtaaaaaaatttacattttcatatccaagttttaaataacatttctcttatccagatcatttttttaatatgatg

SEQ ID NO: 27089 - DNA, 503 bp, Homo sapiens
cagctcgggcacaacgccttctcaaccaggcctgccttcccacacctttgcccctgcggctgagagcctcatggaaaaaccctccagaaattggtgtctatttttgggaattaacaaaaacagtggcaagcagtcagtgttttcagtttattaggactgtccccagacctacagaaaagagaagctgctgattactagttaggaccagacttggcatcggcaacgatgttgcaggccctggcgtgggccctctgggcctgagccctcctcgcagccctgcgggacccctctgtcccccttgaacaccacgttcacccagcgtgggttcctctcctccctgcccttctgcccccgtcagaccacgggacagtctcagccacgtcagagccagcatgggctccccaccacgcaggcctccctgcttctccgggcttctgcttctgttactatgacgagctccacactgccctcccccaggaggtcccatcctgcagcctggtctg

SEQ ID NO: 27090 - DNA, 329 bp, Homo sapiens
aagcataaaacatttaccatctagctcttcatagataaagtttgctgactatggattagaagaatatatatcatataaaatataaacagagaccttagggaaacgcaaatcaaaaccataatgagatattatttcatacacactaggaaggctgtaatttaggggaaaaaaggacaataacaagtgttggccaggatgtagagagattggaactctcatacattgctgatgagaatgtaaaatggtacagccactgtggaaaacagtttggcagttcctgagaaagttaaacatatgctaaagagatgcaatgaaaaagaataaataaa

SEQ ID NO: 27091 - DNA, 303 bp, Homo sapiens
ctacaaggataattctaaggcttctgatataaatacccagttctactagttgccatatatagaggtaagtgagcagtaataggactgtcatctcagctcacttgatacgtcatatgtttgggtgaatgatggttttgtccttaagttttagacatttaattatatctagagggccaggcacagtggctcatacctgtaatcccaacactttgggaggccaagacaggcagatcacctgaggccaggagaattgcttgaacccaggaggcagaggttgcagtgagctgagatcacagccactgg

SEQ ID NO: 27092 - DNA, 299 bp, Homo sapiens
gaaaccctatctctactaaaaatataaaaaattagccgggcatggtgtcaggcgcccgtagtcccagctacttgagaggctgaggcagaagaatggcatgaacccaggaggcggagcttgcagtgagccgagatcgcaccactgcactccagcctgggcaacagagactctgtctcaaaaaaacagacagacagacatacactgacagatattttgcctgtcagtgcggctaaggggctctgcagcctgagtctgcagtgtagtcctcaatgccaggcgaagttcgcatttatttagta

SEQ ID NO: 27093 - DNA, 304 bp, Homo sapiens
acatttgtataggtccattcccaacttctctattccacagcagaacctgtaacagaactttttggagggcaattttacaatatgcgttgaaatgttatcatctgaactccacaacgggatccagttcagcatggcaagaaatttaacttgcagctttccttgcccaagggcacaggggcagtacataaatgtcttctccaggctggttagtaatatttaaataaactcagtaaaataaatgttgaaaaatctcgaaataaagaaaaaattaattagatttatactctgcaacgctacgcagctt

SEQ ID NO: 27094 - DNA, 399 bp, Homo sapiens
gacaccagaatccccttagtaactggccctgggctggcttccaggagctgaagcctcttccctggatacttcttcccgagtgtggaccagaccactggtatgtgcatctctggacccaagggatgggtcctgtgggggtgaatgtggacggaatttggtcttccaggctggcatgtccgccggcatgaactggaggctgctgtggtacaggaagaaccaggggagggcaagaaagcggcaagctgcagtccgggtactgcttctttctcactaccttgtgctaatataaaattttgaagtgtctaagaattctgagttcaaacttggccttttaggttgtgatgaaagtatccttgtcaaggaagaagaaaagaatgtgttttgttaacaacttgtaaa

SEQ ID NO: 27095 - DNA, 353 bp, Homo sapiens
aaaaatttgaaagaagtgacttacaccagatgcacagaaatcaaggtaagggcacaaaaaacattataaaaaaataaaataaaatataaaaacaaggaaacatgagacttccaaaggaacaaaataattcttcatcagtaaattccaataaaaaatgtataaactgcctaaaagataattgaaaacaatgatattgaataagctcagtgagatacaagagaacatagataaacagtatgaagaaatcagaaaaacaattaatgatctgaatgagaaattcaacaaaatgttaaatatcattaaaaagaatcaaacagaaattctggatctgaataagtcaataaatgaaataa

SEQ ID NO: 27096 - DNA, 1743 bp, Homo sapiens
ctttaccattgatcttaaactgtgcaggctaaaaagaggaaccagaactcccttaagcacttttaagactatttaaaaaataaagttttgttggcattgaagagtaagctgcttaagggactgaatgaaaagatagtaccctttgtggctgtatgaagagagaaactgaatttctatccaagagaccttaatttagtttattagggaattatcttccccaaaagtacaagtaattttgcactgcaggagaaggataagtagatttgatttacatcacattttatacacacctttcaaaaggaagaaatctgtttcataaatagtagtaatctatgcttaaacttaacatttaatgttgacttcttacaacagccttgaaaattatttgtaattttgatcatgatgttggaaagcttgtaataaagaatatctttctcttctgcatccttttatcctcaaacttagcatggattcacatgctgagtaaatgtttggttaactagtgaacattttagatagttgtgtcaaaaataagggttagggataggtaaaaccagtaatttactgttttttacagaagacatctcagcatttctttggcatttttgcacaaataaatgactatatattcaccttggccatttttttttttaagtagccctatgagctgctcattctttttcatatacagtggaagtatacagatgttatccattttacaaattgttggatcggaatttgacagaattgggactgtggaacctgggtcacttgaattttctatattttgtatggccaaatcaggaaccagacagtctccatagtctccttggtttttatggaaaattgccatattcacatatttcatttatcctaatgtattgtcatccaaaatgaaagaggtctttcttgaaggtgctttaaagacatcactacatgtattcaattactgatttaaatattcccagaattattttttacctttctctttttcctctcaaacacaaaattttagtagtacctccctctatttcttcactgatttttcatctgttttcattgttatttccactatagaacttctactttatactagcggggaaaatttttttatttagaattttaatatttgaattttgtttatgtatcacatactgtgctacagttagcctcaatgaagattctattttgaactagacatcctgtcaatagtttgtcaagtaacttcattgcttcctttgatagcaattcagtgaaattttttcccaagtgatattttcccccaacttttgtgagtttgataaataggatgagtcttttatattggaaatactgtgaatggaaaattgccaaatcccttcttagtatattttaagcaccctacaacactttacctccctgcctttagtggtatttaaacatatggccaagttagtatttgggtttgattcctttggtgaagattaaggcatcaaaacatttcttaaaatgtttgagtacaaggctaagttataatgtcaactttcaaagactatgttgtgattcggtttgaatatgctgaagtgagcaattatgatttgcccaagtgcaatacaacaaatctataatgtatatttcacattttctacttgaacacattcatgtatatattttgttaaacttcatatgtatttaaaaagaatcatgaactgtatcaaaattctttcaataaaatttctatttaaaaatctcaaaaaaaaaaaa

SEQ ID NO: 27097 - DNA, 960 bp, Homo sapiens
cagttagtgtagaagttttagagtatcttttggtgtaactataaatttactgacatctctaaatttaaaaaatgcatgcccttcattcacatttgaaacattcggaatgtcattttaaaattacttctctttttttgaaaaataaactttaaaaattaaagtaacttctcagtctttcagcatggaaagattggggacatttagagacttggtaatttccatgcgagggcaggtggattgggttcctttgcccaaagcagaacgtgggacaggatcagcctcgtgagatagcacgtctggcctttggtccccttctccattgcttcctctctttatgtttctcttcctatctctccgagttgctgtttctttgtgagtctttttctattcagtctttctgggagttggttcatcttttcctccatctaagttttttatcctcttcgctttttttcctcttttcgtccttagttttatgtatcaactccccgtgcccccattttttttttgcttgaccttctctgtttccttttattcttgaataaatcttagtctctgtttctctttcccactctttcctctctcttactgtctcccttcttgtcctgttctcagctaacttaactggccacatgtgacgaaaacaacaacttcttagcttcttttttgagcatcttaaataattttgtttattttaaatttcaatgaaacatccaaccctcactgtcatcccttggatatacgtttttatttaggtgactgaatttttttcaacctttatggcttgtgatagaaaaattttaccctaacttaaaactaaaaaattggatattgtaatgttaatgtacctaatatgtttttgaatattctatgttttatatgttaaaaatactcaaacatgtttctaagtagaatatcatttacatttaaaaatacatttcaggatatgacttttctgaa

SEQ ID NO: 27098 - DNA, 2638 bp, Homo sapiens
ctggctggcgtccctctcggcagggtgctctttgccccatggggtgggatccagagctgcagacaggcccccaggcttggccaatgaacagaccaggttcggggagggtgttggaaaagagtggatggggtggttccccttaccttgcagcccccaggccctccccccctccctcccaggtggtcgggactcttgatcttcgctcgtggtactgtctgttcggctgtcttccccgcctctccccaggcacctgcatcctcccttggcacctgctgccaggctaggaagggcaaaaacaatcccagttggcgtagtcagggagtctccgccctcctcccaggtttcctcctcccaggcgcctcccctggacccgcccccatctgcccaagataattttagtttccttgggcctggaatctggacacacagggctcccccccgcctctgacttctctgtccgaagtcgggacaccctcctaccacctgtagagaagcgggagtggatctgaaataaaatccaggaatctgggggttcctagacggagccagacttcggaacgggtgtcctgctactcctgctggggctcctccaggacaagggcacacaactggttccgttaagcccctctctcgctcagacgccatggagctggatctgtctccacctcatcttagcagctctccggaagacctttgcccagcccctgggacccctcctgggactccccggccccctgatacccctctgcctgaggaggtaaagaggtcccagcctctcctcatcccaaccaccggcaggaaacttcgagaggaggagaggcgtgccacctccctcccctctatccccaaccccttccctgagctctgcagtcctccctcacagagcccaattctcgggggcccctccagtgcaagggggctgctcccccgcgatgccagccgcccccatgtagtaaaggtgtacagtgaggatggggcctgcaggtctgtggaggtggcagcaggtgccacagctcgccacgtgtgtgaaatgctggtgcagcgagctcacgccttgagcgacgagacctgggggctggtggagtgccacccccacctagcactggagcggggtttggaggaccacgagtccgtggtggaagtgcaggctgcctggcccgtgggcggagatagccgcttcgtcttccggaaaaacttcgccaagtacgaactgttcaagagctccccacactccctgttcccagaaaaaatggtctccagctgtctcgatgcacacactggtatatcccatgaagacctcatccagaacttcctgaatgctggcagctttcctgagatccagggctttctgcagctgcggggttcaggacggaagctttggaaacgctttttctgcttcttgcgccgatctggcctctattactccaccaagggcacctctaaggatccgaggcacctgcagtacgtggcagatgtgaacgagtccaacgtgtacgtggtgacgcagggccgcaagctctacgggatgcccactgacttcggtttctgtgtcaagcccaacaagcttcgaaatggccacaaggggcttcggatcttctgcagtgaagatgagcagagccgcacctgctggctggctgccttccgcctcttcaagtacggggtgcagctgtacaagaattaccagcaggcacagtctcgccatctgcatccatcttgtttgggctccccacccttgagaagtgcctcagataataccctggtggccatggacttctctggccatgctgggcgtgtcattgagaacccccgggaggctctgagtgtggccctggaggaggcccaggcctggaggaagaagacaaaccaccgcctcagcctgcccatgccagcctccggcacgagcctcagtgcagccatccaccgcacccaactctggttccacgggcgcatttcccgtgaggagagccagcggcttattggacagcagggcttggtagacggcctgttcctggtccgggagagtcagcggaacccccagggctttgtcctctctttgtgccacctgcagaaagtgaagcattatctcatcctgccgagcgaggaggagggccgcctgtacttcagcatggatgatggccagacccgcttcactgacctgctgcagctcgtggagttccaccagctgaaccgcggcatcctgccgtgcttgctgcgccattgctgcacgcgggtggccctctgaccaggccgtggactggctcatgcctcagcccgccttcaggctgcccgccgcccctccacccatccagtggactctggggcgcggccacaggggacgggatgaggagcgggagggttccgccactccagttttctcctctgcttctttgcctccctcagatagaaaacagcccccactccagtccactcctgacccctctcctcaagggaaggccttgggtggccccctctccttctcctagctctggaggtgctgctctagggcagggaattatgggagaagtgggggcagcccaggcggtttcacgccccacactttgtacagaccgagaggccagttgatctgctctgttttatactagtgacaataaagattattttttgatacaaaaaaaaa

SEQ ID NO: 27099 - DNA, 864 bp, Homo sapiens
  misc_feature (806)..(806): n is a, c, g, or t
  misc_feature (839)..(839): n is a, c, g, or t
  misc_feature (862)..(862): n is a, c, g, or t
agttaagggcctggcgtctccctccctgaagacgtggtcccagccgggtgtcctgacgctcggggttcaggacaagggcacacaactggttccgttaagcccctctctcgctcagacgccatggagctggatctgtctccacctcatcttagcagctctccggaagacctttgcccagcccctgggacccctcctgggactccccggccccctgatacccctctgcctgaggaggtaaagaggtcccagcctctcctcatcccaaccaccggcaggaaacttcgagaggaggagaggcgtgccacctccctcccctctatccccaaccccttccctgagctctgcagtcctccctcacagagcccaattctcgggggcccctccagtgcaagggggctgctcccccgcgatgccagccgcccccatgtagtaaaggtgtacagtgaggatggggcctgcaggtctgtggaggtggcagcaggtgccacagctcgccacgtgtgtgaaatgctggtgcagcgagctcacgccttgagcgacgagacctgggggctggtggagtgccacccccacctagcactggagcggggtttggaggaccacgagtccgtggtggaagtgcaggctgcctggcccgtgggcggagatagccgcttcgtcttccggaaaaacttcgccaagtacgaactgttcaagagctccccacactccctgttcccagaaaaaatggtctccagctgtctcgatgcacacactggtatatcccatgaagacctcatccagaacttcctgaatgctgggaagcntttcctgaaaattcaagggcttttctgcaaacntgccgggggtttaaaggaccggnaa

SEQ ID NO: 27100 - DNA, 496 bp, Homo sapiens
cagtgagctgtgatcgtgccaccgcactagcatgagaccctgtctcaaaaagaaaaagaaaaagagaaacatcctggtggtagaggggaagggaggaggtcagacctgtcactctcctctgctctcctctggctcagaacttcctgaatgctggcagctttcctgagatccagggctttctgcagctgcggggttcaggacggaagctttggaaacgctttttctgcttcttgcgccgatctggcctctattactccaccaagggcacctctaaggtaaggtcttgagggtaccagccccagcccctccagtccctggtccttttagaagttgccccttctctgctggaacctctgagcccttctccccctgggccccccaggccagccacctccagtttaccatctctccctacatccttgcctagctcacctgcccagggaggtagcaggagaaaagatgatcttagtttaagtcctggctctacttctatttg

SEQ ID NO: 27101 - DNA, 349 bp, Homo sapiens
  misc_feature (4)..(5): n is a, c, g, or t
  misc_feature (10)..(10): n is a, c, g, or t
  misc_feature (13)..(13): n is a, c, g, or t
aggnntccgnttnatcattaaagacttatagcatcacttcactgtagtgatgcacaaatgtgccgctcccccggagtcctgcaatgagacacaggactcccagcaacctgtcctcctcaccaggcccctccagaggctccctggcccccagtgcgtctcccttttccctgcacaagaagtgggaggctgagtgcggagaattgcttgagtccaggagtttgagaccagcctgggcaacatggcaagaccctgtccctacaaaaaataaaaaaatgagccgggcatggtggtgtgcacctgtagtcccagcttctcaggaggctgaggtgggaggatcccttgttccttg

SEQ ID NO: 27102 - DNA, 2550 bp, Homo sapiens
ctggctggcgtccctctcggcagggtgctctttgccccatggggtgggatccagagctgcagacaggcccccaggcttggccaatgaacagaccaggttcggggagggtgttggaaaagagtggatggggtggttccccttaccttgcagcccccaggccctccccccctccctcccaggtggtcgggactcttgatcttcgctcgtggtactgtctgttcggctgtcttccccgcctctccccaggcacctgcatcctcccttggcacctgctgccaggctaggaagggcaaaaacaatcccagttggcgtagtcagggagtctccgccctcctcccaggtttcctcctcccaggcgcctcccctggacccgcccccatctgcccaagataattttagtttccttgggcctggaatctggacacacagggctcccccccgcctctgacttctctgtccgaagtcgggacaccctcctaccacctgtagagaagcgggagtggatctgaaataaaatccaggaatctgggggttcctagacggagccagacttcggaacgggtgtcctgctactcctgctggggctcctccaggacaagggcacacaactggttccgttaagcccctctctcgctcagacgccatggagctggatctgtctccacctcatcttagcagctctccggaagacctttgcccagcccctgggacccctcctgggactccccggccccctgatacccctctgcctgaggaggtaaagaggtcccagcctctcctcatcccaaccaccggcaggaaacttcgagaggaggagaggcgtgccacctccctcccctctatccccaaccccttccctgagctctgcagtcctccctcacagagcccaattctcgggggcccctccagtgcaagggggctgctcccccgcgatgccagccgcccccatgtagtaaaggtgtacagtgaggatggggcctgcaggtctgtggaggtggcagcaggtgccacagctcgccacgtgtgtgaaatgctggtgcagcgagctcacgccttgagcgacgagacctgggggctggtggagtgccacccccacctagcactggagcggggtttggaggaccacgagtccgtggtggaagtgcaggctgcctggcccgtgggcggagatagccgcttcgtcttccggaaaaacttcgccaagtacgaactgttcaagagctccccacactccctgttcccagaaaaaatggtctccagctgtctcgatgcacacactggtatatcccatgaagacctcatccagaacttcctgaatgctggcagctttcctgagatccagggctttctgcagctgcggggttcaggacggaagctttggaaacgctttttctgcttcttgcgccgatctggcctctattactccaccaagggcacctctaaggatccgaggcacctgcagtacgtggcagatgtgaacgagtccaacgtgtacgtggtgacgcagggccgcaagctctacgggatgcccactgacttcggtttctgtgtcaagcccaacaagcttcgaaatggccacaaggggcttcggatcttctgcagtgaagatgagcagagccgcacctgctggctggctgccttccgcctcttcaagtacggggtgcagctgtacaagaattaccagcaggcacagtctcgccatctgcatccatcttgtttgggctccccacccttgagaagtgcctcagataataccctggtggccatggacttctctggccatgctgggcgtgtcattgagaacccccgggaggctctgagtgtggccctggaggaggcccaggcctggaggaagaagacaaaccaccgcctcagcctgcccatgccagcctccggcacgagcctcagtgcagcctgttcctggtccgggagagtcagcggaacccccagggctttgtcctctctttgtgccacctgcagaaagtgaagcattatctcatcctgccgagcgaggaggagggccgcctgtacttcagcatggatgatggccagacccgcttcactgacctgctgcagctcgtggagttccaccagctgaaccgcggcatcctgccgtgcttgctgcgccattgctgcacgcgggtggccctctgaccaggccgtggactggctcatgcctcagcccgccttcaggctgcccgccgcccctccacccatccagtggactctggggcgcggccacaggggacgggatgaggagcgggagggttccgccactccagttttctcctctgcttctttgcctccctcagatagaaaacagcccccactccagtccactcctgacccctctcctcaagggaaggccttgggtggccccctctccttctcctagctctggaggtgctgctctagggcagggaattatgggagaagtgggggcagcccaggcggtttcacgccccacactttgtacagaccgagaggccagttgatctgctctgttttatactagtgacaataaagattattttttgatacaaaaaaaaa

SEQ ID NO: 27103 - DNA, 3181 bp, Homo sapiens
ctggctggcgtccctctcggcagggtgctctttgccccatggggtgggatccagagctgcagacaggcccccaggcttggccaatgaacagaccaggttcggggagggtgttggaaaagagtggatggggtggttccccttaccttgcagcccccaggccctccccccctccctcccaggtggtcgggactcttgatcttcgctcgtggtactgtctgttcggctgtcttccccgcctctccccaggcacctgcatcctcccttggcacctgctgccaggctaggaagggcaaaaacaatcccagttggcgtagtcagggagtctccgccctcctcccaggtttcctcctcccaggcgcctcccctggacccgcccccatctgcccaagataattttagtttccttgggcctggaatctggacacacagggctcccccccgcctctgacttctctgtccgaagtcgggacaccctcctaccacctgtagagaagcgggagtggatctgaaataaaatccaggaatctgggggttcctagacggagccagacttcggaacgggtgtcctgctactcctgctggggctcctccaggacaagggcacacaactggttccgttaagcccctctctcgctcagacgccatggagctggatctgtctccacctcatcttagcagctctccggaagacctttgcccagcccctgggacccctcctgggactccccggccccctgatacccctctgcctgaggaggtaaagaggtcccagcctctcctcatcccaaccaccggcaggaaacttcgagaggaggagaggcgtgccacctccctcccctctatccccaaccccttccctgagctctgcagtcctccctcacagagcccaattctcgggggcccctccagtgcaagggggctgctcccccgcgatgccagccgcccccatgtagtaaaggtgtacagtgaggatggggcctgcaggtctgtggaggtggcagcaggtgccacagctcgccacgtgtgtgaaatgctggtgcagcgagctcacgccttgagcgacgagacctgggggctggtggagtgccacccccacctagcactggagcggggtttggaggaccacgagtccgtggtggaagtgcaggctgcctggcccgtgggcggagatagccgcttcgtcttccggaaaaacttcgccaagtacgaactgttcaagagctccccacactccctgttcccagaaaaaatggtctccagctgtctcgatgcacacactggtatatcccatgaagacctcatccagaacttcctgaatgctggcagctttcctgagatccagggctttctgcagctgcggggttcaggacggaagctttggaaacgctttttctgcttcttgcgccgatctggcctctattactccaccaagggcacctctaaggatccgaggcacctgcagtacgtggcagatgtgaacgagtccaacgtgtacgtggtgacgcagggccgcaagctctacgggatgcccactgacttcggtttctgtgtcaagcccaacaagcttcgaaatggccacaaggggcttcggatcttctgcagtgaagatgagcagagccgcacctgctggctggctgccttccgcctcttcaagtacggggtgcagctgtacaagaattaccagcaggcacagtctcgccatctgcatccatcttgtttgggctccccacccttgagaagtgcctcagataataccctggtggccatggacttctctggccatgctgggcgtgtcattgagaacccccgggaggctctgagtgtggccctggaggaggcccaggcctggaggaagaagacaaaccaccgcctcagcctgcccatgccagcctccggcacgagcctcagtgcagccatccaccgcacccaactctggttccacgggcgcatttcccgtgaggagagccagcggcttattggacagcagggcttggtagacggcctgttcctggtccgggagagtcagcggaacccccagggctttgtcctctctttgtgccacctgcagaaagtgaagcattatctcatcctgccgatgtgccgctcccccggagtcctgcaatgagacacaggactcccagcaacctgtcctcctcaccaggcccctccagaggctccctggcccccagtgcgtctcccttttccctgcacaagaagtgggaggctgagtgcggtggctcacacctgtaatcccagcacttaggacggccaaggtgggagaatggcttgagcccaggagttcgagaccagcctgggcaacacagggagaccccatctctacaaataatttaaaaatgagccaggcatggtggtgcacacctgtagtccagctactcaggaggctgaggtgggagcattgcttgagcccagagggtcaaggctgcagtgagccatggtggcaccaccacactccagcctggatgacacagtgagaaaactgtctcaaaaaaaaaaaaagaaagaaaaagaaaaagaaaaaagaaaagaataaaaggaaatggtggggccctggcccaggagggagcttcccaagcctcgggcccctccctgaacttccaccccctttactgtaccccagagcgaggaggagggccgcctgtacttcagcatggatgatggccagacccgcttcactgacctgctgcagctcgtggagttccaccagctgaaccgcggcatcctgccgtgcttgctgcgccattgctgcacgcgggtggccctctgaccaggccgtggactggctcatgcctcagcccgccttcaggctgcccgccgcccctccacccatccagtggactctggggcgcggccacaggggacgggatgaggagcgggagggttccgccactccagttttctcctctgcttctttgcctccctcagatagaaaacagcccccactccagtccactcctgacccctctcctcaagggaaggccttgggtggccccctctccttctcctagctctggaggtgctgctctagggcagggaattatgggagaagtgggggcagcccaggcggtttcacgccccacactttgtacagaccgagaggccagttgatctgctctgttttatactagtgacaataaagattattttttgatacaaaaaaaaa

SEQ ID NO: 27104 - DNA, 2662 bp, Homo sapiens
ctggctggcgtccctctcggcagggtgctctttgccccatggggtgggatccagagctgcagacaggcccccaggcttggccaatgaacagaccaggttcggggagggtgttggaaaagagtggatggggtggttccccttaccttgcagcccccaggccctccccccctccctcccaggtggtcgggactcttgatcttcgctcgtggtactgtctgttcggctgtcttccccgcctctccccaggcacctgcatcctcccttggcacctgctgccaggctaggaagggcaaaaacaatcccagttggcgtagtcagggagtctccgccctcctcccaggtttcctcctcccaggcgcctcccctggacccgcccccatctgcccaagataattttagtttccttgggcctggaatctggacacacagggctcccccccgcctctgacttctctgtccgaagtcgggacaccctcctaccacctgtagagaagcgggagtggatctgaaataaaatccaggaatctgggggttcctagacggagccagacttcggaacgggtgtcctgctactcctgctggggctcctccaggacaagggcacacaactggttccgttaagcccctctctcgctcagacgccatggagctggatctgtctccacctcatcttagcagctctccggaagacctttgcccagcccctgggacccctcctgggactccccggccccctgatacccctctgcctgaggaggtaaagaggtcccagcctctcctcatcccaaccaccggcaggaaacttcgagaggaggagaggcgtgccacctccctcccctctatccccaaccccttccctgagctctgcagtcctccctcacagagcccaattctcgggggcccctccagtgcaagggggctgctcccccgcgatgccagccgcccccattcgtgtgcaattcctggggcgcaggtagtaaaggtgtacagtgaggatggggcctgcaggtctgtggaggtggcagcaggtgccacagctcgccacgtgtgtgaaatgctggtgcagcgagctcacgccttgagcgacgagacctgggggctggtggagtgccacccccacctagcactggagcggggtttggaggaccacgagtccgtggtggaagtgcaggctgcctggcccgtgggcggagatagccgcttcgtcttccggaaaaacttcgccaagtacgaactgttcaagagctccccacactccctgttcccagaaaaaatggtctccagctgtctcgatgcacacactggtatatcccatgaagacctcatccagaacttcctgaatgctggcagctttcctgagatccagggctttctgcagctgcggggttcaggacggaagctttggaaacgctttttctgcttcttgcgccgatctggcctctattactccaccaagggcacctctaaggatccgaggcacctgcagtacgtggcagatgtgaacgagtccaacgtgtacgtggtgacgcagggccgcaagctctacgggatgcccactgacttcggtttctgtgtcaagcccaacaagcttcgaaatggccacaaggggcttcggatcttctgcagtgaagatgagcagagccgcacctgctggctggctgccttccgcctcttcaagtacggggtgcagctgtacaagaattaccagcaggcacagtctcgccatctgcatccatcttgtttgggctccccacccttgagaagtgcctcagataataccctggtggccatggacttctctggccatgctgggcgtgtcattgagaacccccgggaggctctgagtgtggccctggaggaggcccaggcctggaggaagaagacaaaccaccgcctcagcctgcccatgccagcctccggcacgagcctcagtgcagccatccaccgcacccaactctggttccacgggcgcatttcccgtgaggagagccagcggcttattggacagcagggcttggtagacggcctgttcctggtccgggagagtcagcggaacccccagggctttgtcctctctttgtgccacctgcagaaagtgaagcattatctcatcctgccgagcgaggaggagggccgcctgtacttcagcatggatgatggccagacccgcttcactgacctgctgcagctcgtggagttccaccagctgaaccgcggcatcctgccgtgcttgctgcgccattgctgcacgcgggtggccctctgaccaggccgtggactggctcatgcctcagcccgccttcaggctgcccgccgcccctccacccatccagtggactctggggcgcggccacaggggacgggatgaggagcgggagggttccgccactccagttttctcctctgcttctttgcctccctcagatagaaaacagcccccactccagtccactcctgacccctctcctcaagggaaggccttgggtggccccctctccttctcctagctctggaggtgctgctctagggcagggaattatgggagaagtgggggcagcccaggcggtttcacgccccacactttgtacagaccgagaggccagttgatctgctctgttttatactagtgacaataaagattattttttgatacaaaaaaaaa

SEQ ID NO: 27105 - DNA, 1958 bp, Homo sapiens
agttaagggcctggcgtctccctccctgaagacgtggtcccagccgggtgtcctgacgctcggggttcaggacaagggcacacaactggttccgttaagcccctctctcgctcagacgccatggagctggatctgtctccacctcatcttagcagctctccggaagacctttgcccagcccctgggacccctcctgggactccccggccccctgatacccctctgcctgaggaggtaaagaggtcccagcctctcctcatcccaaccaccggcaggaaacttcgagaggaggagaggcgtgccacctccctcccctctatccccaaccccttccctgagctctgcagtcctccctcacagagcccaattctcgggggcccctccagtgcaagggggctgctcccccgcgatgccagccgcccccatagcggggtttggaggaccacgagtccgtggtggaagtgcaggctgcctggcccgtgggcggagatagccgcttcgtcttccggaaaaacttcgccaagtacgaactgttcaagagctccccacactccctgttcccagaaaaaatggtctccagctgtctcgatgcacacactggtatatcccatgaagacctcatccagaacttcctgaatgctggcagctttcctgagatccagggctttctgcagctgcggggttcaggacggaagctttggaaacgctttttctgcttcttgcgccgatctggcctctattactccaccaagggcacctctaaggatccgaggcacctgcagtacgtggcagatgtgaacgagtccaacgtgtacgtggtgacgcagggccgcaagctctacgggatgcccactgacttcggtttctgtgtcaagcccaacaagcttcgaaatggccacaaggggcttcggatcttctgcagtgaagatgagcagagccgcacctgctggctggctgccttccgcctcttcaagtacggggtgcagctgtacaagaattaccagcaggcacagtctcgccatctgcatccatcttgtttgggctccccacccttgagaagtgcctcagataataccctggtggccatggacttctctggccatgctgggcgtgtcattgagaacccccgggaggctctgagtgtggccctggaggaggcccaggcctggaggaagaagacaaaccaccgcctcagcctgcccatgccagcctccggcacgagcctcagtgcagccatccaccgcacccaactctggttccacgggcgcatttcccgtgaggagagccagcggcttattggacagcagggcttggtagacggcctgttcctggtccgggagagtcagcggaacccccagggctttgtcctctctttgtgccacctgcagaaagtgaagcattatctcatcctgccgagcgaggaggagggccgcctgtacttcagcatggatgatggccagacccgcttcactgacctgctgcagctcgtggagttccaccagctgaaccgcggcatcctgccgtgcttgctgcgccattgctgcacgcgggtggccctctgaccaggccgtggactggctcatgcctcagcccgccttcaggctgcccgccgcccctccacccatccagtggactctggggcgcggccacaggggacgggatgaggagcgggagggttccgccactccagttttctcctctgcttctttgcctccctcagatagaaaacagcccccactccagtccactcctgacccctctcctcaagggaaggccttgggtggccccctctccttctcctagctctggaggtgctgctctagggcagggaattatgggagaagtgggggcagcccaggcggtttcacgccccacactttgtacagaccgagaggccagttgatctgctctgttttatactagtgacaataaagattattttttgatacaaaaaaaaa

SEQ ID NO: 27106 - DNA, 2651 bp, Homo sapiens
ctggctggcgtccctctcggcagggtgctctttgccccatggggtgggatccagagctgcagacaggcccccaggcttggccaatgaacagaccaggttcggggagggtgttggaaaagagtggatggggtggttccccttaccttgcagcccccaggccctccccccctccctcccaggtggtcgggactcttgatcttcgctcgtggtactgtctgttcggctgtcttccccgcctctccccaggcacctgcatcctcccttggcacctgctgccaggctaggaagggcaaaaacaatcccagttggcgtagtcagggagtctccgccctcctcccaggtttcctcctcccaggcgcctcccctggacccgcccccatctgcccaagataattttagtttccttgggcctggaatctggacacacagggctcccccccgcctctgacttctctgtccgaagtcgggacaccctcctaccacctgtagagaagcgggagtggatctgaaataaaatccaggaatctgggggttcctagacggagccagacttcggaacgggtgtcctgctactcctgctggggctcctccaggacaagggcacacaactggttccgttaagcccctctctcgctcagacgccatggagctggatctgtctccacctcatcttagcagctctccggaagacctttgcccagcccctgggacccctcctgggactccccggccccctgatacccctctgcctgaggaggtaaagaggtcccagcctctcctcatcccaaccaccggcaggaaacttcgagaggaggagaggcgtgccacctccctcccctctatccccaaccccttccctgagctctgcagtcctccctcacagagcccaattctcgggggcccctccagtgcaagggggctgctcccccgcgatgccagccgcccccatgtagtaaaggtgtacagtgaggatggggcctgcaggtctgtggaggtggcagcaggtgccacagctcgccacgtgtgtgaaatgctggtgcagcgagctcacgccttgagcgacgagacctgggggctggtggagtgccacccccacctagcactggagcggggtttggaggaccacgagtccgtggtggaagtgcaggctgcctggcccgtgggcggagatagccgcttcgtcttccggaaaaacttcgccaagtacgaactgttcaagagctccccacactccctgttcccagaaaaaatggtctccagctgtctcgatgcacacactggtatatcccatgaagacctcatccagaacttcctgaatgctggcagctttcctgagatccagggctttctgcagctgcggggttcaggacggaagctttggaaacgctttttctgcttcttgcgccgatctggcctctattactccaccaagggcacctctaaggatccgaggcacctgcagtacgtggcagatgtgaacgagtccaacgtgtacgtggtgacgcagggccgcaagctctacgggatgcccactgacttcggtttctgtgtcaagcccaacaagcttcgaaatggccacaaggggcttcggatcttctgcagtgaagatgagcagagccgcacctgctggctggctgccttccgcctcttcaagtacggggtgcagctgtacaagaattaccagcaggcacagtctcgccatctgcatccatcttgtttgggctccccacccttgagaagtgcctcagataataccctggtggccatggacttctctggccatgctgggcgtgtcattgagaacccccgggaggctctgagtgtggccctggaggaggcccaggcctggaggaagaagacaaaccaccgcctcagcctgcccatgccagcctccggcacgagcctcagtgcagccatccaccgcacccaactctggttccacgggcgcatttcccgtgaggagagccagcggcttattggacagcagggcttggtagacggcctgttcctggtccgggagagtcagcggaacccccagggctttgtcctctctttgtgccacctgcagaaagtgaagcattatctcatcctgccgatgtgccgctcccccggagtcctgcaatgagacacaggactcccagcaacctgtcctcctcaccaggcccctccagaggctccctggcccccagtgcgtctcccttttccctgcacaagaagtgggaggctgagtgcggtggctcacacctgtaatcccagcacttaggacggccaaggtgggagaatggcttgagcccaggagttcgagaccagcctgggcaacacagggagaccccatctctacaaataatttaaaaatgagccaggcatggtggtgcacacctgtagtccagctactcaggaggctgaggtgggagcattgcttgagcccagagggtcaaggctgcagtgagccatggtggcaccaccacactccagcctggatgacacagtgagaaaactgtctcaaaaaaaaaaaaagaaagaaaaagaaaaagaaaaaagaaaagaataaaaggaaatggtggggccctggcccaggagggagcggcacataggtgggtgaccaaaagagtcgagtcatgcgacggagctaagacaagaaacagaaccct

SEQ ID NO: 27107 - DNA, 1160 bp, Homo sapiens
ggatcgtttcttgatttagctctgatgtatgactcgactcttaggatcacccacccatgtgccgcccccaacgcatgtgccgctcccccggagtcctgcaatgagacacaggactcccagcaacctgtcctcctcaccaggcccctccagaggctccctggcccccagtgcgtctcccttttccctgcacaagaagtgggaggctgagtgcggtggctcacacctgtaatcccagcacttaggacggccaaggtgggagaatggcttgagcccaggagttcgagaccagcctgggcaacacagggagaccccatctctacaaataatttaaaaatgagccaggcatggtggtgcacacctgtagtccagctactcaggaggctgaggtgggagcattgcttgagcccagagggtcaaggctgcagtgagccatggtggcaccaccacactccagcctggatgacacagtgagaaaactgtctcaaaaaaaaaaaaagaaagaaaaagaaaaagaaaaaagaaaagaataaaaggaaatggtggggccctggcccaggagggagcttcccaagcctcgggcccctccctgaacttccaccccctttactgtaccccagagcgaggaggagggccgcctgtacttcagcatggatgatggccagacccgcttcactgacctgctgcagctcgtggagttccaccagctgaaccgcggcatcctgccgtgcttgctgcgccattgctgcacgcgggtggccctctgaccaggccgtggactggctcatgcctcagcccgccttcaggctgcccgccgcccctccacccatccagtggactctggggcgcggccacaggggacgggatgaggagcgggagggttccgccactccagttttctcctctgcttctttgcctccctcagatagaaaacagcccccactccagtccactcctgacccctctcctcaagggaaggccttgggtggccccctctccttctcctagctctggaggtgctgctctagggcagggaattatgggagaagtgggggcagcccaggcggtttcacgccccacactttgtacagaccgagaggccagttgatctgctctgttttatactagtgacaataaagattattttttgatacaaaaaaaaa

SEQ ID NO: 27108 - DNA, 1665 bp, Homo sapiens
ctggctggcgtccctctcggcagggtgctctttgccccatggggtgggatccagagctgcagacaggcccccaggcttggccaatgaacagaccaggttcggggagggtgttggaaaagagtggatggggtggttccccttaccttgcagcccccaggccctccccccctccctcccaggtggtcgggactcttgatcttcgctcgtggtactgtctgttcggctgtcttccccgcctctccccaggcacctgcatcctcccttggcacctgctgccaggctaggaagggcaaaaacaatcccagttggcgtagtcagggagtctccgccctcctcccaggtttcctcctcccaggcgcctcccctggacccgcccccatctgcccaagataattttagtttccttgggcctggaatctggacacacagggctcccccccgcctctgacttctctgtccgaagtcgggacaccctcctaccacctgtagagaagcgggagtggatctgaaataaaatccaggaatctgggggttcctagacggagccagacttcggaacgggtgtcctgctactcctgctggggctcctccaggacaagggcacacaactggttccgttaagcccctctctcgctcagacgccatggagctggatctgtctccacctcatcttagcagctctccggaagacctttgcccagcccctgggacccctcctgggactccccggccccctgatacccctctgcctgaggaggtaaagaggtcccagcctctcctcatcccaaccaccggcaggaaacttcgagaggaggagaggcgtgccacctccctcccctctatccccaaccccttccctgagctctgcagtcctccctcacagagcccaattctcgggggcccctccagtgcaagggggctgctcccccgcgatgccagccgcccccatgtagtaaaggtgtacagtgaggatggggcctgcaggtctgtggaggtggcagcaggtgccacagctcgccacgtgtgtgaaatgctggtgcagcgagctcacgccttgagcgacgagacctgggggctggtggagtgccacccccacctagcactggagcggggtttggaggaccacgagtccgtggtggaagtgcaggctgcctggcccgtgggcggagatagccgcttcgtcttccggaaaaacttcgccaagtacgaactgttcaagagctccccacactccctgttcccagaaaaaatggtctccagctgtctcgatgcacacactggtatatcccatgaagacctcatccagaacttcctgaatgctggcagctttcctgagatccagggctttctgcagctgcggggttcaggacggaagctttggaaacgctttttctgcttcttgcgccgatctggcctctattactccaccaagggcacctctaaggtaaggtcttgagggtaccagccccagcccctccagtccctggtccttttagaagttgccccttctctgctggaacctctgagcccttctccccctgggccccccaggccagccacctccagtttaccatctctccctacatccttgcctagctcacctgcccagggaggtagcaggagaaaagatgatcttagtttaagtcctggctctacttctatttg

SEQ ID NO: 27109 - DNA, 1745 bp, Homo sapiens
ctggctggcgtccctctcggcagggtgctctttgccccatggggtgggatccagagctgcagacaggcccccaggcttggccaatgaacagaccaggttcggggagggtgttggaaaagagtggatggggtggttccccttaccttgcagcccccaggccctccccccctccctcccaggtggtcgggactcttgatcttcgctcgtggtactgtctgttcggctgtcttccccgcctctccccaggcacctgcatcctcccttggcacctgctgccaggctaggaagggcaaaaacaatcccagttggcgtagtcagggagtctccgccctcctcccaggtttcctcctcccaggcgcctcccctggacccgcccccatctgcccaagataattttagtttccttgggcctggaatctggacacacagggctcccccccgcctctgacttctctgtccgaagtcgggacaccctcctaccacctgtagagaagcgggagtggatctgaaataaaatccaggaatctgggggttcctagacggagccagacttcggaacgggtgtcctgctactcctgctggggctcctccaggacaagggcacacaactggttccgttaagcccctctctcgctcagacgccatggagctggatctgtctccacctcatcttagcagctctccggaagacctttgcccagcccctgggacccctcctgggactccccggccccctgatacccctctgcctgaggaggtaaagaggtcccagcctctcctcatcccaaccaccggcaggaaacttcgagaggaggagaggcgtgccacctccctcccctctatccccaaccccttccctgagctctgcagtcctccctcacagagcccaattctcgggggcccctccagtgcaagggggctgctcccccgcgatgccagccgcccccatgtagtaaaggtgtacagtgaggatggggcctgcaggtctgtggaggtggcagcaggtgccacagctcgccacgtgtgtgaaatgctggtgcagcgagctcacgccttgagcgacgagacctgggggctggtggagtgccacccccacctagcactggagcggggtttggaggaccacgagtccgtggtggaagtgcaggctgcctggcccgtgggcggagatagccgcttcgtcttccggaaaaacttcgccaagtacgaactgttcaagagctccccagtgagtgcatgagggctgtctgggcgctgggatgccctgatcctcaacctggatgctggagccctgatccctgacacttgtctacccacagcactccctgttcccagaaaaaatggtctccagctgtctcgatgcacacactggtatatcccatgaagacctcatccaggtggggggaccccccatttcactgcagattcacgactccccagcattggccagtgcttctccacccttaagtcctgtgcctcccctctatgttgtagaaagagccaaatcacagtcctgtgtgactggggacagtcactttccctgcctgagcatcagtttcttctattaaatgggggcgagaaatgcatgtggagcatttccttgtaaaaacctgagggtgggctgggcacggtggctcatgcctataatcccagcactttgggaggctgaggcgggaggattacttaagcctagaagtttgagagtttgagaccagcctgggcaacataatgagacctcgtctctc

SEQ ID NO: 27110 - DNA, 987 bp, Homo sapiens
ctggctggcgtccctctcggcagggtgctctttgccccatggggtgggatccagagctgcagacaggcccccaggcttggccaatgaacagaccaggttcggggagggtgttggaaaagagtggatggggtggttccccttaccttgcagcccccaggccctccccccctccctcccaggtggtcgggactcttgatcttcgctcgtggtactgtctgttcggctgtcttccccgcctctccccaggcacctgcatcctcccttggcacctgctgccaggctaggaagggcaaaaacaatcccagttggcgtagtcagggagtctccgccctcctcccaggtttcctcctcccaggcgcctcccctggacccgcccccatctgcccaagataattttagtttccttgggcctggaatctggacacacagggctcccccccgcctctgacttctctgtccgaagtcgggacaccctcctaccacctgtagagaagcgggagtggatctgaaataaaatccaggaatctgggggttcctagacggagccagacttcggaacgggtgtcctgctactcctgctggggctcctccaggacaagggcacacaactggttccgttaagcccctctctcgctcagacgccatggagctggatctgtctccacctcatcttagcagctctccggaagacctttgcccagcccctgggacccctcctgggactccccggccccctgataccccctcagatagaaaacagcccccactccagtccactcctgacccctctcctcaagggaaggccttgggtggccccctctccttctcctagctctggaggtgctgctctagggcagggaattatgggagaagtgggggcagcccaggcggtttcacgccccacactttgtacagaccgagaggccagttgatctgctctgttttatactagtgacaataaagattattttttgatacaaaaaaaaa

SEQ ID NO: 27111 - DNA, 417 bp, Homo sapiens
cagaagggaagggagggatgcacgggttctgggtctgtgggagatacacagccgcttccatggaggcaggggatcttggttaggagtccctgagggtctagcaggtgcggaaagggaatgaatcaccctttgcctcccctcaagtcgtgtgcaattcctggggcgcaggtagtaaaggtgtacagtgaggatggggcctgcaggtctgtggaggtggcagcaggtgccacagctcgccacgtgtgtgaaatgctggtgcagcgagctcacgccttgagcgacgagacctgggggctggtggagtgccacccccacctagcactgggtaagtcaggtgcatggaactatccgggctgggagatgatgccttgcatcttgggctaggcatgtggctcatccaggagatctggttgatct

SEQ ID NO: 27112 - DNA, 154 bp, Homo sapiens
cttctcctagctctggaggtgctgctctagggcagggaattatgggagaagtgggggcagcccaggcggtttcacgccccacactttgtacagaccgagaggccagttgatctgctctgttttatactagtgacaataaagattattttttgat

SEQ ID NO: 27113 - DNA, 414 bp, Homo sapiens
tacgtggcagatgtgaacgagtccaacgtgtacgtggtgacgcagggccgcaagctctacgggatgcccactgacttcggtttctgtgtcaaggtgaagacctggccaggcctggcccctggcctggggaagcaggaactgctcaggcccctggatcctgcccggggcttctgagccccaattcagacacctagactcctctccctgcaccctggcctgctggaaactcctggattcagctctgctatgtggagcaggggcagacatgtggtcctaaaggcagatatgggaccagtcaatttcctctctctgcagcccaacaagcttcgaaatggccacaaggggcttcggatcttctgcagtgaagatgagcagagccgcacctgctggctggctgccttccgcctcttcaag

SEQ ID NO: 27114 - DNA, 428 bp, Homo sapiens
aagaagacaaaccaccgcctcagcctgcccatgccagcctccggcacgagcctcagtgcaggtgggtgacggccccgagtcctggggcgggggctgcctcaacttctctttgtattcccagtggggagtagatggtataggggtcccctccccaaagtgaccgcccatgtccttccccaccacagccatccaccgcacccaactctggttccacgggcgcatttcccgtgaggagagccagcggcttattggacagcagggcttggtagacgggtaaggggcagggccgggcaacagacccagggataagagagactggggtccaggtggcagccatggtccttgggtagtaatgctgccccatctcctgtcttctggcagcctgttcctggtccgggagagtcagcggaacccccagggctttgtcc

SEQ ID NO: 27115 - DNA, 2551 bp, Homo sapiens
ctggctggcgtccctctcggcagggtgctctttgccccatggggtgggatccagagctgcagacaggcccccaggcttggccaatgaacagaccaggttcggggagggtgttggaaaagagtggatggggtggttccccttaccttgcagcccccaggccctccccccctccctcccaggtggtcgggactcttgatcttcgctcgtggtactgtctgttcggctgtcttccccgcctctccccaggcacctgcatcctcccttggcacctgctgccaggctaggaagggcaaaaacaatcccagttggcgtagtcagggagtctccgccctcctcccaggtttcctcctcccaggcgcctcccctggacccgcccccatctgcccaagataattttagtttccttgggcctggaatctggacacacagggctcccccccgcctctgacttctctgtccgaagtcgggacaccctcctaccacctgtagagaagcgggagtggatctgaaataaaatccaggaatctgggggttcctagacggagccagacttcggaacgggtgtcctgctactcctgctggggctcctccaggacaagggcacacaactggttccgttaagcccctctctcgctcagacgccatggagctggatctgtctccacctcatcttagcagctctccggaagacctttgcccagcccctgggacccctcctgggactccccggccccctgatacccctctgcctgaggaggtaaagaggtcccagcctctcctcatcccaaccaccggcagcccaattctcgggggcccctccagtgcaagggggctgctcccccgcgatgccagccgcccccatgtagtaaaggtgtacagtgaggatggggcctgcaggtctgtggaggtggcagcaggtgccacagctcgccacgtgtgtgaaatgctggtgcagcgagctcacgccttgagcgacgagacctgggggctggtggagtgccacccccacctagcactggagcggggtttggaggaccacgagtccgtggtggaagtgcaggctgcctggcccgtgggcggagatagccgcttcgtcttccggaaaaacttcgccaagtacgaactgttcaagagctccccacactccctgttcccagaaaaaatggtctccagctgtctcgatgcacacactggtatatcccatgaagacctcatccagaacttcctgaatgctggcagctttcctgagatccagggctttctgcagctgcggggttcaggacggaagctttggaaacgctttttctgcttcttgcgccgatctggcctctattactccaccaagggcacctctaaggatccgaggcacctgcagtacgtggcagatgtgaacgagtccaacgtgtacgtggtgacgcagggccgcaagctctacgggatgcccactgacttcggtttctgtgtcaagcccaacaagcttcgaaatggccacaaggggcttcggatcttctgcagtgaagatgagcagagccgcacctgctggctggctgccttccgcctcttcaagtacggggtgcagctgtacaagaattaccagcaggcacagtctcgccatctgcatccatcttgtttgggctccccacccttgagaagtgcctcagataataccctggtggccatggacttctctggccatgctgggcgtgtcattgagaacccccgggaggctctgagtgtggccctggaggaggcccaggcctggaggaagaagacaaaccaccgcctcagcctgcccatgccagcctccggcacgagcctcagtgcagccatccaccgcacccaactctggttccacgggcgcatttcccgtgaggagagccagcggcttattggacagcagggcttggtagacggcctgttcctggtccgggagagtcagcggaacccccagggctttgtcctctctttgtgccacctgcagaaagtgaagcattatctcatcctgccgagcgaggaggagggccgcctgtacttcagcatggatgatggccagacccgcttcactgacctgctgcagctcgtggagttccaccagctgaaccgcggcatcctgccgtgcttgctgcgccattgctgcacgcgggtggccctctgaccaggccgtggactggctcatgcctcagcccgccttcaggctgcccgccgcccctccacccatccagtggactctggggcgcggccacaggggacgggatgaggagcgggagggttccgccactccagttttctcctctgcttctttgcctccctcagatagaaaacagcccccactccagtccactcctgacccctctcctcaagggaaggccttgggtggccccctctccttctcctagctctggaggtgctgctctagggcagggaattatgggagaagtgggggcagcccaggcggtttcacgccccacactttgtacagaccgagaggccagttgatctgctctgttttatactagtgacaataaagattattttttgatacaaaaaaaaa

SEQ ID NO: 27116 - DNA, 632 bp, Homo sapiens
  misc_feature (622)..(622): n is a, c, g, or t
ggatcgtttcttgatttagctctgatgtatgactcgactcttaggatcacccacccatgtgccgcccccaacgcatgtgccgctcccccggagtcctgcaatgagacacaggactcccagcaacctgtcctcctcaccaggcccctccagaggctccctggcccccagtgcgtctcccttttccctgcacaagaagtgggaggctgagtgcggtggctcacacctgtaatcccagcacttaggacggccaaggtgggagaatggcttgagcccaggagttcgagaccagcctgggcaacacagggagaccccatctctacaaataatttaaaaatgagccaggcatggtggtgcacacctgtagtccagctactcaggaggctgaggtgggagcattgcttgagcccagagggtcaaggctgcagtgagccatggtggcaccaccacactccagcctggatgacacagtgagaaaactgtctcaaaaaaaaaaaaagaaagaaaaagaaaaagaaaaaagaaaagaataaaaggaaatggtggggccctggcccaggagggagcggccaggcgtttgggctcaactagagttaatagtgcgtactgagctagacacatgaanccagatcccg

SEQ ID NO: 27117 - DNA, 2115 bp, Homo sapiens
agttaagggcctggcgtctccctccctgaagacgtggtcccagccgggtgtcctgacgctcggggttcaggacaagggcacacaactggttccgttaagcccctctctcgctcagacgccatggagctggatctgtctccacctcatcttagcagctctccggaagacctttgcccagcccctgggacccctcctgggactccccggccccctgatacccctctgcctgaggaggtaaagaggtcccagcctctcctcatcccaaccaccggcaggaaacttcgagaggaggagaggcgtgccacctccctcccctctatccccaaccccttccctgagctctgcagtcctccctcacagagcccaattctcgggggcccctccagtgcaagggggctgctcccccgcgatgccagccgcccccatgtagtaaaggtgtacagtgaggatggggcctgcaggtctgtggaggtggcagcaggtgccacagctcgccacgtgtgtgaaatgctggtgcagcgagctcacgccttgagcgacgagacctgggggctggtggagtgccacccccacctagcactggagcggggtttggaggaccacgagtccgtggtggaagtgcaggctgcctggcccgtgggcggagatagccgcttcgtcttccggaaaaacttcgccaagtacgaactgttcaagagctccccacactccctgttcccagaaaaaatggtctccagctgtctcgatgcacacactggtatatcccatgaagacctcatccagaacttcctgaatgctggcagctttcctgagatccagggctttctgcagctgcggggttcaggacggaagctttggaaacgctttttctgcttcttgcgccgatctggcctctattactccaccaagggcacctctaaggatccgaggcacctgcagtacgtggcagatgtgaacgagtccaacgtgtacgtggtgacgcagggccgcaagctctacgggatgcccactgacttcggtttctgtgtcaagcccaacaagcttcgaaatggccacaaggggcttcggatcttctgcagtgaagatgagcagagccgcacctgctggctggctgccttccgcctcttcaagtacggggtgcagctgtacaagaattaccagcaggcacagtctcgccatctgcatccatcttgtttgggctccccacccttgagaagtgcctcagataataccctggtggccatggacttctctggccatgctgggcgtgtcattgagaacccccgggaggctctgagtgtggccctggaggaggcccaggcctggaggaagaagacaaaccaccgcctcagcctgcccatgccagcctccggcacgagcctcagtgcagccatccaccgcacccaactctggttccacgggcgcatttcccgtgaggagagccagcggcttattggacagcagggcttggtagacggcctgttcctggtccgggagagtcagcggaacccccagggctttgtcctctctttgtgccacctgcagaaagtgaagcattatctcatcctgccgagcgaggaggagggccgcctgtacttcagcatggatgatggccagacccgcttcactgacctgctgcagctcgtggagttccaccagctgaaccgcggcatcctgccgtgcttgctgcgccattgctgcacgcgggtggccctctgaccaggccgtggactggctcatgcctcagcccgccttcaggctgcccgccgcccctccacccatccagtggactctggggcgcggccacaggggacgggatgaggagcgggagggttccgccactccagttttctcctctgcttctttgcctccctcagatagaaaacagcccccactccagtccactcctgacccctctcctcaagggaaggccttgggtggccccctctccttctcctagctctggaggtgctgctctagggcagggaattatgggagaagtgggggcagcccaggcggtttcacgccccacactttgtacagaccgagaggccagttgatctgctctgttttatactagtgacaataaagattattttttgatacaaaaaaaaa

SEQ ID NO: 27118 - DNA, 2501 bp, Homo sapiens
ctggctggcgtccctctcggcagggtgctctttgccccatggggtgggatccagagctgcagacaggcccccaggcttggccaatgaacagaccaggttcggggagggtgttggaaaagagtggatggggtggttccccttaccttgcagcccccaggccctccccccctccctcccaggtggtcgggactcttgatcttcgctcgtggtactgtctgttcggctgtcttccccgcctctccccaggcacctgcatcctcccttggcacctgctgccaggctaggaagggcaaaaacaatcccagttggcgtagtcagggagtctccgccctcctcccaggtttcctcctcccaggcgcctcccctggacccgcccccatctgcccaagataattttagtttccttgggcctggaatctggacacacagggctcccccccgcctctgacttctctgtccgaagtcgggacaccctcctaccacctgtagagaagcgggagtggatctgaaataaaatccaggaatctgggggttcctagacggagccagacttcggaacgggtgtcctgctactcctgctggggctcctccaggacaagggcacacaactggttccgttaagcccctctctcgctcagacgccatggagctggatctgtctccacctcatcttagcagctctccggaagacctttgcccagcccctgggacccctcctgggactccccggccccctgatacccctctgcctgaggaggtaaagaggtcccagcctctcctcatcccaaccaccggcaggaaacttcgagaggaggagaggcgtgccacctccctcccctctatccccaaccccttccctgagctctgcagtcctccctcacagagcccaattctcgggggcccctccagtgcaagggggctgctcccccgcgatgccagccgcccccatgtagtaaaggtgtacagtgaggatggggcctgcaggtctgtggaggtggcagcaggtgccacagctcgccacgtgtgtgaaatgctggtgcagcgagctcacgccttgagcgacgagacctgggggctggtggagtgccacccccacctagcactggagcggggtttggaggaccacgagtccgtggtggaagtgcaggctgcctggcccgtgggcggagatagccgcttcgtcttccggaaaaacttcgccaagtacgaactgttcaagagctccccacactccctgttcccagaaaaaatggtctccagctgtctcgatgcacacactggtatatcccatgaagacctcatccagaacttcctgaatgctggcagctttcctgagatccagggctttctgcagctgcggggttcaggacggaagctttggaaacgctttttctgcttcttgcgccgatctggcctctattactccaccaagggcacctctaaggatccgaggcacctgcagtacgtggcagatgtgaacgagtccaacgtgtacgtggtgacgcagggccgcaagctctacgggatgcccactgacttcggtttctgtgtcaagcccaacaagcttcgaaatggccacaaggggcttcggatcttctgcagtgaagatgagcagagccgcacctgctggctggctgccttccgcctcttcaagtacggggtgcagctgtacaagaattaccagcaggcacagtctcgccatctgcatccatcttgtttgggctccccacccttgagaagtgcctcagataataccctggtggccatggacttctctggccatgctgggcgtgtcattgagaacccccgggaggctctgagtgtggccctggaggaggcccaggcctggaggaagaagacaaaccaccgcctcagcctgcccatgccagcctccggcacgagcctcagtgcagccatccaccgcacccaactctggttccacgggcgcatttcccgtgaggagagccagcggcttattggacagcagggcttggtagacggcctgttcctggtccgggagagtcagcggaacccccagggctttgtcctctctttgtgccacctgcagaaagtgaagcattatctcatcctgccgagcgaggaggagggccgcctgtacttcagcatggatgatggccagacccgcttcactgacctgctgcagctcgtggatggactctggggcgcggccacaggggacgggatgaggagcgggagggttccgccactccagttttctcctctgcttctttgcctccctcagatagaaaacagcccccactccagtccactcctgacccctctcctcaagggaaggccttgggtggccccctctccttctcctagctctggaggtgctgctctagggcagggaattatgggagaagtgggggcagcccaggcggtttcacgccccacactttgtacagaccgagaggccagttgatctgctctgttttatactagtgacaataaagattattttttgatacaaaaaaaaa

SEQ ID NO: 27119 - DNA, 2216 bp, Homo sapiens
ctggctggcgtccctctcggcagggtgctctttgccccatggggtgggatccagagctgcagacaggcccccaggcttggccaatgaacagaccaggttcggggagggtgttggaaaagagtggatggggtggttccccttaccttgcagcccccaggccctccccccctccctcccaggtggtcgggactcttgatcttcgctcgtggtactgtctgttcggctgtcttccccgcctctccccaggcacctgcatcctcccttggcacctgctgccaggctaggaagggcaaaaacaatcccagttggcgtagtcagggagtctccgccctcctcccaggtttcctcctcccaggcgcctcccctggacccgcccccatctgcccaagataattttagtttccttgggcctggaatctggacacacagggctcccccccgcctctgacttctctgtccgaagtcgggacaccctcctaccacctgtagagaagcgggagtggatctgaaataaaatccaggaatctgggggttcctagacggagccagacttcggaacgggtgtcctgctactcctgctggggctcctccaggacaagggcacacaactggttccgttaagcccctctctcgctcagacgccatggagctggatctgtctccacctcatcttagcagctctccggaagacctttgcccagcccctgggacccctcctgggactccccggccccctgatacccctctgcctgaggaggtaaagaggtcccagcctctcctcatcccaaccaccggcaggaaacttcgagaggaggagaggcgtgccacctccctcccctctatccccaaccccttccctgagctctgcagtcctccctcacagagcccaattctcgggggcccctccagtgcaagggggctgctcccccgcgatgccagccgcccccatgtagtaaaggtgtacagtgaggatggggcctgcaggtctgtggaggtggcagcaggtgccacagctcgccacgtgtgtgaaatgctggtgcagcgagctcacgccttgagcgacgagacctgggggctggtggagtgccacccccacctagcactggagcggggtttggaggaccacgagtccgtggtggaagtgcaggctgcctggcccgtgggcggagatagccgcttcgtcttccggaaaaacttcgccaagtacgaactgttcaagagctccccacactccctgttcccagaaaaaatggtctccagctgtctcgatgcacacactggtatatcccatgaagacctcatccagaacttcctgaatgctggcagctttcctgagatccagggctttctgcagctgcggggttcaggacggaagctttggaaacgctttttctgcttcttgcgccgatctggcctctattactccaccaagggcacctctaaggatccgaggcacctgcagtacgtggcagatgtgaacgagtccaacgtgtacgtggtgacgcagggccgcaagctctacgggatgcccactgacttcggtttctgtgtcaagcccaacaagcttcgaaatggccacaaggggcttcggatcttctgcagtgaagatgagcagagccgcacctgctggctggctgccttccgcctcttcaagtacggggtgcagctgtacaagaattaccagcaggcacagtctcgccatctgcatccatcttgtttgggctccccacccttgagaagtgcctcagataataccctggtggccatggacttctctggccatgctgggcgtgtcattgagaacccccgggaggctctgagtgtggccctggaggaggcccaggcctggaggaagaagacaaaccaccgcctcagcctgcccatgccagcctccggcacgagcctcagtgcagccatccaccgcacccaactctggttccacgggcgcatttctcctctgcttctttgcctccctcagatagaaaacagcccccactccagtccactcctgacccctctcctcaagggaaggccttgggtggccccctctccttctcctagctctggaggtgctgctctagggcagggaattatgggagaagtgggggcagcccaggcggtttcacgccccacactttgtacagaccgagaggccagttgatctgctctgttttatactagtgacaataaagattattttttgatacaaaaaaaaa

SEQ ID NO: 27120 - DNA, 1979 bp, Homo sapiens
ctggctggcgtccctctcggcagggtgctctttgccccatggggtgggatccagagctgcagacaggcccccaggcttggccaatgaacagaccaggttcggggagggtgttggaaaagagtggatggggtggttccccttaccttgcagcccccaggccctccccccctccctcccaggtggtcgggactcttgatcttcgctcgtggtactgtctgttcggctgtcttccccgcctctccccaggcacctgcatcctcccttggcacctgctgccaggctaggaagggcaaaaacaatcccagttggcgtagtcagggagtctccgccctcctcccaggtttcctcctcccaggcgcctcccctggacccgcccccatctgcccaagataattttagtttccttgggcctggaatctggacacacagggctcccccccgcctctgacttctctgtccgaagtcgggacaccctcctaccacctgtagagaagcgggagtggatctgaaataaaatccaggaatctgggggttcctagacggagccagacttcggaacgggtgtcctgctactcctgctggggctcctccaggacaagggcacacaactggttccgttaagcccctctctcgctcagacgccatggagctggatctgtctccacctcatcttagcagctctccggaagacctttgcccagcccctgggacccctcctgggactccccggccccctgatacccctctgcctgaggaggtaaagaggtcccagcctctcctcatcccaaccaccggcaggaaacttcgagaggaggagaggcgtgccacctccctcccctctatccccaaccccttccctgagctctgcagtcctccctcacagagcccaattctcgggggcccctccagtgcaagggggctgctcccccgcgatgccagccgcccccatgtagtaaaggtgtacagtgaggatggggcctgcaggtctgtggaggtggcagcaggtgccacagctcgccacgtgtgtgaaatgctggtgcagcgagctcacgccttgagcgacgagacctgggggctggtggagtgccacccccacctagcactggagcggggtttggaggaccacgagtccgtggtggaagtgcaggctgcctggcccgtgggcggagatagccgcttcgtcttccggaaaaacttcgccaagtacgaactgttcaagagctccccacactccctgttcccagaaaaaatggtctccagctgtctcgatgcacacactggtatatcccatgaagacctcatccagaacttcctgaatgctggcagctttcctgagatccagggctttctgcagctgcggggttcaggacggaagctttggaaacgctttttctgcttcttgcgccgatctggcctctattactccaccaagggcacctctaaggatccgaggcacctgcagtacgtggcagatgtgaacgagtccaacgtgtacgtggtgacgcagggccgcaagctctacgggatgcccactgacttcggtttctgtgtcaagcccaacaagcttcgaaatggccacaaggggcttcggatcttctgcagtgaagatgagcagagccgcacctgctggctggctgccttccgcctcttcaagtacggggtgcagctgtacaagaattaccagcaggcacagtctcgccatctgcatccatcttgtttgggctccccacccttgcctcagatagaaaacagcccccactccagtccactcctgacccctctcctcaagggaaggccttgggtggccccctctccttctcctagctctggaggtgctgctctagggcagggaattatgggagaagtgggggcagcccaggcggtttcacgccccacactttgtacagaccgagaggccagttgatctgctctgttttatactagtgacaataaagattattttttgatacaaaaaaaaa

SEQ ID NO: 27121 - DNA, 1654 bp, Homo sapiens
ctggctggcgtccctctcggcagggtgctctttgccccatggggtgggatccagagctgcagacaggcccccaggcttggccaatgaacagaccaggttcggggagggtgttggaaaagagtggatggggtggttccccttaccttgcagcccccaggccctccccccctccctcccaggtggtcgggactcttgatcttcgctcgtggtactgtctgttcggctgtcttccccgcctctccccaggcacctgcatcctcccttggcacctgctgccaggctaggaagggcaaaaacaatcccagttggcgtagtcagggagtctccgccctcctcccaggtttcctcctcccaggcgcctcccctggacccgcccccatctgcccaagataattttagtttccttgggcctggaatctggacacacagggctcccccccgcctctgacttctctgtccgaagtcgggacaccctcctaccacctgtagagaagcgggagtggatctgaaataaaatccaggaatctgggggttcctagacggagccagacttcggaacgggtgtcctgctactcctgctggggctcctccaggacaagggcacacaactggttccgttaagcccctctctcgctcagacgccatggagctggatctgtctccacctcatcttagcagctctccggaagacctttgcccagcccctgggacccctcctgggactccccggccccctgatacccctctgcctgaggaggtaaagaggtcccagcctctcctcatcccaaccaccggcaggaaacttcgagaggaggagaggcgtgccacctccctcccctctatccccaaccccttccctgagctctgcagtcctccctcacagagcccaattctcgggggcccctccagtgcaagggggctgctcccccgcgatgccagccgcccccatgtagtaaaggtgtacagtgaggatggggcctgcaggtctgtggaggtggcagcaggtgccacagctcgccacgtgtgtgaaatgctggtgcagcgagctcacgccttgagcgacgagacctgggggctggtggagtgccacccccacctagcactggagcggggtttggaggaccacgagtccgtggtggaagtgcaggctgcctggcccgtgggcggagatagccgcttcgtcttccggaaaaacttcgccaagtacgaactgttcaagagctccccacactccctgttcccagaaaaaatggtctccagctgtctcgatgcacacactggtatatcccatgaagacctcatccaggtggggggaccccccatttcactgcagattcacgactccccagcattggccagtgcttctccacccttaagtcctgtgcctcccctctatgttgtagaaagagccaaatcacagtcctgtgtgactggggacagtcactttccctgcctgagcatcagtttcttctattaaatgggggcgagaaatgcatgtggagcatttccttgtaaaaacctgagggtgggctgggcacggtggctcatgcctataatcccagcactttgggaggctgaggcgggaggattacttaagcctagaagtttgagagtttgagaccagcctgggcaacataatgagacctcgtctctc

SEQ ID NO: 27122 - DNA, 367 bp, Homo sapiens
agatgagcagagccgcacctgctggctggctgccttccgcctcttcaaggtgagaccctgggagtggcatggggggctggcctggccagagggatccccagctctgccctcaggaagtctcaggaatgaggagggcatcacagccttgctctctgataacccccagtccaagcctgaagttataggaagtgcccatcgaaggcagaaacacagccctggtctgggcaagtcctggtctgaggggggcgtcacagccacgcccccaggacctctcgacctcaagctctctttctctccccacccccagtacggggtgcagctgtacaagaattaccagcaggcacagtctcgccatctgcatccatct

SEQ ID NO: 27123 - DNA, 523 bp, Homo sapiens
ccacctcagcctcctgagtagctggcacaggcgctacctcacccatctaattttttattttttttagagatggggttttgccatgtttgcccaagctggtctagaattcatgagctcaagtgatctacctgcctcggcctcccaatgtgctgggattacagacatgagccactatgttcagccatacctggctaatttttaaaaaatgttttcaagagacagggtctccctgtgttgcccaggttggtctcaagttcctgggattactgctggccttcaaaagtaaatgtgaaataattagttaatttctccctcagttgacaaataatgccaaaagtgataaagattaatgaaatgtctcattaaaaaaaaaaaaaaagaggtaaaatttaaataacttaaggctgattgtattggcttacacttgtaattccagcattttgggagaccaaggcaggaggatcacttgaactcagaagtttgagaccagcctggtcaacatagggaaacctcatctccacaa

SEQ ID NO: 27124 - DNA, 228 bp, Homo sapiens
aattagaaagaaagaggaagtgtggtgagtttactttttggaataaaagcacaaagcagaaaaccaatgggacacccagttactttgtcaacagtatgccaaacactaattttggaagatcctgttaaacttggtatagtccctgagtattatttttattctccattgtctgtttcccagttgtgatcatataatagtaaaactcacctaatgaaagcacctgcttcc

SEQ ID NO: 27125 - DNA, 2129 bp, Homo sapiens
  misc_feature (1808)..(1808): n is a, c, g, or t
tgagccgagatcgcgccactgcactccagcctgggcgacagagcgagactccgtgggcttggcggcggggcaggattccaggcaggagccttgcctctcaggtggcgggctctgcgaccctgcgagatggacgggacagaaggcagtgccgggcagcccggccccgctgagcgatcccaccgaagcagcgtgtcctccgtgggagcccgagcggctgacgtgctggtatacctagcggatgacacggtggtgcccctggctgtggagaacctgccctcgctcagtgcccatgagctgcaccgcgctgtccgcgaggtcctgcagcttccagacatcgccctggatgtcttcgcgctctggctggtctcccctctgctggaggtgcagctgaaacccaagcaccagccctacaagctgggacgccagtggccggagctgctgctgcgcttcaccagtgccccagatgatgacgtggccatggatgagcctttcctgcagttccgaaggaacgtgttcttcccaaagcggcgggagctccagatccatgacgaggaggtcctgcggctgctctatgaggaggccaagggcaacgtgctggctgcacggtacccgtgcgacgtggaggactgcgaggctctgggcgccctggtgtgccgcgtgcagcttgggccctaccagcccggccggccggcagcctgcgacctgagggagaagctggactccttcctccctgcccacctctgtaagcggggccagagtctctttgctgccctccggggccgtggggccagggccgggccgggcgagcagggcctgctgaacgcctaccgccaggtgcaggaggtcagcagcgacggcgggtgcgaggccgccctgggcacccactaccgcgcctatctcctcaagtgccacgagctgccgttttatgggtgtgccttcttccacggtgaggttgacaagccggcccaaggctttttgcaccggggtgggcgcaagccagtttctgtggccatcagtctggaaggcgtgcacgtcatcgatagcagagagaagcatgtcctgctgggcctgcgcttccaggagctgtcgtgggaccacacctcccccgaggaggaggagcccatcttgtggctggagttcgacggggacagcgagggcacacctgtcaacaagctcctcaagatctactccaagcaggccgaactgatgagcagtctcattgagtactgcatcgaactgagccaggcggcggagcccgcaggcccccaggacagtgcgactggctcgccctcggaccccagctcctcactggctcctgttcagcgccccaagctgcggaggcagggcagtgtggtgtccagccggatccagcatctctccaccatcgactacgtggaggacggcaaggggatcaggcgagtgaagccgaagcgcaccacatccttcttcagccggcagctgtccttgggccaggggagctacaccgtggtgcagcccggcgacagcctggagcagggctgaggacgctgcacccggcaggaggagggcgactgggggccctggcccggcactgtcctcctgaggggcaggcgccggctgcaacagtctcatgggtcaccacgtggggagggctgcctcagcaggtttctcagaccacggagaagtgacttttgggcccggggccatgcccgggctgtgcaaagctggccagggcctcctgtagggctcctctgcagcctgccctgccttcccccggatgctgggccctgctgctctctcaggaccatccgatcaagctgcagctgccnacctcacctagaaacatgcctttgtgcccacctcaagatgggcagtgtccctgttctgaagtgccagtggcagctccagtggtagaggaccacgcttgaggtttgggacctgaagctccagtgtggtgcctttggcctcttccctggactgggttgaccgtctcgtcttcctcctgctagtgctccaccccgcgggacttgggtgaaccagtttccaacattcctccggatggtgctcaattaccccaataaccaggtggggcacccattctgaagaagggtaggaaggggcgaccccgggattgtaacgggggccagaaa

SEQ ID NO: 27126 - DNA, 421 bp, Homo sapiens
cctctgacatgggggctaaatgctactgaaaggtggaagctgccaggtttcttgagtcttaagcctgtaattttcacattgttatgagcatgaataatgggatgtgtgatacattggggcccccaagtaaaatctatcatacaaagctgtttgaagaatatcatcgacaagccatactcgcaggaagcggtctgactatgatgcaatggataaaaagagactctctgaataaaaatataataataatcagggaaatgcaaatcgaaaccactatgagacattacctacatcagttaaaatagctagtatcaaggaaccaagagaaaacaagtgttggtgagtttgtggagaaaaggaaaccctcatacactgtcattgagaatgtaaattagggcagccattatggaaaacaacatggagg

SEQ ID NO: 27127 - DNA, 298 bp, Homo sapiens
tctcaaactgcaatgaggaactcacaataccaaacaaacatacagaaactaaacaacttgcttctgaatggcttttgttgggtaaataacgaaattaagacagaaataaaaaaattctttgaaacatatggaaatggagatacaacatagcaaaacctgtgggatatagaaaagaagtgttaagaggaaagtttacagcactaaacacctaaatcaagaagacagaaagatctcaaactaacaacctaaccttacatctgaaagaactagaaaaaacaaacaacccaaagctagcagg

SEQ ID NO: 27128 - DNA, 407 bp, Homo sapiens
ctccctgccctggaaccctggatgtcagcacctgactcctacctgctgtgacattggcaaaagtagctgtggcagaggccgagggtcccacctgcttactgggccccgcttctccggacaggagcagaagctgcagagctttgggacctcagcacttgagcagcatgtggacgcgagcagcgagtaaccccgggctcccagagacgcgtgacggggtccccagggggttgcttgagggccctcaagtcaggagctgatttctatcctcaaatatttaagcatccccaagcccaggtgcggtggctcacacctataatcccagtactttaggaggccgagatggggggatcacttgagcctgggagtttgagaccaccgtgggcaacatagcaagactccagctctac

SEQ ID NO: 27129 - DNA, 204 bp, Homo sapiens
tgaattggaataaataaattttatagtagtcagtactgaaacaagaaatactttaatttagcttgtatacaacatataggctatgttactagaaaaaagttttaaggacatactgtacaagttgtactttataatgattatcttcttgtatgcgcaattaaatgtacacacatgaccagaaattaaataatatattcctattct

SEQ ID NO: 27130 - DNA, 456 bp, Homo sapiens
cgtttaattgacttacagttcagcatggctggggagacttcaggaaacttaaaatcatggcagaagcgggagcaaacctccttcttcacagggctgcaggaaggagaagtgaggagcaaggagggaaaagccccttagaaaaccatcagatcttgtgatacctcactcactatcagagaacagcatgggaataaccacccccatgattcagttacctcccaccgggtccctcccacaacacctggggattatggtaactacagttcaagatatggtttggctgtgtgtccccacccaaatctcaccttaaattgtaatccccaggagtctggtgggaggtgattgaatcatggggcgaacttcccccttgctcttctcatgatagtgagttctcatgagatcaggttttttgaaagtgtctggcacttccccctcactcattctctctctctggca

SEQ ID NO: 27131 - DNA, 400 bp, Homo sapiens
aaaaaaaaaaaaaaaaaaaaaaaaagcaaatgaaaatcttagaaccatagaacgtagtatccaaaataaaaatggatgggctggatagcagaaggtagctcatcactcactgtaaccttgaactcctgggctccagtaatcctcccgcttcagcctcctgattagctgggactgcaggggtataccaccatgcctggctaatcttgggttattttattatagctgctttacaatctgataattccaacaactgtgtcatcttgggcattggcatctgttgattgtctttttccatatgaattgagattttcctgggttctttgtatgccaagtaatttaggaattatatcgtgggacatttgtttattatgttatggggactctggtcttgtttaaatcc

SEQ ID NO: 27132 - DNA, 324 bp, Homo sapiens
tgggattattggcatgagccaccacacccagccccaaatgatcttacatgttaagaaacaacaaagatttattgacatgtttgttgcctgacttctttgttagaatgtaagcttcatgaacaagaagatactgggtctgcaatttttgtcattgaattcccacctagaacagttcctgggatagagcaggcactaaaaaaccatttgtcaaatgggcaaataaatctctaagtaggtattaagatttgggaaaactttgagggggacttttcctttcactgtggctcaaccatgttagctttgagaagctaataagaaaggaaa

SEQ ID NO: 27133 - DNA, 386 bp, Homo sapiens
aaatgtcaccacaatcttccttcctttgcattttcttattgtgcactaagttagttcttgcttagtaagtcttgtctttctctctgctttgacctgtcagtattccaacttccttattttttgatgttcattttctccttgctctctttcttcctttcttgtctgtgaactccattaaccgcttctgcatgtgaccattaatgtgcctgtctttcttctcatgtattagagagaacaaaagctttgggaatcagacagatctgtgttctgatcctgtcttatggtatctgtcttgtttgtctcggcttaaaatggggataatatctacctctcagttttgttggcagttcagtacacggaaataaagttctcactttcttttttaa

SEQ ID NO: 27134 - DNA, 1323 bp, Homo sapiens
tgcgaaactccagtctctgcccccaccttcacatcatcttctccatgtctccttaccttcctttgcctctgtcttgaaaagacactgtgatggcatttaggacccacccagctaattcagtgtgttctcatctgcagatccttgatcaagtcacatttgcagagacctctttttcaaataagagacgaggtctcactatgttggccaggttggtctcgaattcctggccgcaagccgttctccagtctgggcctcccaaagtgctaggattacaggaacagaattgccattgggcccagggagagactacacttcttgtctgctttgttgctagtgcggccttgtggccaagcacagaacgtgtgcagtgatgatggtgcaacttctaggtcgtccccagcatggaaaatgagccctgggcatggaagatgagccctggtcctgcagcggtgctctttcctcttctcacaagctggaatgtgcatgtgctcccacccagctttgaccatggggcgaaaacagtactctgcagtctggcagagcaacaaggtggaaagggcctgggtccttgagtgacgtcatgagccctctcactgtcccgactttgggactgttatatgataaggactttctgtgagtcactgtcttttagagtctctctgttttagctgcctggactttatcctgaataatatggctgttatcatgggtatagtgttactatgagcctcatctaagtaatttctactctgcctttgaccactaaactcatgttggacaagagtcacttagcattattttttcctcaatgaagaggttaagatggagggagcaggagaaattgaggcctgtgttttaccagaaggtgaagggctgtctttgcctttcctacatttatgaaggataattctagacaaaaacattaagttcatatcaaaccatctgctttgtgaagccatgggctttgctagaactttctgtgacatgacatttattaacccgagtctacctggaagttagagctgaggaagttttcctagagtggaaaaagtccaatgcacttgtaaaagtcagaccaagctcagctcagatttcagttttattagaagtatgtcaccttcctgagcccttattatttccccatctgtgaaatgaggacaccgttctctctttctaagcattgctgggaagaccacacaccactgagacagaaggtggggctagcgcagttctgggcattttgtacacccccaacaaatactgatttatttccttctttttccttgctcagaaaaaattggagaaggctttattttaaaattc

SEQ ID NO: 27135 - DNA, 840 bp, Homo sapiens
tctaagaatttgtctctttgtattgagctcaattatgttttacaattaactccctctaaaatgcataagcttatagggctggctactatatgccaggttttatgaattaactcttgatgaaaatacaaaaattgatctaaaatattgaatgtgtagaacctttatggggaaatgattctttgctcttttgtctgtactggatttttcaaaatctttattggtaaaaagaaagaatgtatttctaagaattgttgcaaccatacagggcagccatggagctgactctacattttgttttaaaaatgttgttttatacctgcactatttatttaggagggtcctcttggtagctctttaacccatttattaagattagaagaggttccaccagcaaacaaaagacaactaatctgagtctgtttgaaagcagactgaagcacccactttcacaagacaggccagggctggattccatcctagatggccaagagaaccctctctaaacaataggggtttaaaatgtttttgaagtagcaaggcggtctccactcaggaaaataaaaagttaataagatgatgtggcaagtcctctgatggtgttcgtagagccatttaaggagcaaaatataacttccttaaaaaatcttttttacattagttgtaaggctctctttatcctctgcagagaatggagaagaagcatttacttggcatgtttgaaaattttgcttgagcagacatcaacagtataaatataagaagcaggaaggactatctagaaagaaaagaaacctgggaatcatagttgacttggatgtaaacgtgagtctgcaatgaggt

SEQ ID NO: 27136 - DNA, 630 bp, Homo sapiens
  misc_feature (513)..(513): n is a, c, g, or t
ggtactcagatagtaattagtaaacattttcataaataatcttaaccttttcaagcatttttgtcgattggattgtagcactcaaaagtaaggtctgttttactaatataaaattgggcctgtggaataattctcttcacagaagtgtgtgtgtgtgtgagagagagagaaaatgtatatgcatacatatacatatattattgagacataatttacataatttatgttctataaaattagcatattttaaatatacagttctctggattttgaaaaatgtatacgtgtacataatcatgggtccaccaccccagttaagatatagaacattccagggccaggttcagtggatcatgcttgtaatcgcagcatgttgggaggctgaggagggtggaccacttgaggccaggagtttgagatcagtctgggcaacagggtgaaaccccgcctccactaaaaatacaaaaaaaagaaaaaaaaaaagaaaaaaatagctggccattgtgacatatncctgtaaccgtagctactctggtggctgaggcttgagtatcgcctgggaggcagaggttgcagtgagccaagatggcactgctgcactctagcctgggtgacagtgagactgtcttt

SEQ ID NO: 27137 - DNA, 440 bp, Homo sapiens
gacttcttttatgacctaacatatgatctatcctgcagaatgatccatgtgcacttgagaagaatgtatactctgctgctgttggatggaatgttctgcacatgtctgtaggtgacttgacttgcagtgttgatcaggtcatctgggtctttgttgcctttatgtttggttgttctatccattattaaaagtgagcactgaaatctcctactgttattgtattgctatctatttctcccttaagttcagtcaatgtttgctttatacctttagatactctgatgttgggtgcatatatatttaaaattattgtatcctccaatgtgaattgacgcctttatcattatgtaatatccttctttttttcttgtgacaatttttgacttaaagtctattttttataatatcagtaaaggcattttttgttgtcttttagttat

SEQ ID NO: 27138 - DNA, 338 bp, Homo sapiens
atagacttgtatgagtgagtggattagtgtacatctatttcctccctctgtctgctgattacacaggattctttcaaagccacttcgctagccggaaatctctgtggccagcaagcagcgcctctgatcaggctttgctgcgagaaaacctcaaaacccaaacaacaaaaacaaaaaacacacacagaagaagagttattctgtgccaactgcagttctatgcttggcctgtggctgggccaggcatgcggcgacctgcttctgacttggaaatcgacatctggatgaggggaacgcagcggcacccaaaaactcagagatgccagcaacggcagagc

SEQ ID NO: 27139 - DNA, 284 bp, Homo sapiens
gacagggctgccacataatatggcatgtggatccttctaggaaaaaggatccaggagataatgagagatcacctaagacagaagacaatctttttataacattatcttagaagtgacatccatcacttttgatcaattctttttattagaattgagtcaataagccagtactacatttatggagagaaaagtattcagggttatgaataccaggaggtggggatcattgaagaccattgtaggagctacatattatggatgtgtaagaagggacagagattttt

SEQ ID NO: 27140 - DNA, 410 bp, Homo sapiens
cgtcgtgatccagaagtccagagctgagactgcctgtttgcaggtgctgtcattcagagtccacaggatggatgaatggatatgaaaatgaacaaacgtgtgacacaacactgcatgatttacctgcaatgactttctgatcaagcctgaacatcccaagacaaccatgctgtgaagaagtcggtctaccccactggagaaggaaaggctgttcagggaagtgaagatgccccagctgacagtcaccacctgccagacatgtgagcaaggctgtctgagaccttcagtctcagtcaagccatcagaaagttgcagccagttgagtgatcccaagtgagaccagcagcgataatgcccagtttgccaaaacagaattgtgagaaataataaatcattgttgttttaagcca

SEQ ID NO: 27141 - DNA, 917 bp, Homo sapiens
gtgcttttaggttctgtttggcaatatttaggaatttcacatggatataagtgagatacattttattttgtgtgtgctcatgtgggcagtctttgtcagggcttggtattattctagctttaaaaagaagagtatttaacttactttttatgctcctgtataaaatgtaagcagagttggaggcttatgttctttaaagacttagtagaactgacctgtgaaacaatctaggaatgggctttctgggggtagaaaagggtacagccaggaaactgtctatatttcttctgtgctaattggtttgttcagataatattatctctactctaaattgtgttcatttatatttttagaattttatttaattccaggtatttgttttgcatatatttgaacaaataagtatactgataagcttttactgtccttggttctttagttacccgtaaattatattttcctattttatgtaattgactttttcactttttattctgctttaaatcagccagaagtttatctatttatttattttaaataaccaggtattagatctattactttatcatttttctatctgctaatacatagttgcttgctttatttatttaaaatattgtgaagaatatacacatgtagaaaagtgcacaacacatgttttcccatatatataacatagaacagctacccaagtcaaaagtccacctcatgtccctgctaaacctctatcattccctcctcctcaaacttaagtacggtagtgttaacacggcggtattgtttcacctgcttttgagctttatatatatggactcattagtatgtatttgtgtctttcactcaataatatgagagctgttttaaatttttattttctaaatttattaaattgaaacacagttgacttttgtatatta

SEQ ID NO: 27142 - DNA, 701 bp, Homo sapiens
cactgcagcctgggggacagtgagactccatctcaaaaaaaaagaatagaataactcttgtttaggtgttacaaaatccaggccagaccaatctaaactttaatctcatacccggttcctagatgagtcccttctccagctcaggttcggcctaagcctcagggttccttacttggtgggcaccacctgctcccttccccgcctttgtcctctttttcctctgctggctcctccggggttgggtgtgttcagaggcagagacaggctcaaggtctttggcttttaggttctgttgatgggtgagttccagatatagctttctcttgtaggatatttcatttatttatctattaaaaatatttatttagaacacaccattcatgtgccagaccctgttccaggcactggggagagggtgataaatgagatcaacaaaaatacctgcccacattaagctcctgttctagggaagacaaaaaagaaagaaaatacacgtgtccttagtacattagaaggttccaagtactgtagagaaaaataaagtaggttggactcggtggctcatgcctgtaatcccagcactttgggaggctgaggtgggaggatcacgagactgtagattgagaccatcctggctaacatcgtgaaccccatctctaccataattcggtagtatagaagagtgcacttttaagcctccg

SEQ ID NO: 27143 - DNA, 464 bp, Homo sapiens
cgcctttgtcctctttttcctctgctggctcctccggggttgggtgtgttcagaggcagagacaggctcaaggtctttggcttttaggttctgttgatgggtgagttccagatatagctttctcttgtaggatatttcatttatttatctattaaaaatatttatttagaacacaccattcatgtgccagaccctgttccaggcactggggagagggtgataaatgagatcaacaaaaatacctgcccacattaagctcctgttctagggaagacaaaaaagaaagaaaatacacgtgtccttagtacattagaaggttccaagtactgtagagaaaaataaagtaggttggactcggtggctcatgcctgtaatcccagcactttgggaggctgaggtgggaggattacttgagctcaggaatttgagaccagcctgggcaacatggcaaatcctgtctctac

SEQ ID NO: 27144 - DNA, 174 bp, Homo sapiens
tctataaatttgttctgaccaggaggcatccctggagtctctctgaatctgctgtgattctgggggctgcccaattcacaaattgttcattgttcaattaaactttaaatttaattcagctgaagttttaaacaatggcggctggcttctaacagggaggcggtgaatcctgcc

SEQ ID NO: 27145 - DNA, 333 bp, Homo sapiens
ggatatccaggaagaagtgatgcatgggcaggagtaatttaggattagagtgcaggactgaaagtattgatcagtgaatcattgatttggaagatgacagtaaaaccctaagaatctgaggtaaggaaggatgagagaggaatggacaagaaccagataacaagcttaaaggaatgatttctttttaggtgccctgtataagcaacgacagtgcgaagggataccttatttagcattgtttaaacctctttatctgctccataggcatatgacctcaataaaggcagcagtgtgtttatgatgcagacccagctagaagacaagttcccaggt

SEQ ID NO: 27146 - DNA, 469 bp, Homo sapiens
tgcaataatttataatttttatattatttatgctaactgagcatgaaagattagatggaccatttcagacttctctacctgacctatatcgtctgaacaaactgaccccttttaacataaacactgaaaaggggagcagtcctagtttttgctggcattggtcttaaaggagtgccttagctacttggctccaactcatcctctcatctctggatgaggagctgtcagtggcctcttcaggaccactgattatcagtaggtcccaagtcgtctctatggggaatcagaggcatatgattatcaggcatcatctgaacaaggtgtctatcataaactgagtgtaacagtcctgtcccctaacccaggcttagtccttttctaatgtttcctctccccacctcccttcttcttgtgtccacagagcatgacttgctcttaataacctcttctaaggttgtgacattataag

SEQ ID NO: 27147 - DNA, 727 bp, Homo sapiens
ctttagtctgtagttttggtgtttgttctgcatgtgagtatttgggggtttgtagggggacctggtcacctaattttgttgtaaatggtgcccacagattttgattttgctatcttagttatggctcttttatgtgggaagagattggaaagctatgctgctgccagtgttaccctaaaatcctgtctaaatatcatcagacaaatacatattaattgtaggctaaatcgatgcaaagtgagtaagacagttcgctagatcccagctcccagagatatgcatgcatgtttacaatggggtaaatttccttccaaactctagttcttttcttgacatgctcatgtctgtttcttgcattgagaaaggaagagttatggttactatttctatgaaagattatttagagatctaggtactgtggcttgtaatcccagccatcccagaggctgaggtggaaggattgctggatggcagatttggaggctgaggaaggatagctggagattaagagttggagaccagtctgggcaacataggaagaccccatctcttaaaacaaaacaaaacaaaacaaaacaagtgttgcgtgtgtctgtagtcctacctacttgggaggctgaggctggaggatcacttaagcccaggagtttgagattgcagtgagctgtgattaaaccactgcactctagcatgggtggtagagcaagaccttgtttctttaccaaaa

SEQ ID NO: 27148 - DNA, 554 bp, Homo sapiens
caaaacacattaacattttaaggtatatttatcctttcaaagttaaaaataacttttaccacctccctaaattataaatatattgtaaaaaagcctaaatggtagcgtagtgcttccttgcttctgcccctgatggtctttgtttagcgtcttttgtttgtttgtttgttttttgagactgagtgtcgctctgtcgcccatgggcgatctctgctcactgcatcctccgtctcccgggttcaagcgattctcccgcctcagccatcccagaggctgaggtggaaggattgctggatggcagatttggaggctgaggaaggatagctggagattaagagttggagaccagtctgggcaacataggaagaccccatctcttaaaacaaaacaaaacaaaacaaaacaagtgttgcgtgtgtctgtagtcctacctacttgggaggctgaggctggaggatcacttaagcccaggagtttgagattgcagtgagctgtgattaaaccactgcactctagcatgggtggtagagcaagaccttgtttctttaccaaaa

SEQ ID NO: 27149 - DNA, 3134 bp, Homo sapiens
agctggatgtgttattccttctctgcatcgaaggatcaggaagtttgtgctctctgcgtggctaagtttttcacctactaggacgggggtggggtggggagaacaggtgtccttctaaaatacagcacaagctacagcctgcgtccagccataacccaggagtaacatcagaaacaggtgagaatgaccactttaactcaccgggcccgtcgcactgaaataagcaagaactctgaaaagaagatggaaagtgaggaagacagtaattgggagaaaagtccagacaatgaagattctggagactctaaggatatccgccttactcttatggaagaagtattgcttctgggactaaaagataaagaggggtacacatctttctggaatgactgcatatcatcaggcctgcgagggggcatcctgatagagctggccatgcggggtcgaatctatctggaacccccgaccatgcgtaagaagcgactactagacagaaaggtactgctaaagtcagacagcccaacaggtgatgttttactggatgaaactctgaaacacatcaaagcaactgaacccacagaaactgtccaaacatggatagagctactcactggtgagacctggaaccccttcaaattacagtaccagctgagaaatgtacgagagcgcatcgcaaagaacctagtagagaaaggtattctaaccactgagaagcagaatttcctgctatttgacatgactactcatccagtgaccaatacaacagagaaacagcgactagtgaaaaaacttcaagatagtgtactagagcggtgggtaaatgaccctcagcgtatggacaagcgaacactagcactcctggtgctagcccactcctctgatgtgctagagaatgtcttctcctctctgacagatgacaagtatgatgtggcaatgaatcgagccaaggacttagtagaactggaccctgaagtggaagggacaaagcctagtgccacagaaatgatctgggctgtgctggcagccttcaataaatcttaaagccggcaggtggatttctccttttcccctgctggctggtgactgtcagagaccccatcactgagttttgtgtgatgagatgttttcatcatttttgtttccttttcttgaatcagacttgtgatttggggagagcaacttcagggcttctccatagaccttgaccattataagcagaccttatttctccctacacttccactccataggtaaataaactgggtgaagccacacacacccaatgaacattttctcccatttggtggtttagtttcacccagtgtgcttttggataagcagaaatatctaaatgggattttgagttctccagctatagaatgtgaatgagataaaaagtgaactatctattatatttttctgagtttgttttctatcataaatacatgttttcacagcctttgtctctcagactctgctaaataatgtagcttattgaaataactgtcgctgaataaggagcaatgagaaacaaaactaatttttggagcagatggtctctggaattgcatatcctgctagtgattttctcatctttccttttctaacctaatgagaatgtcccagattcaattacctggatgtcaaagtcctagagccagaaatatattctctcatccctcttagcattctcttgctccctcattcactagggcaaatgtctaaatgaagaaaagtctctctcaacacctcgttcatgcaatcagcattagaatttgtaaggaaggaaggggggtggcatgaaaatttccattcttggggtatatgactgtcctgtttcccccaggccactttttttttttttttctctttggagacagggtcttgctcttgcccaggcaggagtacagtagtgcaatcacagctgactgcagccttgacctccagggctcaaggatcctcctgcctcagtctcccaactaagtgggactacaggcacgtgccaccatactcagcttttttttgtttgttttagacaagagtctcgctttgttgcccaggctggtcttgaattcctgggctcaagcaattcttccacctcagcctcccaaagtgctgagattactggcttgagccactgcacccacccctccagactactttaaatgtctctgctctgactgaattgaaggaattgtaagtttcagttgctgaatatatcagtatatctgaactccggatctttttatttcctatttttggcttcctacataaattaataaagtctgtctatatttaaggtttctgggagtagttttgtctatatttaatccatagatgtgctcctagtcatcagtcttatttcagtaaaaccatctttctggccaaatctctaacacgttttttacttcagtagtgagggcaatgagaagctttattaagaaagatcctatttaaagggctaatttggtattgaaagcatgctgatataaagtccagtatttgaggatataaagaggatgtgcactgagctgtgctgatgttcagcatttattatactttaatgggatagtgcttcttgaccattatagaacaacaaactgtcaaagggttaatacagatgacccagacctgacattaaatcctcttgattagaaataattaaatgaattatttattcatttctctcctctgccaaatctacttagccccacaaaaatgccccagctcagttaacatttttttgtttttcactttaggtatctcttaggcaaatagagatataaattgtaataggaaacagtctctaaatgtgaggctgaatacagcttcagtctggctctctaataggacaaaagccagtccatgtgttgtctctaactgatttagctttttcttttctttgaacaattcggcatgaattgaaaccaggttttcctgtggaaagttatagcttgattgggagatagaagttgaattgagttctttcttgcaactcttagtgtttatttttatatctcagtaagacgaggataccttcagtttgaatctgcataatgttcactgccaaactccttctcatttaatgcttatggccttcacatttctgtataataaagatcaattatcagctc

SEQ ID NO: 27150 - DNA, 3428 bp, Homo sapiens
aaaatacaaaaattagccagacatggtggcgcacacctgtaatcccaactactcaggaggctgaggcacaagaatcacttgaacctgggaagcggaggttgcagtgagccaacatcgcaccactgcactcccagcctgggcaacagagcaagactccctctcaagaaaagaagaagaaaaagaaaaaaagaagtcaacaggcttgaaagatgagcatttctactggactttagaattactcatttgatcttttgtcagtgccatctgtgaagtccaagctattgtactttggaaaagatactgtattacccacccatttttttctggtcattactccttcctttctttctatatttaaatctgtaaatatttcctatttgtatggatgtttagtatgcatgtatgaatatatgatttatttacataagcatacatatggattttttttttcaccactccctccagaaacaggtgagaatgaccactttaactcaccgggcccgtcgcactgaaataagcaagaactctgaaaagaagatggaaagtgaggaagacagtaattgggagaaaagtccagacaatgaagattctggagactctaaggatatccgccttactcttatggaagaagtattgcttctgggactaaaagataaagaggggtacacatctttctggaatgactgcatatcatcaggcctgcgagggggcatcctgatagagctggccatgcggggtcgaatctatctggaacccccgaccatgcgtaagaagcgactactagacagaaaggtactgctaaagtcagacagcccaacaggtgatgttttactggatgaaactctgaaacacatcaaagcaactgaacccacagaaactgtccaaacatggatagagctactcactggtgagacctggaaccccttcaaattacagtaccagctgagaaatgtacgagagcgcatcgcaaagaacctagtagagaaaggtattctaaccactgagaagcagaatttcctgctatttgacatgactactcatccagtgaccaatacaacagagaaacagcgactagtgaaaaaacttcaagatagtgtactagagcggtgggtaaatgaccctcagcgtatggacaagcgaacactagcactcctggtgctagcccactcctctgatgtgctagagaatgtcttctcctctctgacagatgacaagtatgatgtggcaatgaatcgagccaaggacttagtagaactggaccctgaagtggaagggacaaagcctagtgccacagaaatgatctgggctgtgctggcagccttcaataaatcttaaagccggcaggtggatttctccttttcccctgctggctggtgactgtcagagaccccatcactgagttttgtgtgatgagatgttttcatcatttttgtttccttttcttgaatcagacttgtgatttggggagagcaacttcagggcttctccatagaccttgaccattataagcagaccttatttctccctacacttccactccataggtaaataaactgggtgaagccacacacacccaatgaacattttctcccatttggtggtttagtttcacccagtgtgcttttggataagcagaaatatctaaatgggattttgagttctccagctatagaatgtgaatgagataaaaagtgaactatctattatatttttctgagtttgttttctatcataaatacatgttttcacagcctttgtctctcagactctgctaaataatgtagcttattgaaataactgtcgctgaataaggagcaatgagaaacaaaactaatttttggagcagatggtctctggaattgcatatcctgctagtgattttctcatctttccttttctaacctaatgagaatgtcccagattcaattacctggatgtcaaagtcctagagccagaaatatattctctcatccctcttagcattctcttgctccctcattcactagggcaaatgtctaaatgaagaaaagtctctctcaacacctcgttcatgcaatcagcattagaatttgtaaggaaggaaggggggtggcatgaaaatttccattcttggggtatatgactgtcctgtttcccccaggccactttttttttttttttctctttggagacagggtcttgctcttgcccaggcaggagtacagtagtgcaatcacagctgactgcagccttgacctccagggctcaaggatcctcctgcctcagtctcccaactaagtgggactacaggcacgtgccaccatactcagcttttttttgtttgttttagacaagagtctcgctttgttgcccaggctggtcttgaattcctgggctcaagcaattcttccacctcagcctcccaaagtgctgagattactggcttgagccactgcacccacccctccagactactttaaatgtctctgctctgactgaattgaaggaattgtaagtttcagttgctgaatatatcagtatatctgaactccggatctttttatttcctatttttggcttcctacataaattaataaagtctgtctatatttaaggtttctgggagtagttttgtctatatttaatccatagatgtgctcctagtcatcagtcttatttcagtaaaaccatctttctggccaaatctctaacacgttttttacttcagtagtgagggcaatgagaagctttattaagaaagatcctatttaaagggctaatttggtattgaaagcatgctgatataaagtccagtatttgaggatataaagaggatgtgcactgagctgtgctgatgttcagcatttattatactttaatgggatagtgcttcttgaccattatagaacaacaaactgtcaaagggttaatacagatgacccagacctgacattaaatcctcttgattagaaataattaaatgaattatttattcatttctctcctctgccaaatctacttagccccacaaaaatgccccagctcagttaacatttttttgtttttcactttaggtatctcttaggcaaatagagatataaattgtaataggaaacagtctctaaatgtgaggctgaatacagcttcagtctggctctctaataggacaaaagccagtccatgtgttgtctctaactgatttagctttttcttttctttgaacaattcggcatgaattgaaaccaggttttcctgtggaaagttatagcttgattgggagatagaagttgaattgagttctttcttgcaactcttagtgtttatttttatatctcagtaagacgaggataccttcagtttgaatctgcataatgttcactgccaaactccttctcatttaatgcttatggccttcacatttctgtataataaagatcaattatcagctc

SEQ ID NO: 27151 - DNA, 815 bp, Homo sapiens
aaaatacaaaaattagccagacatggtggcgcacacctgtaatcccaactactcaggaggctgaggcacaagaatcacttgaacctgggaagcggaggttgcagtgagccaacatcgcaccactgcactcccagcctgggcaacagagcaagactccctctcaagaaaagaagaagaaaaagaaaaaaagaagtcaacaggcttgaaagatgagcatttctactggactttagaattactcatttgatcttttgtcagtgccatctgtgaagtccaagctattgtactttggaaaagatactgtattacccacccatttttttctggtcattactccttcctttctttctatatttaaatctgtaaatatttcctatttgtatggatgtttagtatgcatgtatgaatatatgatttatttacataagcatacatatggattttttttttcaccactccctccagaaacaggtgagaatgaccactttaactcaccgggcccgtcgcactgaaataagcaagaactctgaaaagaagatggaaagtgaggaagacagtaattgggagaaaagtccagacaatgaagattctggagactctaaggatatccgccttactcttatggaagaagtattgcttctgggactaaaagataaagaggtaatgcagttaggtttgctaggctatctcaaagactattaaatattggaatgttttaggaagtaacctaatggaatatatttaataataaattggtcttagaattgtgctctaaccatctggaagatggaggagttgggacagtgaccgatact

SEQ ID NO: 27152 - DNA, 521 bp, Homo sapiens
agctggatgtgttattccttctctgcatcgaaggatcaggaagtttgtgctctctgcgtggctaagtttttcacctactaggacgggggtggggtggggagaacaggtgtccttctaaaatacagcacaagctacagcctgcgtccagccataacccaggagtaacatcagaaacaggtgagaatgaccactttaactcaccgggcccgtcgcactgaaataagcaagaactctgaaaagaagatggaaagtgaggaagacagtaattgggagaaaagtccagacaatgaagattctggagactctaaggatatccgccttactcttatggaagaagtattgcttctgggactaaaagataaagaggtaatgcagttaggtttgctaggctatctcaaagactattaaatattggaatgttttaggaagtaacctaatggaatatatttaataataaattggtcttagaattgtgctctaaccatctggaagatggaggagttgggacagtgaccgatact

SEQ ID NO: 27153 - DNA, 2126 bp, Homo sapiens
agctggatgtgttattccttctctgcatcgaaggatcaggaagtttgtgctctctgcgtggctaagtttttcacctactaggacgggggtggggtggggagaacaggtgtccttctaaaatacagcacaagctacagcctgcgtccagccataacccaggagtaacatcagaaacaggtgagaatgaccactttaactcaccgggcccgtcgcactgaaataagcaagaactctgaaaagaagatggaaagtgaggaagacagtaattgggagaaaagtccagacaatgaagattctggagactctaaggatatccgccttactcttatggaagaagtattgcttctgggactaaaagataaagaggggtacacatctttctggaatgactgcatatcatcaggcctgcgagggggcatcctgatagagctggccatgcggggtcgaatctatctggaacccccgaccatgcgtaagaagcgactactagacagaaaggtactgctaaagtcagacagcccaacaggtgatgttttactggatgaaactctgaaacacatcaaagcaactgaacccacagaaactgtccaaacatggatagagctactcactggtgagacctggaaccccttcaaattacagtaccagctgagaaatgtacgagagcgcatcgcaaagaacctagtagagaaaggtattctaaccactgagaagcagaatttcctgctatttgacatgactactcatccagtgaccaatacaacagagaaacagcgactagtgaaaaaacttcaagatagtgtactagagcggtgggtaaatgaccctcagcgtatggacaagcgaacactagcactcctggtgctagcccactcctctgatgtgctagagaatgtcttctcctctctgacagatgacaagtatgatgtggcaatgaatcgagccaaggacttagtagaactggaccctgaagtggaagggacaaagcctagtgccaccatactcagcttttttttgtttgttttagacaagagtctcgctttgttgcccaggctggtcttgaattcctgggctcaagcaattcttccacctcagcctcccaaagtgctgagattactggcttgagccactgcacccacccctccagactactttaaatgtctctgctctgactgaattgaaggaattgtaagtttcagttgctgaatatatcagtatatctgaactccggatctttttatttcctatttttggcttcctacataaattaataaagtctgtctatatttaaggtttctgggagtagttttgtctatatttaatccatagatgtgctcctagtcatcagtcttatttcagtaaaaccatctttctggccaaatctctaacacgttttttacttcagtagtgagggcaatgagaagctttattaagaaagatcctatttaaagggctaatttggtattgaaagcatgctgatataaagtccagtatttgaggatataaagaggatgtgcactgagctgtgctgatgttcagcatttattatactttaatgggatagtgcttcttgaccattatagaacaacaaactgtcaaagggttaatacagatgacccagacctgacattaaatcctcttgattagaaataattaaatgaattatttattcatttctctcctctgccaaatctacttagccccacaaaaatgccccagctcagttaacatttttttgtttttcactttaggtatctcttaggcaaatagagatataaattgtaataggaaacagtctctaaatgtgaggctgaatacagcttcagtctggctctctaataggacaaaagccagtccatgtgttgtctctaactgatttagctttttcttttctttgaacaattcggcatgaattgaaaccaggttttcctgtggaaagttatagcttgattgggagatagaagttgaattgagttctttcttgcaactcttagtgtttatttttatatctcagtaagacgaggataccttcagtttgaatctgcataatgttcactgccaaactccttctcatttaatgcttatggccttcacatttctgtataataaagatcaattatcagctc

SEQ ID NO: 27154 - DNA, 2804 bp, Homo sapiens
ttggatgcaaatatagtttaaaaaatgcattgtagtgggtacacatctttctggaatgactgcatatcatcaggcctgcgagggggcatcctgatagagctggccatgcggggtcgaatctatctggaacccccgaccatgcgtaagaagcgactactagacagaaaggtactgctaaagtcagacagcccaacaggtgatgttttactggatgaaactctgaaacacatcaaagcaactgaacccacagaaactgtccaaacatggatagagctactcactggtgagacctggaaccccttcaaattacagtaccagctgagaaatgtacgagagcgcatcgcaaagaacctagtagagaaaggtattctaaccactgagaagcagaatttcctgctatttgacatgactactcatccagtgaccaatacaacagagaaacagcgactagtgaaaaaacttcaagatagtgtactagagcggtgggtaaatgaccctcagcgtatggacaagcgaacactagcactcctggtgctagcccactcctctgatgtgctagagaatgtcttctcctctctgacagatgacaagtatgatgtggcaatgaatcgagccaaggacttagtagaactggaccctgaagtggaagggacaaagcctagtgccacagaaatgatctgggctgtgctggcagccttcaataaatcttaaagccggcaggtggatttctccttttcccctgctggctggtgactgtcagagaccccatcactgagttttgtgtgatgagatgttttcatcatttttgtttccttttcttgaatcagacttgtgatttggggagagcaacttcagggcttctccatagaccttgaccattataagcagaccttatttctccctacacttccactccataggtaaataaactgggtgaagccacacacacccaatgaacattttctcccatttggtggtttagtttcacccagtgtgcttttggataagcagaaatatctaaatgggattttgagttctccagctatagaatgtgaatgagataaaaagtgaactatctattatatttttctgagtttgttttctatcataaatacatgttttcacagcctttgtctctcagactctgctaaataatgtagcttattgaaataactgtcgctgaataaggagcaatgagaaacaaaactaatttttggagcagatggtctctggaattgcatatcctgctagtgattttctcatctttccttttctaacctaatgagaatgtcccagattcaattacctggatgtcaaagtcctagagccagaaatatattctctcatccctcttagcattctcttgctccctcattcactagggcaaatgtctaaatgaagaaaagtctctctcaacacctcgttcatgcaatcagcattagaatttgtaaggaaggaaggggggtggcatgaaaatttccattcttggggtatatgactgtcctgtttcccccaggccactttttttttttttttctctttggagacagggtcttgctcttgcccaggcaggagtacagtagtgcaatcacagctgactgcagccttgacctccagggctcaaggatcctcctgcctcagtctcccaactaagtgggactacaggcacgtgccaccatactcagcttttttttgtttgttttagacaagagtctcgctttgttgcccaggctggtcttgaattcctgggctcaagcaattcttccacctcagcctcccaaagtgctgagattactggcttgagccactgcacccacccctccagactactttaaatgtctctgctctgactgaattgaaggaattgtaagtttcagttgctgaatatatcagtatatctgaactccggatctttttatttcctatttttggcttcctacataaattaataaagtctgtctatatttaaggtttctgggagtagttttgtctatatttaatccatagatgtgctcctagtcatcagtcttatttcagtaaaaccatctttctggccaaatctctaacacgttttttacttcagtagtgagggcaatgagaagctttattaagaaagatcctatttaaagggctaatttggtattgaaagcatgctgatataaagtccagtatttgaggatataaagaggatgtgcactgagctgtgctgatgttcagcatttattatactttaatgggatagtgcttcttgaccattatagaacaacaaactgtcaaagggttaatacagatgacccagacctgacattaaatcctcttgattagaaataattaaatgaattatttattcatttctctcctctgccaaatctacttagccccacaaaaatgccccagctcagttaacatttttttgtttttcactttaggtatctcttaggcaaatagagatataaattgtaataggaaacagtctctaaatgtgaggctgaatacagcttcagtctggctctctaataggacaaaagccagtccatgtgttgtctctaactgatttagctttttcttttctttgaacaattcggcatgaattgaaaccaggttttcctgtggaaagttatagcttgattgggagatagaagttgaattgagttctttcttgcaactcttagtgtttatttttatatctcagtaagacgaggataccttcagtttgaatctgcataatgttcactgccaaactccttctcatttaatgcttatggccttcacatttctgtataataaagatcaattatcagctc

SEQ ID NO: 27155 - DNA, 2298 bp, Homo sapiens
agctggatgtgttattccttctctgcatcgaaggatcaggaagtttgtgctctctgcgtggctaagtttttcacctactaggacgggggtggggtggggagaacaggtgtccttctaaaatacagcacaagctacagcctgcgtccagccataacccaggagtaacatcagaaacaggtgagaatgaccactttaactcaccgggcccgtcgcactgaaataagcaagaactctgaaaagaagatggaaagtgaggaagacagtaattgggagaaaagtccagacaatgaagattctggagactctaaggatatccgccttactcttatggaagaagtattgcttctgggactaaaagataaagaggggtacacatctttctggaatgactgcatatcatcaggcctgcgagggggcatcctgatagagctggccatgcggggtcgaatctatctggaacccccgaccatgcgtaagaagcgactactagacagaaaggtactgctaaagtcagacagcccaacaggtgatgttttactggatgaaactctgaaacacatcaaagcaactgaacccacagaaactgtccaaacatggatagagctactcactggtgagacctggaaccccttcaaattacagtaccagctgagaaatgtacgagagcgcatcgcaaagaacctagtagagaaaggtattctaaccactgagaagcagaatttcctgctatttgacatgactactcatccagtgaccaatacaacagagaaacagcgactagtgaaaaaacttcaagatagtgtactagagcggtgggtaaatgaccctcagcgtatggacaagcgaacactagcactcctggtgctagcccactcctctgatgtgctagagaatgtcttctcctctctgacagatgacaagtatgatgtggcaatgaatcgagccaaggacttagtagaactggaccctgaagtggaagggacaaagcctagtgccacagaaatgatctgggctgtgctggcagccttcaataaatcttaaagccggcaggtggatttctccttttcccctgctggctggtgactgtcagagaccccatcactgagttttgtgtgatgagatgttttcatcatttttgtttccttttcttgaatcagacttgtgatttggggagagcaacttcagggcttctccatagaccttgaccattataagcagaccttatttctccctacacttccactccataggtaaataaactgggtgaagccacacacacccaatgaacattttctcccatttggtggtttagtttcacccagtgtgcttttggataagcagaaatatctaaatgggattttgagttctccagctatagaatgtgaatgagataaaaagtgaactatctattatatttttctgagtttgttttctatcataaatacatgttttcacagcctttgtctctcagactctgctaaataatgtagcttattgaaataactgtcgctgaataaggagcaatgagaaacaaaactaatttttggagcagatggtctctggaattgcatatcctgctagtgattttctcatctttccttttctaacctaatgagaatgtcccagattcaattacctggatgtcaaagtcctagagccagaaatatattctctcatccctcttagcattctcttgctccctcattcactagggcaaatgtctaaatgaagaaaagtctctctcaacacctcgttcatgcaatcagcattagaatttgtaaggaaggaaggggggtggcatgaaaatttccattcttggggtatatgactgtcctgtttcccccaggccactttttttttttttttctctttggagacagggtcttgctcttgcccaggcaggagtacagtagtgcaatcacagctgactgcagccttgacctccagggctcaaggatcctcctgcctcagtctcccaactaagtgggactacaggcacgtgccaccatactcagcttttttttgtttgttttagacaagagtctcgctttgttgcccaggctggtcttgaattcctgggctcaagcaattcttccacctcagcctcccaaagtgctgagattactggcttgagccactgcacccacccctccagactactttaaatgtctctgctctgactgaattgaaggaattgtaagtttcagttgctgaatatatcagtatatctgaactccggatctttttatttcctatttttggcttcctacataaattaataaagtctgtctatattta

SEQ ID NO: 27156 - DNA, 252 bp, Homo sapiens
tcaacttggaattccagtaccagatgagtagtgtaaagttggccccttgcatgtggtgcatgcttggtgttttgatttctcgccagaatcatttcttttttccacccataatccaatagagaaggcaagtttccttgctcctcctccatgctgctaagtggagtttttctaccttgcctttcatgaaagggtccactgaggatgctggccttcggcagtgatcacgtgccttgtggttataggagccagcag

SEQ ID NO: 27157 - DNA, 384 bp, Homo sapiens
ggtactgggaagttgtaacttcaatgcagaagctttagaggcacacaatttatcccacaacatgtcacttgcaagacttgctgtgctgttgcatatttagaaaaggaaaggtggtcagtaggcaagctgagaacacatgttaaactgcatcattcatggatcttgattgaaatcccttatttatgaaacaagcttgtatgtacactttgagtctgttaaatattatggtgaaattccatttatgcagtgggtcacacccaagacttcctgaaaggttagaggtgacccttgctcctaagttggggcctaaatcttggcagtcataaaaaagtatttcttaactaggctatacaatcaacattctcaattttattgaaaaaaaaa

SEQ ID NO: 27158 - DNA, 425 bp, Homo sapiens
gaaggaacatctatttcatctatttggaagtctcaagatagtcactcaatcatctactgtagacatctcttggcccaaagcaaactctgaattcagtctcaaataagactgggatatttcaccctacatttaaaaagtaatctcaagtagatcagcaggccccacccagcccggatacctggtatgaacagcttagaggacagcaaatggtccagtaaatttactgagagtacagagtactcacactgtatgcaaccttgaattaggggattttgaaatcaatggcacataaaaatcaatcaactctcactttatgagtggattacaaaatagtgtaaatccctgtaaataaaaaaaattaatcaaaacttgcttaattgtaaagctggcaaactaagtgactaataaatagtgtttacacaatt

SEQ ID NO: 27159 - DNA, 282 bp, Homo sapiens
gactcaactaggaggtcttattacagtactgtgctgctttttcaaccatggagaggtttgttttctagaaagcaatttttaagaaatagaaggggttatagaggaacaaagaaatatactcatcgaaacaatatataattgtatactacttatgacttcacaatattttaaagacccttgtgttataagttgatattttaatcatgctgatcaaaatgtttaaatagctagaatttcaaacatgaaatctcttgccttatttttagtaaatatatacatata

SEQ ID NO: 27160 - DNA, 1137 bp, Homo sapiens
ctgaacaaattttgctttccttccccacaccctccttatttttataaagttaccaggcagtgacattgccagtgggagtgatgtactttctgatgtcatacccagtattccaagttcaccttgcctgcttcctaaaaagaaaaacaagcaccggaatttagatgaactcccttggagtgcaatgacaaatgatgagcaggtggaatatattgagtatctgagtcggaaagtgagtactgagatgggtcttcgggagcaacttgatattattaagatcattgatccttctgctcaaatctcccctacagacagtgagtttattattgaacttaactgtctcacagatgaaaaactgaagcaggtcagaaactatatcaaggaacatagccctcgccaacggcctgcaagagaggcctggaagagaagcaactttagttgtgcaagcaccagtggagtgagcggtgccagtgccagcgccagcagcagcagtgccagcatggtcagttctgcaagcagcagtgggtccagtgttggaaactctgcttcaaactccagtgccaacatgagtcgagcacacagtgacagcaacctgtctgcaagtgcagcagagcggattcgggattcaaaagtaaaacgtctaatcaatacaaaactttacctttcaatattaacattagtactccttcatataaatttcttgaagagttaaaatgatcctgctgtctagttgcctgtgggttttggtcttaattgaacaagcaggatgctctgctgttgaacaaagcactctaggctgagtgctttgaaatgctgttttgacccacaaccatattgcattcaatcttacctgatttttgtgtatgttttaagtaagataaattggtggaaataatgagttattctcaagattgcaatattgactgcaactcactactgagcgaatctcactacgttgctgatgttgctgtctattagctcctaagaatgttgtgtatgtcttttgtgtgtgttaaatgttttcttaatgttttaatcttaaatgtttcttcttagctaatttaaaaatctaatactttctataatttctgtctactcttttcacagttgagaaagttctgtataatattgtcgggcact

SEQ ID NO: 27161 - DNA, 2779 bp, Homo sapiens
ctgaacaaattttgctttccttccccacaccctccttatttttataaagttaccaggcagtgacattgccagtgggagtgatgtactttctgatgtcatacccagtattccaagttcaccttgcctgcttcctaaaaagaaaaacaagcaccggaatttagatgaactcccttggagtgcaatgacaaatgatgagcaggtggaatatattgagtatctgagtcggaaagtgagtactgagatgggtcttcgggagcaacttgatattattaagatcattgatccttctgctcaaatctcccctacagacagtgagtttattattgaacttaactgtctcacagatgaaaaactgaagcaggtcagaaactatatcaaggaacatagccctcgccaacggcctgcaagagaggcctggaagagaagcaactttagttgtgcaagcaccagtggagtgagcggtgccagtgccagcgccagcagcagcagtgccagcatggtcagttctgcaagcagcagtgggtccagtgttggaaactctgcttcaaactccagtgccaacatgagtcgagcacacagtgacagcaacctgtctgcaagtgcagcagagcggattcgggattcaaaaaagcgatccaagcagcggaagttacagcagaaggccttccgcaagaggcagctgaaggagcagaggcaggcccggaaggagaggctcagtgggctcttccttaacgaagaggtgctgtccttgaaagtgactgaggaagaccatgaagcagatgttgatgttttgatgtaataagggtgaatttatcaacgttctttgtgagcattaaaatactccatccttatgggtttacatgcatcttgaccaaaattttggttagggctgtgctgatgtaccattaataatttaagccagtggttcttggcaggtgatcccaagacctgcagcttcagcatcacttgagaagttgttaggaatgcatactagtgggccccgcccccagacatagtgaatcagaaaccaacagggaggcgcctagcattgtttttttaacaagtgctgggttattctgatgcacagtctagtttaagaaccactactttgggtaaacgttttgactgtttaaagtttatggcggtgaagtgggcgtcttcaaagactagtacttacacagtttagaagatttcaaggtactgctgacagtagtttattatgtcagtatacatacatgtgtagagatcataatttagttcccttcttaatgttacaatttcttagtttacttttcctaaagggccatagcataattcttgattcctggtggaaatcttttctgaggtgtgggggtgggcaaggtgtggattgctgtttacgatagtgccttcattagttttagttctgtctgttttcattcattattgactcaaaggtattagaacaggcccttatctttttcctattagatttatttttgttttttactttatgtaagttcagaatccttttttaagtgatgactactgatgaaataatgttactagtagctgaattttagacttgatgctatgttgattaatatttaaatggtgaaagtaattaggcaaaataagcaattctgcttttctgttgctttcagaatttttaggctgtaaaattgtctcaggcaggaagtcagtctatatctctctcaagttcttattgtaggtcatttttttttcagcacagctctaatttttaaatatttggtataacagcttctggcatgtgacctagttaatgttgaaaattaactgatgaaaacccttgtagatctgctaaacttctctataaattgctagaaatatacagagcaatgagatatagaaaacaccttagcttgttggttattaatagagctctaattttaactgtgaaatcatggagtttctttaaatgttttcctagagtgtttgttatcatgaacattagaaatagcattattccttttcttctaccacatgtcttgaacattcacatgggttaaagaagatggaaactgatactactgacaatcaagctgctttctgactttcataattttctttatattgtggatagcattttgaaggtgaccgtgattctgtaggaagagctgtaatcaatatttttcaaactctaagagtacagaggttagtaagatttcttttttttttactttttgttacgtcaagtagcttattaagaaaaagattcatgacttaaattcttaattctcagttgatacaaaggcttataatcatgtgttttaaaattttgatttcattttcgttccttgaaggttaaagaatggaaactggggataaaaattaatacactgcagctttgccaaggtctgtgatatggttgtaaccttttaaagactactaaagtcataatttgaaatttttactaaaataaaacatatgtgtctatggttttcaattggagtagtctttcttactttcccccttcccctctttggttctcctaaccagcttagaggacccaaagagagcttagggatagacaccagaatactctgtggaggtggaacaacttaacctcactgttttcccttccaagtataggaagagcaaatagagcatagtaactgtatctaaattctctacctgctcttagcaaaagcaaaatcccacagaatgattgcctgctgtctttacctattcttcaaggaaaacaggccacttttggagaccatagagcaccatttatctgtcaaatacttggaaacta

SEQ ID NO: 27162 - DNA, 1650 bp, Homo sapiens
gggccgcgacgcccagcctgccagtgagctgcgacgggcacaccccggagcgtcggcgactgcggacaggttagagtgggggcaggggcgggcgcgggagcagcccagggccagagagggagcccgagccaggccatctccaaccatgtccgacgaggcctcggccatcacttcctacgagaagtttctaacccccgaggagcccttcccactcctgggacctcctcgcggggtgggcacctgcccgagcgaggagccgggctgcctggacatcagcgacttcggctgccagctgtcctcctgccatcgcaccgacccgctccaccgcttccacaccaacaggtggaacctaacttcttgtggaacaagtgttgccagctcagaaggcagtgaggagctgttttcatctgtgtctgttggagatcaagatgattgctattccctgttagatgatcaggacttcacttcttttgatttatttcctgaggggagtgtctgcagtgatgtctcttcttctattagcacttactgggattggtcagatagcgagtttgaatggcagttaccaggcagtgacattgccagtgggagtgatgtactttctgatgtcatacccagtattccaagttcaccttgcctgcttcctaaaaagaaaaacaagcaccggaatttagatgaactcccttggagtgcaatgacaaatgatgagcaggtggaatatattgagtatctgagtcggaaagtgagtactgagatgggtcttcgggagcaacttgatattattaagatcattgatccttctgctcaaatctcccctacagacagtgagtttattattgaacttaactgtctcacagatgaaaaactgaagcaggtcagaaactatatcaaggaacatagccctcgccaacggcctgcaagagaggcctggaagagaagcaactttagttgtgcaagcaccagtggagtgagcggtgccagtgccagcgccagcagcagcagtgccagcatggtcagttctgcaagcagcagtgggtccagtgttggaaactctgcttcaaactccagtgccaacatgagtcgagcacacagtgacagcaacctgtctgcaagtgcagcagagcggattcgggattcaaaagtaaaacgtctaatcaatacaaaactttacctttcaatattaacattagtactccttcatataaatttcttgaagagttaaaatgatcctgctgtctagttgcctgtgggttttggtcttaattgaacaagcaggatgctctgctgttgaacaaagcactctaggctgagtgctttgaaatgctgttttgacccacaaccatattgcattcaatcttacctgatttttgtgtatgttttaagtaagataaattggtggaaataatgagttattctcaagattgcaatattgactgcaactcactactgagcgaatctcactacgttgctgatgttgctgtctattagctcctaagaatgttgtgtatgtcttttgtgtgtgttaaatgttttcttaatgttttaatcttaaatgtttcttcttagctaatttaaaaatctaatactttctataatttctgtctactcttttcacagttgagaaagttctgtataatattgtcgggcact

SEQ ID NO: 27163 - DNA, 3292 bp, Homo sapiens
gggccgcgacgcccagcctgccagtgagctgcgacgggcacaccccggagcgtcggcgactgcggacaggttagagtgggggcaggggcgggcgcgggagcagcccagggccagagagggagcccgagccaggccatctccaaccatgtccgacgaggcctcggccatcacttcctacgagaagtttctaacccccgaggagcccttcccactcctgggacctcctcgcggggtgggcacctgcccgagcgaggagccgggctgcctggacatcagcgacttcggctgccagctgtcctcctgccatcgcaccgacccgctccaccgcttccacaccaacaggtggaacctaacttcttgtggaacaagtgttgccagctcagaaggcagtgaggagctgttttcatctgtgtctgttggagatcaagatgattgctattccctgttagatgatcaggacttcacttcttttgatttatttcctgaggggagtgtctgcagtgatgtctcttcttctattagcacttactgggattggtcagatagcgagtttgaatggcagttaccaggcagtgacattgccagtgggagtgatgtactttctgatgtcatacccagtattccaagttcaccttgcctgcttcctaaaaagaaaaacaagcaccggaatttagatgaactcccttggagtgcaatgacaaatgatgagcaggtggaatatattgagtatctgagtcggaaagtgagtactgagatgggtcttcgggagcaacttgatattattaagatcattgatccttctgctcaaatctcccctacagacagtgagtttattattgaacttaactgtctcacagatgaaaaactgaagcaggtcagaaactatatcaaggaacatagccctcgccaacggcctgcaagagaggcctggaagagaagcaactttagttgtgcaagcaccagtggagtgagcggtgccagtgccagcgccagcagcagcagtgccagcatggtcagttctgcaagcagcagtgggtccagtgttggaaactctgcttcaaactccagtgccaacatgagtcgagcacacagtgacagcaacctgtctgcaagtgcagcagagcggattcgggattcaaaaaagcgatccaagcagcggaagttacagcagaaggccttccgcaagaggcagctgaaggagcagaggcaggcccggaaggagaggctcagtgggctcttccttaacgaagaggtgctgtccttgaaagtgactgaggaagaccatgaagcagatgttgatgttttgatgtaataagggtgaatttatcaacgttctttgtgagcattaaaatactccatccttatgggtttacatgcatcttgaccaaaattttggttagggctgtgctgatgtaccattaataatttaagccagtggttcttggcaggtgatcccaagacctgcagcttcagcatcacttgagaagttgttaggaatgcatactagtgggccccgcccccagacatagtgaatcagaaaccaacagggaggcgcctagcattgtttttttaacaagtgctgggttattctgatgcacagtctagtttaagaaccactactttgggtaaacgttttgactgtttaaagtttatggcggtgaagtgggcgtcttcaaagactagtacttacacagtttagaagatttcaaggtactgctgacagtagtttattatgtcagtatacatacatgtgtagagatcataatttagttcccttcttaatgttacaatttcttagtttacttttcctaaagggccatagcataattcttgattcctggtggaaatcttttctgaggtgtgggggtgggcaaggtgtggattgctgtttacgatagtgccttcattagttttagttctgtctgttttcattcattattgactcaaaggtattagaacaggcccttatctttttcctattagatttatttttgttttttactttatgtaagttcagaatccttttttaagtgatgactactgatgaaataatgttactagtagctgaattttagacttgatgctatgttgattaatatttaaatggtgaaagtaattaggcaaaataagcaattctgcttttctgttgctttcagaatttttaggctgtaaaattgtctcaggcaggaagtcagtctatatctctctcaagttcttattgtaggtcatttttttttcagcacagctctaatttttaaatatttggtataacagcttctggcatgtgacctagttaatgttgaaaattaactgatgaaaacccttgtagatctgctaaacttctctataaattgctagaaatatacagagcaatgagatatagaaaacaccttagcttgttggttattaatagagctctaattttaactgtgaaatcatggagtttctttaaatgttttcctagagtgtttgttatcatgaacattagaaatagcattattccttttcttctaccacatgtcttgaacattcacatgggttaaagaagatggaaactgatactactgacaatcaagctgctttctgactttcataattttctttatattgtggatagcattttgaaggtgaccgtgattctgtaggaagagctgtaatcaatatttttcaaactctaagagtacagaggttagtaagatttcttttttttttactttttgttacgtcaagtagcttattaagaaaaagattcatgacttaaattcttaattctcagttgatacaaaggcttataatcatgtgttttaaaattttgatttcattttcgttccttgaaggttaaagaatggaaactggggataaaaattaatacactgcagctttgccaaggtctgtgatatggttgtaaccttttaaagactactaaagtcataatttgaaatttttactaaaataaaacatatgtgtctatggttttcaattggagtagtctttcttactttcccccttcccctctttggttctcctaaccagcttagaggacccaaagagagcttagggatagacaccagaatactctgtggaggtggaacaacttaacctcactgttttcccttccaagtataggaagagcaaatagagcatagtaactgtatctaaattctctacctgctcttagcaaaagcaaaatcccacagaatgattgcctgctgtctttacctattcttcaaggaaaacaggccacttttggagaccatagagcaccatttatctgtcaaatacttggaaacta

SEQ ID NO: 27164 - DNA, 1854 bp, Homo sapiens
aaaaatgaaaaaaccatattgttgactaagggagtcaaattttatattctctcaatacttaaacttagcagggtactgagagaagtgctataagtccaatctacttaggtagtgtgatgatgatgatagaaagcagtcattatatataattggttgtattttatgtgtgtgtttgtatgcgtataatagtatgctgagaatccatataatggattaaacctaattaatgttaacattaatttattcattagcaagagtatgcctttagtataaggaagatccagggagagtggaggaatgggatggacatttcaaaatagaccaaagtgctgggattacaggcataagccgccgtgccaggccctttttatagacttttgaactaagaggtttcaaaccaaatcgcaactcttacttgatttacagaaatgggcctcctaacaaaattttcaaaattgtggtgggatttctttttataagggaagtttaatatggcattattttcagccagtgatttggaaggtctgttttcctataattactaaaataacctaaatcattttcagtattcaaaaactctatgaatttaagagcctgttgtgacaggactcttgattttatgacaagaaaaaaccatgttggaattcaggcattttgttaggtaccttaatcatcagtaattagtatatgattatttcatttcctacaaggactctatagttgtatgtattaagtgtgtatatatgttcatatgaacatgcaagatataggcaatagaaattaagtaatccaaaagaggattccgttattcactaaagtatcttccttttaaatttggatttataaaatcatagtgcagtaactttaaatgtagatagttcaaacattcttagcacctcaatctagtatgtttaattaaaatttgtataaatgtaaattagtgtaagagggtaaaataataatcaagttatttttcaaaagattgcaataagtttttggtctaaacttaaactttgttcattttgtacatactctgtgttaattctaattgcacctttgtgatgtgtatttatatacagtgtgcagaaaatgttcgtgaaattttgattacaattgtagattatgtatgatggcattgcttacgaatgttttgcttgtaaaaaaatttcaaggtgcaatcaaatgctactagtttttctgattttcaaaaatctatctatctaaaatattaagccttttccttcctgtgtagtacttactaaataactttttgtattcaggcatttgcatcaaattgctgaacaagatgaatagccacattaattcaatgattttaaaagactatttggggagggttgggtatataattttttagctctatttacatcccaaagtagaaagattaaatttatatttactagagctattcaaagaatacacttttctatattgtaaaaacaggacagcaaagtaaatcatacagaaaataaacatttatactattctgtaaaaaaggttttgcattttttctttagtataataacaccactttattaaccatttaatatgcaaaaaaccttttaaattatctgaagtaaatttgacattacttctgaaaacacacaactaaaaaattctatcattttgctcagttattactaacataaattgctttgaaatgagaatatgtcttctctttttttccccactgtttcttttaagagcagaaactcagccgggcatggtggctcacgcctgtaattccagcactttgggaggtcaaggcgggtgaatcacttgagtccaggagttctagaccagcccaggctacatggtgaaaccctgtctctacta

SEQ ID NO: 27165 - DNA, 851 bp, Homo sapiens
tgagcctgcagaggttgaggctgtagtgagtcaaaattacaccactgcactccagcctggcaatcagagtgagaccttgtctcaaaaacaaaaatacctagaaaatcaatctactctgtcttttaatgtgaaatgttcttatgatagctatctttcttagtttcctttttttctgaagcactaaacacaacctgtaggtcttatctctggggtctgggaaacagaaccttaatgttacaggtacaaaagcaaacagagtgattagttccccattttctggtagtgaacaactgacattttttcaatcttatgtaaaatgtgaataaaaataattttagaaaagttatctatttttattgttctgtaacacaaatagttaagaaaatgaatacttgttatgtaaatgaagcttcacagcaggacctccggccataactttgatcatgttgtatctcttaagcattttatataggaattctggtgtggctacccaaagcagaagggaaggcaatcaactaaaaatccctttctattggagttattttcatcatgtaaattacttcaggcttttcttgttagggcttcttgaatgcacattttgtcattatctgtataccaaaggtgagcttttttttttaatccatgtgattttatgagttgaaagctataaggttttttttaattaaaaatttccttctaaatggcaaattttgtgacagcatttaagacactcagtttctattcaaaagcaataagaaaacaagtatgtttagggttatgtttattataaggtcactgggactttataaaactgtcatctatcatactggcatatgaaatctggtcatagt

SEQ ID NO: 27166 - DNA, 1395 bp, Homo sapiens
acccattctttgggacttgatctagaatatctgcagacagaatgttacataaacaaattcttatgaaacacattcaaatgacattttgtatttagaaaaggactatcttttaaagaaaaagcagccttttagggccgattctggaataatatcctgttgtcactttgggaatgtcagaaggggaaacaatccccaggcacactaaaaattttttaaagttatttaaaaaaacatataaaatattaaaggacagtaaatctcagaggatgggcaatgtgtttctataataaggaaaggctaacagatgctctgggctgtctccattttctttcaaagaggtggtatgtatttgaagtaataaattgtcaaagtgattactgggtactattaaaatgataggtggatataaatggaagtaaacattatgtagtgataatatagaacctcacatagtaatcaagtataaaatttggcatgggtggagaaacaaagaatagggaagctgcaaaagatgaatttagagaagttttcatctatacaatcaattatttttacagacttttttttttttttttttgagacggagtctcgctgtccagcctggcaatcagagtgagaccttgtctcaaaaacaaaaatacctagaaaatcaatctactctgtcttttaatgtgaaatgttcttatgatagctatctttcttagtttcctttttttctgaagcactaaacacaacctgtaggtcttatctctggggtctgggaaacagaaccttaatgttacaggtacaaaagcaaacagagtgattagttccccattttctggtagtgaacaactgacattttttcaatcttatgtaaaatgtgaataaaaataattttagaaaagttatctatttttattgttctgtaacacaaatagttaagaaaatgaatacttgttatgtaaatgaagcttcacagcaggacctccggccataactttgatcatgttgtatctcttaagcattttatataggaattctggtgtggctacccaaagcagaagggaaggcaatcaactaaaaatccctttctattggagttattttcatcatgtaaattacttcaggcttttcttgttagggcttcttgaatgcacattttgtcattatctgtataccaaaggtgagcttttttttttaatccatgtgattttatgagttgaaagctataaggttttttttaattaaaaatttccttctaaatggcaaattttgtgacagcatttaagacactcagtttctattcaaaagcaataagaaaacaagtatgtttagggttatgtttattataaggtcactgggactttataaaactgtcatctatcatactggcatatgaaatctggtcatagt

SEQ ID NO: 27167 - DNA, 921 bp, Homo sapiens
acccattctttgggacttgatctagaatatctgcagacagaatgttacataaacaaattcttatgaaacacattcaaatgacattttgtatttagaaaaggactatcttttaaagaaaaagcagccttttagggccgattctggaataatatcctgttgtcactttgggaatgtcagaaggggaaacaatccccaggcacactaaaaattttttaaagttatttaaaaaaacatataaaatattaaaggacagtaaatctcagaggatgggcaatgtgtttctataataaggaaaggctaacagatgctctgggctgtctccattttctttcaaagaggtggtatgtatttgaagtaataaattgtcaaagtgattactgggtactattaaaatgataggtggatataaatggaagtaaacattatgtagtgataatatagaacctcacatagtaatcaagtataaaatttggcatgggtggagaaacaaagaatagggaagctgcaaaagatgaatttagagaagttttcatctatacaatcaattatttttacagacttttttttttttttttttgagacggagtctcgctgcactccagcctgggtgacaagagcaaaacttcgtctcaaaaaaaaaaagaagtttaaatatcagacaggaagacacatacgaacaatggcctttctagaaaagagaaaacttaatgttagtattaggcctaatgagactattgagtagcttgttgagtacatgaaacatacactcacatcaaatatttagaagctaataaacaccaattggaaaaaaatggttacaaaattttattgtataacaatgaaaataaaaattctaagcataggatgtatgaagaaaactacaaaatttctttgagagaaatataacttcattaaatgagg

SEQ ID NO: 27168 - DNA, 2351 bp, Homo sapiens
acccattctttgggacttgatctagaatatctgcagacagaatgttacataaacaaattcttatgaaacacattcaaatgacattttgtatttagaaaaggactatcttttaaagaaaaagcagccttttagggccgattctggaataatatcctgttgtcactttgggaatgtcagaaggggaaacaatccccaggcacactaaaaattttttaaagttatttaaaaaaacatataaaatattaaaggacagtaaatctcagaggatgggcaatgtgtttctataataaggaaaggctaacagatgctctgggctgtctccattttctttcaaagaggtggtatgtatttgaagtaataaattgtcaaagtgattactgggtactattaaaatgataggtggatataaatggaagtaaacattatgtagtgataatatagaacctcacatagtaatcaagtataaaatttggcatgggtggagaaacaaagaatagggaagctgcaaaagatgaatttagagaagttttcatctatacaatcaattatttttacagacttttttttttttttttttgagacggagtctcgctgtgtagcccaggctggagtgcaatggtgagatctcagctcactgcaacgcctctgcctcccaggttcaagcgattctcctgcctcagcctcccgtgtagctgggactacaggtgcatgccaccatgcccggctcattttttgtatttttagtagagacggggtttcaccgtgttagccaggatggtctcgatctcctgacctcgtgattcgcccgcctcggcctcccaaagtgctgggattacaggcataagccgccgtgccaggccctttttatagacttttgaactaagaggtttcaaaccaaatcgcaactcttacttgatttacagaaatgggcctcctaacaaaattttcaaaattgtggtgggatttctttttataagggaagtttaatatggcattattttcagccagtgatttggaaggtctgttttcctataattactaaaataacctaaatcattttcagtattcaaaaactctatgaatttaagagcctgttgtgacaggactcttgattttatgacaagaaaaaaccatgttggaattcaggcattttgttaggtaccttaatcatcagtaattagtatatgattatttcatttcctacaaggactctatagttgtatgtattaagtgtgtatatatgttcatatgaacatgcaagatataggcaatagaaattaagtaatccaaaagaggattccgttattcactaaagtatcttccttttaaatttggatttataaaatcatagtgcagtaactttaaatgtagatagttcaaacattcttagcacctcaatctagtatgtttaattaaaatttgtataaatgtaaattagtgtaagagggtaaaataataatcaagttatttttcaaaagattgcaataagtttttggtctaaacttaaactttgttcattttgtacatactctgtgttaattctaattgcacctttgtgatgtgtatttatatacagtgtgcagaaaatgttcgtgaaattttgattacaattgtagattatgtatgatggcattgcttacgaatgttttgcttgtaaaaaaatttcaaggtgcaatcaaatgctactagtttttctgattttcaaaaatctatctatctaaaatattaagccttttccttcctgtgtagtacttactaaataactttttgtattcaggcatttgcatcaaattgctgaacaagatgaatagccacattaattcaatgattttaaaagactatttggggagggttgggtatataattttttagctctatttacatcccaaagtagaaagattaaatttatatttactagagctattcaaagaatacacttttctatattgtaaaaacaggacagcaaagtaaatcatacagaaaataaacatttatactattctgtaaaaaaggttttgcattttttctttagtataataacaccactttattaaccatttaatatgcaaaaaaccttttaaattatctgaagtaaatttgacattacttctgaaaacacacaactaaaaaattctatcattttgctcagttattactaacataaattgctttgaaatgagaatatgtcttctctttttttccccactgtttcttttaagagcagaaactcagccgggcatggtggctcacgcctgtaattccagcactttgggaggtcaaggcgggtgaatcacttgagtccaggagttctagaccagcccaggctacatggtgaaaccctgtctctacta

SEQ ID NO: 27169 - DNA, 313 bp, Homo sapiens
tcaagtagcgacactgcttaaacaatctcacattaaacacaaacacatctgttcatgtaaggaaaacacagtattcaatttagcatctatctccttacatatgttaaatatctaatacagcatggtataatggaaagagaaataagcgctgattccagagacctacatcctgatcccagcactgtcgtaaaggtcttaaccttgagaaagaacacaatttctttgagcctcacttgcaccatgcatatataaaacaaggatatttacgtgcttcatccaagccacaaaattcttgtgaggtatataagattat

SEQ ID NO: 27170 - DNA, 310 bp, Homo sapiens
ctactactactaaattagcggccgctctgattctgttccagaaagcccttcccatctccaaaggagcgggccatgccccaagacactaatttcagtaattgcccactgacttcctcttttaatagagtcctcggtggcaggctcagtgcctgagtgaccaggaaggagaggggcctgcaggtcagatgtgtccctttccaaggcccacagagaggtctgttccaggcttggggaattctgagtgggcagaggaaatcctaaggcacataaggaatgtgtattagtctgttgtcacactgctataaagaac

SEQ ID NO: 27171 - DNA, 417 bp, Homo sapiens
gtcagaactaataagtatatctccctcgcagggtgactgtttcagaggtaacatatgcaacctcacacccacctggcacagagtaggccctgagcacatctcagcaaggtggctttgctgctcagaagccaatgccagtcttccctgcagctgcccttgtgatgtggatgcacaaagcagggtcaggccctgtcctctgagcttgcactgtctcttcctctctctctgtctgggctggagtgtaccacccctccatgacccccatcccatcaacagctcaggtcaaaacactgcttgccagtcaagaatttcactctcatatcaggctttcaaggagccctcacgccactgctttcttcctaggaagttttctaggaaactctttcagctggacaatctgaatggggtcatctttct

SEQ ID NO: 27172 - DNA, 333 bp, Homo sapiens
gggatcctgactcacatggtctttccagcaggtccagggctccatttagaatcactcccgggaaatcatggcagggaggtggcagtgacttctgttaggtcttgtggcagtgtcctttgttgattctcttggttaaaaccaagagttttggaccctgaactctgctgtgagagatctttattgaaaccgaatcatgaccccacaccctctccccaactgaaaagctttcagtggctccctattgtttatgggacaaagtccaaacttctaccttatgaggctggtcgtgagcacctcccctcaccctcatccaatcccaccatgtcatctctt

SEQ ID NO: 27173 - DNA, 304 bp, Homo sapiens
tacagctgctattaatgtctctcctcacctctcatcaacttcctctgaagaatagtctacatttgctttctccttttcgttgcctgtcattcagtcctcacccttttgcaatatgatttctaccctctgttctaatggaagtggtgttattataaattcagcttctaatcattcccagagatgttatttttgtctctagaatactttctgctttttgttttgtttgtttttcacaattagtttactccctcaatcttgaaattcccttggcttttgttataccatactcttcatgattttatta

SEQ ID NO: 27174 - DNA, 567 bp, Homo sapiens
gcaaaaccaaaactctgaacccattaaacacttactctccactccctccccactccatcctctggcaaccaccatactactgtctgtacctatcaatttggctatgttaggtaccttataaagggggaatcattcaatatttgttctattgtgactggcttattccacttagcataatgtcctcaaagttcattcatgctgtagcatgagtcagaatttcctttctttctagggctgagtaatattgatttgcctgtgtatactacattttgtttatccattcatcttttatggacatttgggttgctcccacgttttggctattatgaataatactgcaatgaacatgggtataaatagtgagctttaatattgtaattaagttttaatctttaatacgtatttgatagtccaactcagggattggcaaactatgaccctcaagtcagatctaacctgacatctgttttaataaataaagttttagataatagaacacaattggatttggtttgggaaggaaggaatgttgtttgcagagagtggagtttgcatacaagattgacc

SEQ ID NO: 27175 - DNA, 388 bp, Homo sapiens
gtaccctccactgaggctcagacacggtaacatctgcagaaccacagccaccttttcctattcctggtgacagctccatccctacatcctagctgccttcccagaagctgccttcccagaagccaccttggccccgggctgccgtgcttcccctaggaagttgttgcatttggaacactctcctgtgcaatagctgtctttttactgggcaattatttccttttttttctgaaaagaattctttgccaatacccaagccaactcaagcttctaggaatgaaagacgaagcagctccccctttcgtgagagtgctctggagcccttaatgaacagtcctggaggccggacgcagcagctcaagcctgcgcaacatagacctgtctctac

SEQ ID NO: 27176 - DNA, 384 bp, Homo sapiens
tgtcttaatgggaaattaaaattttaaaaaggaaaatcttgggaacttctttttgtatacatactttaacaaatcactttcccttaaaggtcttttaatttggggatataagagataactacttttcccctgcccccaccccctttttcttttctttctgctctagtctatatcctcaacttgttaaatatttatgtctttgattgattctgaagtaatgagagagatatattttttaatatcactgttactgtgtataaacttagggctggttattttattccccttttacagataaaatttctgtgtttataaaagctcagaataatggcaaaccatttttgatatttgaattttaacctttttttcgtcagtctcttgtga

SEQ ID NO: 27177 - DNA, 624 bp, Homo sapiens
attgctgtattctgggataaaagaaagtctgatgcagggaaaggggaagttggaaaaactggaaaaagaaaaaagaagaaaagaaaaaaaggactggaaagacattggtgaatagaaagatgaaaagggtgaagaaaaaaatgatgatagtcaatagggtggttttaaaagaggcttttgttttattaatttgtttttgtgtgagtgtgtgtgtatgtgtttgttttttgcctaaaagtatttaactccgcattacaccactgatttcaaagaaaaaaagctgaaatgtaagatcatatgatttgtttttaaactgaacactgtatactgtctttttatttttgcaaaattaatgtagtatccagtgtgtctttagataaccctgtccttaatgatattttcaatagccactaaccttgcctggtactgtttcggggtttaaactagaacagaaatttaaggcaggctttattagtgcatagtacaaatcaattacatatatatggagatattatttttccctcttcaattgtttttcgtgcagcttacccaatataattgttctgttagttgtacactactctgtgatagcaaataataataataaaataattatgatgatat

SEQ ID NO: 27178 - DNA, 527 bp, Homo sapiens
tgagatggagtcctgctctgtcaccaggctggagtgcggcggcatgatcttggctcactgcagcctctgcctcctgggttcaagcaattctcctgtcttagcctcccaagtagctgggactacaggtgcccaccactatgcccagctaatttttgtatttttagtagagatggggtttcaccatgttggccaggatggtctcgatctcttgacctcgtgatccgcccgccttggcctcccaaagtgctgggattacaggcgtgacactgtgcctggccggccttgcttttttatatactgaccttccccaaacgatgtggctctccctgaggttgaagatcaggcttactcttgcatctccatggcctgcacacactgggagttgataaatgcaagggtctgttatttctgcatgaatgaatggattcactttccttgctataccatatactcttctaaaagttaccaggctttctggaacttatattaagaaattcagataccagcaataatatccaggtaactca

SEQ ID NO: 27179 - DNA, 5030 bp, Homo sapiens
tggagtgacgtcaggatcttggcacatccagtcctagggtttccctctgtctctggccagccctgagccccgtagccgtgagttctgcccaggccctgtgagctcaccagagccacagactcacagcccagaggtggcttcttccttcaggaactgaagaacccccatgaacaccaacatctccaggttctgagaacagaacctgggaaattgatgacttcctcatgatgaccgatactcaggatggccctagcgagagctcccagatcatgaggaagaaggcctgaacgacatacaggagatgatcaaaacggagaagtcctaccctgagcgtcgcctgcggggcgtcctggaggagctgagctgtggctgctgccgcttcctctccctcgctgacaaggaccagggccactcatcccgcaccaggcttgaccgggagcgcctcaagtcctgcatgagggagctggaaaacatggggcagcaggccaggatgctgcgggcccaggtgaagcggcacacggtgcgggacaagctgaggctgtgccagaacttcctgcagaagctgcgcttcctggcggacgagccccagcacagcattcccgacatcttcatctggatgatgagcaacaacaagcgtgtcgcctatgcccgtgtgccctccaaggacctgctcttctccatcgtggaggaggagactggcaaggactgcgccaaggtcaagacgctcttccttaagctgccagggaagcggggcttcggctcggcaggctggacagtgcaggccaaggtggagctgtacctgtggctgggcctcagcaaacagcgcaaggagttcctgtgcggcctgccctgtggcttccaggaggtcaaggcagcccagggcctgggcctgcatgccttcccacccgtcagcctggtctacaccaagaagcaggcgttccagctccgagcgcacatgtaccaggcccgcagcctctttgccgccgacagcagcggactctcagacccctttgcccgcgtcttcttcatcaatcagagtcagtgcacagaggtgctgaatgagaccctgtgtcccacctgggaccagatgctggtgttcgacaacctggagctctatggtgaagctcatgagctgagggacgatccgcccatcattgtcattgaaatctatgaccaggattccatgggcaaagctgacttcatgggccggaccttcgccaaacccctggtgaagatggcagacgaggcgtactgcccaccccgcttcccacctcagctcgagtactaccagatctaccgtggcaacgccacagctggagacccgctggcggccttcgagctgctgcagattggaccagcagggaaggctgacctgccccccatcaatggcccggtggacgtggaccgaggtcccatcatgcccgtgcccatgggcatccggcccgtgctcagcaagtaccgagtggaggtgctgttctggggcctacgggacctaaagcgggtgaacctggcccaggtggaccggccacgggtggacatcgagtgtgcagggaagggggtgcagtcgtccctgatccacaattataagaagaaccccaacttcaacaccctcgtcaagtggtttgaagtggacctcccagagaacgagctgctgcacccgcccttgaacatccgtgtggtggactgccgggccttcggtcgctacacactggtgggctcccatgccgtcagctccctgcgacgcttcatctaccggcccccagaccgctcggcccccagctggaacaccacgggggaggttgtggtgactatggagccagaggtacccatcaagaaactggagaccatggtgaagctggacgcgacttctgaagctgttgtcaaggtggatgtggctgaggaggagaaggagaagaagaagaagaagaagggcactgcggaggagccagaggaggaggagccagacgagagcatgctggactggtggtccaagtactttgcctccattgacaccatgaaggagcaacttcgacaacaagagccctctggaattgacttggaggagaaggaggaagtggacaataccgagggcctgaaggggtcaatgaagggcaaggagaaggcaagggctgccaaagaggagaagaagaagaaaactcagagctctggctctggccaggggtccgaggcccccgagaagaagaaacccaagattgatgagcttaaggtataccccaaagagctggagtccgagtttgataactttgaggactggctgcacactttcaacttgcttcggggcaagaccggggatgatgaggatggctccaccgaggaggagcgcattgtgggacgcttcaagggctccctctgcgtgtacaaagtgccactcccagaggacgtgtcccgggaagccggctacgactccacctacggcatgttccagggcatcccgagcaatgaccccatcaatgtgctggtccgagtctatgtggtccgggccacggacctgcaccctgctgacatcaacggcaaagctgacccctacatcgccatccggctaggcaagactgacatccgcgacaaggagaactacatctccaagcagctcaaccctgtctttgggaagtcctttgacatcgaggcctccttccccatggaatccatgctgacggtggctgtgtatgactgggacctggtgggcactgatgacctcattggggaaaccaagatcgacctggagaaccgcttctacagcaagcaccgcgccacctgcggcatcgcccagacctactccacacatggctacaatatctggcgggaccccatgaagcccagccagatcctgacccgcctctgcaaagacggcaaagtggacggcccccactttgggccccctgggagagtgaaggtggccaaccgcgtcttcactgggccctctgagattgaggacgagaacggtcagaggaagcccacagacgagcatgtggcgctgttggccctgaggcactgggaggacatcccccgcgcaggctgccgcctggtgccagagcatgtggagacgaggccgctgctcaaccccgacaagccgggcatcgagcagggccgcctggagctgtgggtggacatgttccccatggacatgccagcccctgggacgcctctggacatctcacctcggaagcccaagaagtacgagctgcgggtcatcatctggaacacagatgaggtggtcttggaggacgacgacttcttcacaggggagaagtccagtgacatcttcgtgagggggtggctgaagggccagcaggaggacaagcaggacacagacgtccactaccactccctcactggcgagggcaacttcaactggcgctacctgttccccttcgactacctggcggcggaggagaagatcgtcatctccaagaaggagtccatgttctcctgggacgagaccgagtacaagatccccgcgcggctcaccctgcagatctgggatgcggaccacttctccgctgacgacttcctgggggccatcgagctggacctgaaccggttcccgcggggcgcaaagacagccaagcagtgcaccatggagatggccaccggggaggtggacgtgcccctcgtgtccatcttcaagcaaaagcgcgtcaaaggctggtggcccctcctggcccgcaatgagaacgatgagtttgagctcacgggcaaggtggaggctgagctgcatttactgacagcagaggaggcagagaagaacccagtgggcctggcccgcaatgaacctgaccccctagagaaacccaaccggcccgacacgagcttcatctggttcctgaaccctctcaagtcggctcgctacttcttgtggcacacgtatcgctggctgctcctcaaactgttgctgctcctgctgctgctcctcctcctcgccctgttcctctactctgtgcctggctacctggtcaagaaaatcctcggggcctgagcccagtggcctcctggccggcccgacacggccttcgtctggttcctcaaccctctcaagtccatcaagtacctcatctgcacccggtacaagtggctcatcatcaagatcgtgctggcgctgttggggctgctcatgttggggctcttcctctacagcctccctggctacatggtcaaaaagctccttggggcatgaaggccgccagctcccgccagccgctccccagccctgccgcatttcctttcagtggcttggactctttcccatctcccctggggagcctgaggagcccagcgtccacttttcatgccttgggccgagcctgcctcctgcttgcgggggccgcctgtcctcactgccccaggctgcggcttgcccagtcccgcccctctgacccctgcctgtgggctggggagccttggatggggtggggacctggaatgggtctttcttgccccacctggctgaggcgccacccttcttcaggcccaggctccagaggaagactcctgaaaccctccccaggttttccaagtacaggattgaagctttagtgaaattaaccaaggaccatgggtcagtgcccagggctttaaaaagaatgaacgagcaaaaggtatccccgccgtgacccctgcagatagcaccggtatttgatccgcagcaggggccagaccctgcccacaagtcccagcgcggatgtttctgccactgctgggctccacttggctcctctcacttcccagggggtcgcctgtcctgcctgtgggtttccatggcttcccagagttccctctgccccagccagcgcctccaggcccagctgaggagctgtgagaagcagcagaggggactccccatcccgggcacaccctgtcttcccacccctgcccccttgcccttccagccctttcagctgcaggtgggagctggcccgtcaagtgctgcccctgcctgtgtctgggtttctgttggctgtttttcttttcttggagtggtgatttttctctaaataaaagaagtcaagcactga

SEQ ID NO: 27180 - DNA, 7157 bp, Homo sapiens
atcggaggggggtcgggaggaggaggaggaggcagcggcagagaagagagaggcgtgtgagccgtgctccaccggctagctccttcccgctgctcctgcctggcagtgccaggcagcccacaccagcatggccttgctcatccacctcaagacagtctcggagctgcggggcaggggcgaccggatcgccaaagtgactttccgagggcaatccttctactctcgggtcctggagaactgtgaggatgtggctgactttgatgagacatttcggtggccggtggccagcagcatcgacagaaatgagatgctggagattcaggttttcaactacagcaaagtcttcagcaacaagctcatcgggaccttccgcatggtgctgcagaaggtggtagaggagagccatgtggaggtgactgacacgctgattgatgacaacaatgctatcatcaagaccagcctgtgcgtggaggtccggtatcaggccactgacggcacagtgggctcctgggacgatggggacttcctgggagatgagtctcttcaagaggaagagaaggacagccaagagacggatggactgctcccaggctcccggcccagctcccggcccccaggagagaagagcttccggagagccgggaggagcgtgttctccgccatgaagctcggcaaaaaccggtctcacaaggaggagccccaaagaccagatgaaccggcggtgctggagatggaagaccttgaccatctggccattcggctaggagatggactggatcccgactcggtgtctctagcctcagtcacagctctcaccactaatgtctccaacaagcgatctaagccagacattaagatggagccaagtgctgggcggcccatggattaccaggtcagcatcacggtgatcgaggcccggcagctggtgggcttgaacatggaccctgtggtgtgcgtggaggtgggtgacgacaagaagtacacatccatgaaggagtccactaactgcccctattacaacgagtacttcgtcttcgacttccatgtctctccggatgtcatgtttgacaagatcatcaagatttcggtgattcactccaagaacctgctgcgcagtggcaccctggtgggctccttcaaaatggacgtgggaaccgtgtactcgcagccagagcaccagttccatcacaagtgggccatcctgtctgaccccgatgacatctcctcggggctgaagggctacgtgaagtgtgacgttgccgtggtgggcaaaggggacaacatcaagacgccccacaaggccaatgagaccgacgaagatgacattgaggggaacttgctgctccccgagggggtgccccccgaacgccagtgggcccggttctatgtgaaaatttaccgagcagaggggctgccccgtatgaacacaagcctcatggccaatgtaaagaaggctttcatcggtgaaaacaaggacctcgtggacccctacgtgcaagtcttctttgctggccagaagggcaagacttcagtgcagaagagcagctatgagcccctgtggaatgagcaggtcgtctttacagacctcttccccccactctgcaaacgcatgaaggtgcagatccgagactcggacaaggtcaacgacgtggccatcggcacccacttcattgacctgcgcaagatttctaatgacggagacaaaggcttcctgcccacactgggcccagcctgggtgaacatgtacggctccacacgtaactacacgctgctggatgagcatcaggacctgaacgagggcctgggggagggtgtgtccttccgggcccggctcctgctgggcctggctgtggagatcgtagacacctccaaccctgagctcaccagctccacagaggtgcaggtggagcaggccacgcccatctcggagagctgtgcaggtaaaatggaagaattctttctctttggagccttcctggaggcctcaatgatcgaccggagaaacggagacaagcccatcacctttgaggtcaccataggcaactatgggaacgaagttgatggcctgtcccggccccagcggcctcggccccggaaggagccgggggatgaggaagaagtagacctgattcagaacgcaagtgatgacgaggccggtgatgccggggacctggcctcagtctcctccactccaccaatgcggccccaggtcaccgacaggaactacttccatctgccctacctggagcgaaagccctgcatctacatcaagagctggtggccggaccagcgccgccgcctctacaatgccaacatcatggaccacattgccgacaagctggaagaaggcctgaacgacatacaggagatgatcaaaacggagaagtcctaccctgagcgtcgcctgcggggcgtcctggaggagctgagctgtggctgctgccgcttcctctccctcgctgacaaggaccagggccactcatcccgcaccaggcttgaccgggagcgcctcaagtcctgcatgagggagctggaaaacatggggcagcaggccaggatgctgcgggcccaggtgaagcggcacacggtgcgggacaagctgaggctgtgccagaacttcctgcagaagctgcgcttcctggcggacgagccccagcacagcattcccgacatcttcatctggatgatgagcaacaacaagcgtgtcgcctatgcccgtgtgccctccaaggacctgctcttctccatcgtggaggaggagactggcaaggactgcgccaaggtcaagacgctcttccttaagctgccagggaagcggggcttcggctcggcaggctggacagtgcaggccaaggtggagctgtacctgtggctgggcctcagcaaacagcgcaaggagttcctgtgcggcctgccctgtggcttccaggaggtcaaggcagcccagggcctgggcctgcatgccttcccacccgtcagcctggtctacaccaagaagcaggcgttccagctccgagcgcacatgtaccaggcccgcagcctctttgccgccgacagcagcggactctcagacccctttgcccgcgtcttcttcatcaatcagagtcagtgcacagaggtgctgaatgagaccctgtgtcccacctgggaccagatgctggtgttcgacaacctggagctctatggtgaagctcatgagctgagggacgatccgcccatcattgtcattgaaatctatgaccaggattccatgggcaaagctgacttcatgggccggaccttcgccaaacccctggtgaagatggcagacgaggcgtactgcccaccccgcttcccacctcagctcgagtactaccagatctaccgtggcaacgccacagctggagacccgctggcggccttcgagctgctgcagattggaccagcagggaaggctgacctgccccccatcaatggcccggtggacgtggaccgaggtcccatcatgcccgtgcccatgggcatccggcccgtgctcagcaagtaccgagtggaggtgctgttctggggcctacgggacctaaagcgggtgaacctggcccaggtggaccggccacgggtggacatcgagtgtgcagggaagggggtgcagtcgtccctgatccacaattataagaagaaccccaacttcaacaccctcgtcaagtggtttgaagtggacctcccagagaacgagctgctgcacccgcccttgaacatccgtgtggtggactgccgggccttcggtcgctacacactggtgggctcccatgccgtcagctccctgcgacgcttcatctaccggcccccagaccgctcggcccccagctggaacaccacggtcaggcttctccggcgctgccgtgtgctgtgcaatgggggctcctcctctcactccacaggggaggttgtggtgactatggagccagaggtacccatcaagaaactggagaccatggtgaagctggacgcgacttctgaagctgttgtcaaggtggatgtggctgaggaggagaaggagaagaagaagaagaagaagggcactgcggaggagccagaggaggaggagccagacgagagcatgctggactggtggtccaagtactttgcctccattgacaccatgaaggagcaacttcgacaacaagagccctctggaattgacttggaggagaaggaggaagtggacaataccgagggcctgaaggggtcaatgaagggcaaggagaaggcaagggctgccaaagaggagaagaagaagaaaactcagagctctggctctggccaggggtccgaggcccccgagaagaagaaacccaagattgatgagcttaaggtataccccaaagagctggagtccgagtttgataactttgaggactggctgcacactttcaacttgcttcggggcaagaccggggatgatgaggatggctccaccgaggaggagcgcattgtgggacgcttcaagggctccctctgcgtgtacaaagtgccactcccagaggacgtgtcccgggaagccggctacgactccacctacggcatgttccagggcatcccgagcaatgaccccatcaatgtgctggtccgagtctatgtggtccgggccacggacctgcaccctgctgacatcaacggcaaagctgacccctacatcgccatccggctaggcaagactgacatccgcgacaaggagaactacatctccaagcagctcaaccctgtctttgggaagtcctttgacatcgaggcctccttccccatggaatccatgctgacggtggctgtgtatgactgggacctggtgggcactgatgacctcattggggaaaccaagatcgacctggagaaccgcttctacagcaagcaccgcgccacctgcggcatcgcccagacctactccacacatggctacaatatctggcgggaccccatgaagcccagccagatcctgacccgcctctgcaaagacggcaaagtggacggcccccactttgggccccctgggagagtgaaggtggccaaccgcgtcttcactgggccctctgagattgaggacgagaacggtcagaggaagcccacagacgagcatgtggcgctgttggccctgaggcactgggaggacatcccccgcgcaggctgccgcctggtgccagagcatgtggagacgaggccgctgctcaaccccgacaagccgggcatcgagcagggccgcctggagctgtgggtggacatgttccccatggacatgccagcccctgggacgcctctggacatctcacctcggaagcccaagaagtacgagctgcgggtcatcatctggaacacagatgaggtggtcttggaggacgacgacttcttcacaggggagaagtccagtgacatcttcgtgagggggtggctgaagggccagcaggaggacaagcaggacacagacgtccactaccactccctcactggcgagggcaacttcaactggcgctacctgttccccttcgactacctggcggcggaggagaagatcgtcatctccaagaaggagtccatgttctcctgggacgagaccgagtacaagatccccgcgcggctcaccctgcagatctgggatgcggaccacttctccgctgacgacttcctgggggccatcgagctggacctgaaccggttcccgcggggcgcaaagacagccaagcagtgcaccatggagatggccaccggggaggtggacgtgcccctcgtgtccatcttcaagcaaaagcgcgtcaaaggctggtggcccctcctggcccgcaatgagaacgatgagtttgagctcacgggcaaggtggaggctgagctgcatttactgacagcagaggaggcagagaagaacccagtgggcctggcccgcaatgaacctgaccccctagagaaacccaaccggcccgacacgagcttcatctggttcctgaaccctctcaagtcggctcgctacttcttgtggcacacgtatcgctggctgctcctcaaactgttgctgctcctgctgctgctcctcctcctcgccctgttcctctactctgtgcctggctacctggtcaagaaaatcctcggggcctgagcccagtggcctcctggccggcccgacacggccttcgtctggttcctcaaccctctcaagtccatcaagtacctcatctgcacccggtacaagtggctcatcatcaagatcgtgctggcgctgttggggctgctcatgttggggctcttcctctacagcctccctggctacatggtcaaaaagctccttggggcatgaaggccgccagctcccgccagccgctccccagccctgccgcatttcctttcagtggcttggactctttcccatctcccctggggagcctgaggagcccagcgtccacttttcatgccttgggccgagcctgcctcctgcttgcgggggccgcctgtcctcactgccccaggctgcggcttgcccagtcccgcccctctgacccctgcctgtgggctggggagccttggatggggtggggacctggaatgggtctttcttgccccacctggctgaggcgccacccttcttcaggcccaggctccagaggaagactcctgaaaccctccccaggttttccaagtacaggattgaagctttagtgaaattaaccaaggaccatgggtcagtgcccagggctttaaaaagaatgaacgagcaaaaggtatccccgccgtgacccctgcagatagcaccggtatttgatccgcagcaggggccagaccctgcccacaagtcccagcgcggatgtttctgccactgctgggctccacttggctcctctcacttcccagggggtcgcctgtcctgcctgtgggtttccatggcttcccagagttccctctgccccagccagcgcctccaggcccagctgaggagctgtgagaagcagcagaggggactccccatcccgggcacaccctgtcttcccacccctgcccccttgcccttccagccctttcagctgcaggtgggagctggcccgtcaagtgctgcccctgcctgtgtctgggtttctgttggctgtttttcttttcttggagtggtgatttttctctaaataaaagaagtcaagcactga

SEQ ID NO: 27181 - DNA, 5184 bp, Homo sapiens
  misc_feature (286)..(286): n is a, c, g, or t
tggagtgacgtcaggatcttggcacatccagtcctagggtttccctctgtctctggccagccctgagccccgtagccgtgagttctgcccaggccctgtgagctcaccagagccacagactcacagcccagaggtggcttcttccttcaggaactgaagaacccccatgaacaccaacatctccaggttctgagaacagaacctgggaaattgatgacttcctcatgatgaccgatactcaggatggccctagcgagagctcccagatcatgaggtccctcactcncctgatcaacagggaggaggcatttggggaggctggggaggcggggctgtggcccagcatcacccacactcctgattcacaggaagaaggcctgaacgacatacaggagatgatcaaaacggagaagtcctaccctgagcgtcgcctgcggggcgtcctggaggagctgagctgtggctgctgccgcttcctctccctcgctgacaaggaccagggccactcatcccgcaccaggcttgaccgggagcgcctcaagtcctgcatgagggagctggaaaacatggggcagcaggccaggatgctgcgggcccaggtgaagcggcacacggtgcgggacaagctgaggctgtgccagaacttcctgcagaagctgcgcttcctggcggacgagccccagcacagcattcccgacatcttcatctggatgatgagcaacaacaagcgtgtcgcctatgcccgtgtgccctccaaggacctgctcttctccatcgtggaggaggagactggcaaggactgcgccaaggtcaagacgctcttccttaagctgccagggaagcggggcttcggctcggcaggctggacagtgcaggccaaggtggagctgtacctgtggctgggcctcagcaaacagcgcaaggagttcctgtgcggcctgccctgtggcttccaggaggtcaaggcagcccagggcctgggcctgcatgccttcccacccgtcagcctggtctacaccaagaagcaggcgttccagctccgagcgcacatgtaccaggcccgcagcctctttgccgccgacagcagcggactctcagacccctttgcccgcgtcttcttcatcaatcagagtcagtgcacagaggtgctgaatgagaccctgtgtcccacctgggaccagatgctggtgttcgacaacctggagctctatggtgaagctcatgagctgagggacgatccgcccatcattgtcattgaaatctatgaccaggattccatgggcaaagctgacttcatgggccggaccttcgccaaacccctggtgaagatggcagacgaggcgtactgcccaccccgcttcccacctcagctcgagtactaccagatctaccgtggcaacgccacagctggagacccgctggcggccttcgagctgctgcagattggaccagcagggaaggctgacctgccccccatcaatggcccggtggacgtggaccgaggtcccatcatgcccgtgcccatgggcatccggcccgtgctcagcaagtaccgagtggaggtgctgttctggggcctacgggacctaaagcgggtgaacctggcccaggtggaccggccacgggtggacatcgagtgtgcagggaagggggtgcagtcgtccctgatccacaattataagaagaaccccaacttcaacaccctcgtcaagtggtttgaagtggacctcccagagaacgagctgctgcacccgcccttgaacatccgtgtggtggactgccgggccttcggtcgctacacactggtgggctcccatgccgtcagctccctgcgacgcttcatctaccggcccccagaccgctcggcccccagctggaacaccacggtcaggcttctccggcgctgccgtgtgctgtgcaatgggggctcctcctctcactccacaggggaggttgtggtgactatggagccagaggtacccatcaagaaactggagaccatggtgaagctggacgcgacttctgaagctgttgtcaaggtggatgtggctgaggaggagaaggagaagaagaagaagaagaagggcactgcggaggagccagaggaggaggagccagacgagagcatgctggactggtggtccaagtactttgcctccattgacaccatgaaggagcaacttcgacaacaagagccctctggaattgacttggaggagaaggaggaagtggacaataccgagggcctgaaggggtcaatgaagggcaaggagaaggcaagggctgccaaagaggagaagaagaagaaaactcagagctctggctctggccaggggtccgaggcccccgagaagaagaaacccaagattgatgagcttaaggtataccccaaagagctggagtccgagtttgataactttgaggactggctgcacactttcaacttgcttcggggcaagaccggggatgatgaggatggctccaccgaggaggagcgcattgtgggacgcttcaagggctccctctgcgtgtacaaagtgccactcccagaggacgtgtcccgggaagccggctacgactccacctacggcatgttccagggcatcccgagcaatgaccccatcaatgtgctggtccgagtctatgtggtccgggccacggacctgcaccctgctgacatcaacggcaaagctgacccctacatcgccatccggctaggcaagactgacatccgcgacaaggagaactacatctccaagcagctcaaccctgtctttgggaagtcctttgacatcgaggcctccttccccatggaatccatgctgacggtggctgtgtatgactgggacctggtgggcactgatgacctcattggggaaaccaagatcgacctggagaaccgcttctacagcaagcaccgcgccacctgcggcatcgcccagacctactccacacatggctacaatatctggcgggaccccatgaagcccagccagatcctgacccgcctctgcaaagacggcaaagtggacggcccccactttgggccccctgggagagtgaaggtggccaaccgcgtcttcactgggccctctgagattgaggacgagaacggtcagaggaagcccacagacgagcatgtggcgctgttggccctgaggcactgggaggacatcccccgcgcaggctgccgcctggtgccagagcatgtggagacgaggccgctgctcaaccccgacaagccgggcatcgagcagggccgcctggagctgtgggtggacatgttccccatggacatgccagcccctgggacgcctctggacatctcacctcggaagcccaagaagtacgagctgcgggtcatcatctggaacacagatgaggtggtcttggaggacgacgacttcttcacaggggagaagtccagtgacatcttcgtgagggggtggctgaagggccagcaggaggacaagcaggacacagacgtccactaccactccctcactggcgagggcaacttcaactggcgctacctgttccccttcgactacctggcggcggaggagaagatcgtcatctccaagaaggagtccatgttctcctgggacgagaccgagtacaagatccccgcgcggctcaccctgcagatctgggatgcggaccacttctccgctgacgacttcctgggggccatcgagctggacctgaaccggttcccgcggggcgcaaagacagccaagcagtgcaccatggagatggccaccggggaggtggacgtgcccctcgtgtccatcttcaagcaaaagcgcgtcaaaggctggtggcccctcctggcccgcaatgagaacgatgagtttgagctcacgggcaaggtggaggctgagctgcatttactgacagcagaggaggcagagaagaacccagtgggcctggcccgcaatgaacctgaccccctagagaaacccaaccggcccgacacgagcttcatctggttcctgaaccctctcaagtcggctcgctacttcttgtggcacacgtatcgctggctgctcctcaaactgttgctgctcctgctgctgctcctcctcctcgccctgttcctctactctgtgcctggctacctggtcaagaaaatcctcggggcctgagcccagtggcctcctggccggcccgacacggccttcgtctggttcctcaaccctctcaagtccatcaagtacctcatctgcacccggtacaagtggctcatcatcaagatcgtgctggcgctgttggggctgctcatgttggggctcttcctctacagcctccctggctacatggtcaaaaagctccttggggcatgaaggccgccagctcccgccagccgctccccagccctgccgcatttcctttcagtggcttggactctttcccatctcccctggggagcctgaggagcccagcgtccacttttcatgccttgggccgagcctgcctcctgcttgcgggggccgcctgtcctcactgccccaggctgcggcttgcccagtcccgcccctctgacccctgcctgtgggctggggagccttggatggggtggggacctggaatgggtctttcttgccccacctggctgaggcgccacccttcttcaggcccaggctccagaggaagactcctgaaaccctccccaggttttccaagtacaggattgaagctttagtgaaattaaccaaggaccatgggtcagtgcccagggctttaaaaagaatgaacgagcaaaaggtatccccgccgtgacccctgcagatagcaccggtatttgatccgcagcaggggccagaccctgcccacaagtcccagcgcggatgtttctgccactgctgggctccacttggctcctctcacttcccagggggtcgcctgtcctgcctgtgggtttccatggcttcccagagttccctctgccccagccagcgcctccaggcccagctgaggagctgtgagaagcagcagaggggactccccatcccgggcacaccctgtcttcccacccctgcccccttgcccttccagccctttcagctgcaggtgggagctggcccgtcaagtgctgcccctgcctgtgtctgggtttctgttggctgtttttcttttcttggagtggtgatttttctctaaataaaagaagtcaagcactga

SEQ ID NO: 27182 - DNA, 4832 bp, Homo sapiens
tggagtgacgtcaggatcttggcacatccagtcctagggtttccctctgtctctggccagccctgagccccgtagccgtgagttctgcccaggccctgtgagctcaccagagccacagactcacagcccagaggtggcttcttccttcaggaactgaagaacccccatgaacaccaacatctccaggttctgagaacagaacctgggaaattgatgacttcctcatgatgaccgatactcaggatggccctagcgagagctcccagatcatgaggaagaaggcctgaacgacatacaggagatgatcaaaacggagaagtcctaccctgagcgtcgcctgcggggcgtcctggaggagctgagctgtggctgctgccgcttcctctccctcgctgacaaggaccagggccactcatcccgcaccaggcttgaccgggagcgcctcaagtcctgcatgagggagctggaaaacatggggcagcaggccaggatgctgcgggcccaggtgaagcggcacacggtgcgggacaagctgaggctgtgccagaacttcctgcagaagctgcgcttcctggcggacgagccccagcacagcattcccgacatcttcatctggatgatgagcaacaacaagcgtgtcgcctatgcccgtgtgccctccaaggacctgctcttctccatcgtggaggaggagactggcaaggactgcgccaaggtcaagacgctcttccttaagctgccagggaagcggggcttcggctcggcaggctggacagtgcaggccaaggtggagctgtacctgtggctgggcctcagcaaacagcgcaaggagttcctgtgcggcctgccctgtggcttccaggaggtcaaggcagcccagggcctgggcctgcatgccttcccacccgtcagcctggtctacaccaagaagcaggcgttccagctccgagcgcacatgtaccaggcccgcagcctctttgccgccgacagcagcggactctcagacccctttgcccgcgtcttcttcatcaatcagagtcagtgcacagaggtgctgaatgagaccctgtgtcccacctgggaccagatgctggtgttcgacaacctggagctctatggtgaagctcatgagctgagggacgatccgcccatcattgtcattgaaatctatgaccaggattccatgggcaaagctgacttcatgggccggaccttcgccaaacccctggtgaagatggcagacgaggcgtactgcccaccccgcttcccacctcagctcgagtactaccagatctaccgtggcaacgccacagctggagacccgctggcggccttcgagctgctgcagattggaccagcagggaaggctgacctgccccccatcaatggcccggtggacgtggaccgaggtcccatcatgcccgtgcccatgggcatccggcccgtgctcagcaagtaccgagtggaggtgctgttctggggcctacgggacctaaagcgggtgaacctggcccaggtggaccggccacgggtggacatcgagtgtgcagggaagggggtgcagtcgtccctgatccacaattataagaagaaccccaacttcaacaccctcgtcaagtggtttgaagtggacctcccagagaacgagctgctgcacccgcccttgaacatccgtgtggtggactgccgggccttcggtcgctacacactggtgggctcccatgccgtcagctccctgcgacgcttcatctaccggcccccagaccgctcggcccccagctggaacaccacgggggaggttgtggtgactatggagccagaggtacccatcaagaaactggagaccatggtgaagctggacgcgacttctgaagctgttgtcaaggtggatgtggctgaggaggagaaggagaagaagaagaagaagaagggcactgcggaggagccagaggaggaggagccagacgagagcatgctggactggtggtccaagtactttgcctccattgacaccatgaaggagcaacttcgacaacaagagccctctggaattgacttggaggagaaggaggaagtggacaataccgagggcctgaaggggtcaatgaagggcaaggagaaggcaagggctgccaaagaggagaagaagaagaaaactcagagctctggctctggccaggggtccgaggcccccgagaagaagaaacccaagattgatgagcttaaggtataccccaaagagctggagtccgagtttgataactttgaggactggctgcacactttcaacttgcttcggggcaagaccggggatgatgaggatggctccaccgaggaggagcgcattgtgggacgcttcaagggctccctctgcgtgtacaaagtgccactcccagaggacgtgtcccgggaagccggctacgactccacctacggcatgttccagggcatcccgagcaatgaccccatcaatgtgctggtccgagtctatgtggtccgggccacggacctgcaccctgctgacatcaacggcaaagctgacccctacatcgccatccggctaggcaagactgacatccgcgacaaggagaactacatctccaagcagctcaaccctgtctttgggaagtcctttgacatcgaggcctccttccccatggaatccatgctgacggtggctgtgtatgactgggacctggtgggcactgatgacctcattggggaaaccaagatcgacctggagaaccgcttctacagcaagcaccgcgccacctgcggcatcgcccagacctactccacacatggctacaatatctggcgggaccccatgaagcccagccagatcctgacccgcctctgcaaagacggcaaagtggacggcccccactttgggccccctgggagagtgaaggtggccaaccgcgtcttcactgggccctctgagattgaggacgagaacggtcagaggaagcccacagacgagcatgtggcgctgttggccctgaggcactgggaggacatcccccgcgcaggctgccgcctggtgccagagcatgtggagacgaggccgctgctcaaccccgacaagccgggcatcgagcagggccgcctggagctgtgggtggacatgttccccatggacatgccagcccctgggacgcctctggacatctcacctcggaagcccaagaagtacgagctgcgggtcatcatctggaacacagatgaggtggtcttggaggacgacgacttcttcacaggggagaagtccagtgacatcttcgtgagggggtggctgaagggccagcaggaggacaagcaggacacagacgtccactaccactccctcactggcgagggcaacttcaactggcgctacctgttccccttcgactacctggcggcggaggagaagatcgtcatctccaagaaggagtccatgttctcctgggacgagaccgagtacaagatccccgcgcggctcaccctgcagatctgggatgcggaccacttctccgctgacgacttcctgggggccatcgagctggacctgaaccggttcccgcggggcgcaaagacagccaagcagtgcaccatggagatggccaccggggaggtggacgtgcccctcgtgtccatcttcaagcaaaagcgcgtcaaaggctggtggcccctcctggcccgcaatgagaacgatgagtttgagctcacgggcaaggtggaggctgagctgcatttactgacagcagaggaggcagagaagaacccagtgggcctggcccgcaatgaacctgaccccctagagaaacccaaccggcccgacacggccttcgtctggttcctcaaccctctcaagtccatcaagtacctcatctgcacccggtacaagtggctcatcatcaagatcgtgctggcgctgttggggctgctcatgttggggctcttcctctacagcctccctggctacatggtcaaaaagctccttggggcatgaaggccgccagctcccgccagccgctccccagccctgccgcatttcctttcagtggcttggactctttcccatctcccctggggagcctgaggagcccagcgtccacttttcatgccttgggccgagcctgcctcctgcttgcgggggccgcctgtcctcactgccccaggctgcggcttgcccagtcccgcccctctgacccctgcctgtgggctggggagccttggatggggtggggacctggaatgggtctttcttgccccacctggctgaggcgccacccttcttcaggcccaggctccagaggaagactcctgaaaccctccccaggttttccaagtacaggattgaagctttagtgaaattaaccaaggaccatgggtcagtgcccagggctttaaaaagaatgaacgagcaaaaggtatccccgccgtgacccctgcagatagcaccggtatttgatccgcagcaggggccagaccctgcccacaagtcccagcgcggatgtttctgccactgctgggctccacttggctcctctcacttcccagggggtcgcctgtcctgcctgtgggtttccatggcttcccagagttccctctgccccagccagcgcctccaggcccagctgaggagctgtgagaagcagcagaggggactccccatcccgggcacaccctgtcttcccacccctgcccccttgcccttccagccctttcagctgcaggtgggagctggcccgtcaagtgctgcccctgcctgtgtctgggtttctgttggctgtttttcttttcttggagtggtgatttttctctaaataaaagaagtcaagcactga

SEQ ID NO: 27183 - DNA, 2767 bp, Homo sapiens
ccagactgggaggcaccagggagatcatttggtctagtctttatcttttctagaggaagaagtcaacgcccagagaggggtagccacttgcctagggtcacacagcaagcctcctgaggggtccagtgctcctgcccctgcccttcactgtcataggaccctcaggcagcctggcaggggcactgaagatgagcagggcatgggagcctgctcaggcagcccttctccccattccaggccacggacctgcaccctgctgacatcaacggcaaagctgacccctacatcgccatccggctaggcaagactgacatccgcgacaaggagaactacatctccaagcagctcaaccctgtctttgggaagtcctttgacatcgaggcctccttccccatggaatccatgctgacggtggctgtgtatgactgggacctggtgggcactgatgacctcattggggaaaccaagatcgacctggagaaccgcttctacagcaagcaccgcgccacctgcggcatcgcccagacctactccacacatggctacaatatctggcgggaccccatgaagcccagccagatcctgacccgcctctgcaaagacggcaaagtggacggcccccactttgggccccctgggagagtgaaggtggccaaccgcgtcttcactgggccctctgagattgaggacgagaacggtcagaggaagcccacagacgagcatgtggcgctgttggccctgaggcactgggaggacatcccccgcgcaggctgccgcctggtgccagagcatgtggagacgaggccgctgctcaaccccgacaagccgggcatcgagcagggccgcctggagctgtgggtggacatgttccccatggacatgccagcccctgggacgcctctggacatctcacctcggaagcccaagaagtacgagctgcgggtcatcatctggaacacagatgaggtggtcttggaggacgacgacttcttcacaggggagaagtccagtgacatcttcgtgagggggtggctgaagggccagcaggaggacaagcaggacacagacgtccactaccactccctcactggcgagggcaacttcaactggcgctacctgttccccttcgactacctggcggcggaggagaagatcgtcatctccaagaaggagtccatgttctcctgggacgagaccgagtacaagatccccgcgcggctcaccctgcagatctgggatgcggaccacttctccgctgacgacttcctgggggccatcgagctggacctgaaccggttcccgcggggcgcaaagacagccaagcagtgcaccatggagatggccaccggggaggtggacgtgcccctcgtgtccatcttcaagcaaaagcgcgtcaaaggctggtggcccctcctggcccgcaatgagaacgatgagtttgagctcacgggcaaggtggaggctgagctgcatttactgacagcagaggaggcagagaagaacccagtgggcctggcccgcaatgaacctgaccccctagagaaacccaaccggcccgacacgagcttcatctggttcctgaaccctctcaagtcggctcgctacttcttgtggcacacgtatcgctggctgctcctcaaactgttgctgctcctgctgctgctcctcctcctcgccctgttcctctactctgtgcctggctacctggtcaagaaaatcctcggggcctgagcccagtggcctcctggccggcccgacacggccttcgtctggttcctcaaccctctcaagtccatcaagtacctcatctgcacccggtacaagtggctcatcatcaagatcgtgctggcgctgttggggctgctcatgttggggctcttcctctacagcctccctggctacatggtcaaaaagctccttggggcatgaaggccgccagctcccgccagccgctccccagccctgccgcatttcctttcagtggcttggactctttcccatctcccctggggagcctgaggagcccagcgtccacttttcatgccttgggccgagcctgcctcctgcttgcgggggccgcctgtcctcactgccccaggctgcggcttgcccagtcccgcccctctgacccctgcctgtgggctggggagccttggatggggtggggacctggaatgggtctttcttgccccacctggctgaggcgccacccttcttcaggcccaggctccagaggaagactcctgaaaccctccccaggttttccaagtacaggattgaagctttagtgaaattaaccaaggaccatgggtcagtgcccagggctttaaaaagaatgaacgagcaaaaggtatccccgccgtgacccctgcagatagcaccggtatttgatccgcagcaggggccagaccctgcccacaagtcccagcgcggatgtttctgccactgctgggctccacttggctcctctcacttcccagggggtcgcctgtcctgcctgtgggtttccatggcttcccagagttccctctgccccagccagcgcctccaggcccagctgaggagctgtgagaagcagcagaggggactccccatcccgggcacaccctgtcttcccacccctgcccccttgcccttccagccctttcagctgcaggtgggagctggcccgtcaagtgctgcccctgcctgtgtctgggtttctgttggctgtttttcttttcttggagtggtgatttttctctaaataaaagaagtcaagcactga

SEQ ID NO: 27184 - DNA, 550 bp, Homo sapiens
gattaatgtaaactttgtgtctctgtcctcaagacctgactttcttctttctcagaagtttcacgtatgctctagagctcttttcactgtttctagtgtttgttctcagagcatgagcttcaccatgtatttagtttaacttaatcactaaaagaataaaatgtacattgtctgcacactgttgccccttcccagaagttattttttattgttttagaatagatactcacatatcctatgtaaaatgtttgttcccaacagagggacctttctacccagtccctagaccccactcagaagaaacagcttcactcctgatacctcagatacacaggaatgtggttataaattttcctcctattgccttgtaattataagttagataacctgagacagagtttggaactagtgctttcttgcttctaagcagggacttagacagaagccatgggaatgtgagtctggcttacttttgctatgatttcctgctcttggtcattttcttgggccagaggcatgagagaagccatgaaagcccagcttttctttt

SEQ ID NO: 27185 - DNA, 466 bp, Homo sapiens
cctgatacctggaccccactcccagatatatattttttaaggctcctaggtgattttaaatgtgcagcccaggttgaaaattattgccttatagacacgtgcccagtttccctgtgttttttttttcttaaaaaaaaaaacaaaccctttttgttatatcacatttactattctctcttttttcttttctttttctcttttttggggggcagggttgggggaagattgtctatatacctgtatcatttccggttaccatactgaccagaagaaatgagaagtaccaaattctaaccagcatgcttagataaaaggattcaaatggaaggtttctacatgccttcttgggttattgaatacttcctgtgatttttaatttctctgtaaaagataactctttttttggcatcctccctccccacttcatttctttcagcatgggtgcttatcaaatatctttaattaa

SEQ ID NO: 27186 - DNA, 758 bp, Homo sapiens
gggaactgggactgggatgtggcccatgaaggggcttcagggagtgactggcaaagtcctatttcttgacctgtgttgtacttaccagggtgtttgcgtcaaaatactttatcagctacacatttattcatataatattctacttttatttttcaatgaaaaggttaacgtacatacataaatctgatcatgtcactgccctgttacacctttcagtggcttcacagtacttgtaaaaaaaagtccaagctcctttatatagtagacaaggcctggcagcatctggctctctacccaaagcctcaacacttgctagtttcctccctacactaaattttcagttcctcaaaagcactctgctttcttttatctccaggcctttgtacagcagctacttgtgcttgaacagtcaagcacggctcctttttccccttcacgtggctggttcctatctgtccttcaggactcagcaggaaagccttccctgacactccaatgttgggcaaagtattcctagatcttcccattacacactgtagtttcccagtcacagcacttatcccactactagtattaatatgctaatagtattagtatttatatcttccatagaccaacaactccaggcaaaagagatacataacacgtcttgaaatttttgtatctccaatgcctaataaaatacccagaacagagcaagtatacaataaacttatattggccgggcgtgttgggcgataaatcatgtaatcccagca

SEQ ID NO: 27187 - DNA, 377 bp, Homo sapiens
ttttttttttttgagacaagatcttgctgtgttgtccaaggtagagtacagtggtgcaatcatagctcactgtaaccttgaactcctaggctcaagcagtcctcctgcttagcctctcaaatagctgggaatacaggcatgcaccaccacacctggctgatttttaaatttttttgtagatggagatcttgccatgtttcccaggctggtctagaactccaggcctcacgcaatcctcccgcgtccttccaaggtgatgggattacaggcttgagccactgggccccgcgttctcattcttcagaaccctactgcaacatcatgccccctgggaagttttcccacctgctctgttgttctgcacttagtgttccctt

SEQ ID NO: 27188 - DNA, 448 bp, Homo sapiens
gccaaaaaggaaatgaccatgctgtggtattagagacaaactagaggaggagagcattttagatagagtgtgcagcaaaggcctctccgaggatgtgaaatttaagcgtaggtggaggataaggagtcagtcatctgaagggtagtgacaggaaggttccagctgtagagccgggcacggtgactcaacgcctgtaatcccagcattttgggaggctgaggcgggcagatgacgaagtcaagagatcaagaccatcctggccaacatggtgaaaccctgtctctactaaaaatacaaaaattagctgggtgtggtggcacacgcctgtagtcccagctacctgggaggctgaggcaggagaatcgcttgaacccgggaggtggaggttacagtgagccaagatcacgccactgcactccagcctggagacaaagcaagactctctcaa

SEQ ID NO: 27189 - DNA, 740 bp, Homo sapiens
ctctagaggtcccccctagtgttagaagtttcaatagcgaaggacacgtgaattctatgcagcgaaagtttccagacacgttagcctaagaatttcgagtcatgcaaaaaataaagtcccagagtcgcagggttaagcaaaatcagagtccagggccccagtttcccaggtggcagggcacctagcagtcgattctcccctaagaactggcatcaaggagtccagctcctcccgtaactaacgtgtggcccaggcgagctgctgagtgctaataatagcagcaaacaccacaagcgtgccaggttctgctttcagcactttacatattttaactggtgaggcaggtgctcttggtaccaccccactttagtaaggagaaagagtcatgccattgggaagtagcagaggatgcaaactcaggccttcaactctagagtctggatctaaaccggtgcttcaaaacctggtggggttttttaaagtccatttctacgcctcacagactaatactttatcaacctggctcaaatatcacagcattttcacattgctatacaagtttcttttctttttcttttttctttttttttttttgagacagagtcttgctctgtcgccaggctggggtgtagtggtgcgatctcagctcaccgcaacctccaactcccgggttcaaatgattctcctgcctcagcctccgagtagctgggactacaggcatgcaccaccgcaccgggctg

SEQ ID NO: 27190 - DNA, 438 bp, Homo sapiens
tctctccctccatctgcctcccattatagattgtatgttcttgtttttctacatgtgtggtaattttttgttggatgctagacatggtgaattttatgttgttggatgctggattttgttgtcttcctttaaatagtttgtgctttgtcctggggcatggttacttggaatgagttcagtccttctgaggctcactcttctgctatgttagggcaggtgtagagcagcatgtagtgagcactcattcggccctgctcccggggcaaggccttctgaggattttttcagtcctgctcctgtggtgatgcctttttaagattctccgaatgctgtgtgctttaggaggtctcaccaccgaacacacacagcattaataaactaggtaataatcacctcataatctatctggtgggaacacagatgattcctggccctggg

SEQ ID NO: 27191 - DNA, 813 bp, Homo sapiens
gatcatagtgcatggcttatagagcagttttgaggatttcatgaacaaaaaaacaaaggtaaagcacttagccttctgcctggcatgagtaaaccctcaggaaactgtagttattatttagtagccaggaaaatacagaacacttaatctgttggctccctggtgtttctcgaactgtcagcaaacacttccacatcaccagccagcagagccattcatcaaacacctttgcctttgtctgtcaggcctcccacttcaacaagtgtccctgggtttaagtcagtaacctcctaggcacggaaagttgcctcacgcatgtgacatgcgagcacgtctctaaaggggcagaggatctggcaaaaacatagactcgcaacttgtctgtttcctgagacacccacaattggcctcgtggaagtggttgacttcttcccatagctgcctgtgtcttacttcatcgcctcctccaagcccagggccagccctgcctggctgggggatcatgacagtctttgttcccatatgggcaaagtcttttgaaaagagggaaagatcattagttagctgtcagcctccagcgtggttaggtcatgagtaattcttctagagagccagagcactggcaattcatttggtcgagaacgttttatctacttgaacggcgtagcgaggaaataaatggaacaagttatatcaaaatctctgtcaactgaacaattccttaccaatccaacaaggagtatgacgacgatgccacttttcctacctttgagaggtcatgcacagacaccgcacatgcacacaccacattat

SEQ ID NO: 27192 - DNA, 1800 bp, Homo sapiens
cagtgagccgaaatcgcgccactgcactccagcctgggtgacagagcaagattccgtgggcttggtggaggggcaggattccgggcaggagccttgcctctcaggtggcgggctctgcgaccctgtgagatggacgggacggaaggcagtgtcgggcagcccggccccactgagcggtcccaccgaagcagcgtgtcctccgtgggagcccgagcggctgacgtgctggtatacctggcagatgacacggtggtgcccctggctgtggagaacctgccctcgctccgtgcccatgagctgcactgcgccgtccgcgaggtcctgaagcttccggacatcgccctggatgtcttcgcgctctggctggtctcccctctgctggaggtgcagctgaaacccaagaaccagccctacaagctgggacgccagtggccggagctgctgctgcgcttcaccagtgccccggacgacgacgtggccatggatgagcctttcctgcagttccgaaggaacgtgttcttcccaaaggggcgggagctccagatccccgacgaggaggtcctgcggctgctctatgaggaggccaagggcaacgtgctggctgcacggtacctgtgcgacgttgaggactgcgaggctctgggcgccctggtgtgccgcgtgcagctcgtgacctaccagcccgactggccggcagcctgcgacctgagggagaagctggactccttcctccctgcccacctctgtaagcggggccagggtctctttgctgccctccggggccgtggggccagggccgggccgggtgagcagagcctgctgaacgcctaccgcaaggtgcaggaggtcagcagcgacggcgggtgtgaggccgccctgggcacccactaccgcgcctacctcctcaagtgccacaagctgcccttctatgggtgtgccttcttccacggtgaggttgacaagccagcccaaggctttttgcaccggggtgggcgcaaatcagtttctgtggccatcagcctggaaggtgtgcacgtcgtggacagcagagagaagcacgtcctgctgggcctgtgcttccaggagctgtcgtgggaccacacctcccctgaggaggaggagcccatcctgtggctggagttcgacagggacagcggggtcacacctgtcaacaagctcctcaagatctactccaagcaggccgaactgatgagcagcctcattgagtactgcatcgaactgagccaggcggcggagcccgcaggcccccaggacagtgcaactggctcgccctcagacctcagctcctcgccagctcctgttcagcgccccaagctgcggaggcagggcagtgtggtgtccagccggatccagcatctctccaccatcgcctatgtggaggacggcaaggggatcaggcgagtgaagacgaagagcaccacgtccttcttcagccagcagctgtccttgggccaggggagctacaccgtggtgcagcccagcgacagcctggagcagggctgaggacgctgcaccccgcaggaggagggcaactgggggccctggcccggcattgtcctcctgaggagcaggggctggctaacagtctcatgggtcaccacatggggagggctgcctcagcagatttctcagaccacggagaagtgacttttgcgcccggggccatgcccgggctgtgcaaagctggccagggcctcccacagggcccctctgcagcctgccctcccttccccccctttccccggatgctgggccctgctgctatctcaggaccatccg

SEQ ID NO: 27193 - DNA, 486 bp, Homo sapiens
acctagccattgacgcaggaaacaggtgcaaagatgcatgactcaagcctgtacctcctcattatgggatatttccaaccaaagggctgtctgtactcaggcctctatacccccatacccctaccccatacccaggctgttcccttcttcgtccccctttagcctcttgtcttccctatttctttcaatgcccttgacttcccagcctactcacaatcatgggcactgaattgcagagtctaaaaaccaatggctttggaaggggaacattatagtgatgttgaaaaatacattcgtttgcattcctagtgggccccagagtggcttaatccttaaacctcccagaagcatgcattctggaattgatgcttcttgacccaggcagaaggaaagctagccagatgagtcatgtgggcataggggtgttcccaacctccaaagccctggttccctggctttggacttctctccacccccaaggcccct

SEQ ID NO: 27194 - DNA, 95 bp, Homo sapiens
cccctgaagtttggcaagtgaagtgaagtgaaaacgggtttgggtcccagggaacgcacagtgaacttaataaatttggtcgacgtgcactttta

SEQ ID NO: 27195 - DNA, 356 bp, Homo sapiens
tggtgctcatattggtgtagtgaaggaaaaaataatttttcctctactcttgtgagttctcagctgggagccctgtaacaaaacataggttaacaagagaaaaacaaatggaagtttattaacatgcatatttcatatatacatgggagaaaattcagggaaagagtaattctcaaaaagatttcttagaactctggcttatatagcatcttcaacaaagaacagtacacttttagagaagtgacaagacaaaggaaaaagaccttcagtctttagcgatggcgaattgtaggaaggcaaatacatggggaactaatggcagataaaggctagttagtgcagtttgttatgtagat

SEQ ID NO: 27196 - DNA, 396 bp, Homo sapiens
ataggcatgccacttccaagagttctggaaaagccctggggctcccatgaattgtgtcccctgagctgattatgccaggaagtgaggaagctccctcatattgatgaggacagagccgtcacttttgagaggtgatgggtgtgttcattacccttgactcttggagcctaggggcatggtcagcctcacctgcaggatgggtgggatgcagagggtaagccagcctgcaggaagagccactgctcagacaatagtgggctcatgcctgcaatcccaacagtgtgggaagcttaggggaggcttgcttgaagccaggtgttcgaggttacagtgattgtgccatgcactgcagcctgggtggagtgacattgggataaacaattatattttagatac

SEQ ID NO: 27197 - DNA, 499 bp, Homo sapiens
atcttggatatgccactaaccaccagttctatgaccctgggttagttatttaatttctattattcgatttcctcatctgtaaaatgggtataatcatccttactgcttcctgagtggtcaggtggataaaatgagacatcactccatatgcaaaagtctagccagtgcttggcacagagaaggaactgattaaatgtgagttcttgtccctttccctagtgcaccataatgtaatgtgatatttcaaattttaatttaggcaattacttaagtagtaattgctattagtatttacatagctgctttgatccaagaagctcaaagggctttactaaatttagcattttaatagatgtttcatttgcattctgttgattctgtttacccacaccaaaacctggaattttctaaagcaagacaattagacagggaaacaagacagtatcttcatatgtaccggtatcccaggcctgagttttgtctgtttccctaagaagtc

SEQ ID NO: 27198 - DNA, 342 bp, Homo sapiens
tcagtccagcattagatctatctgattccaatttaacacaggcagcctggcagagctttcttcgtgggccccttgaaagtgggctctgctcccctccctttcctggaatgggagcttgtaaaataaagaagaatggatgggctactgtcaaagacaatccttgttcaaagctgtaagaatattttcatttccattaaagccaagaatttttcctaccctttcagtcctttagatagcagtattgtggagtgacattgtcagggtctgcacacagctcaagccacagtgaatgggccaggctgaggactccagagggaaggggtgaaagggactgactgcagg

SEQ ID NO: 27199 - DNA, 972 bp, Homo sapiens
gaaagtttattcagctgcttctttggttttggaaactgcatttgagctttgaatattttaagccctgaaaaaatattttaagcctttttatcacctaaggtcaagtctacttatttcattccttgcagagaccagggattctttgagacttgcagtgaaggtggctcaacacatttttcctaggggagaggggagtcaccctactaatgactttcattcctacatttaatgattttaaaattgttttgtgatcactgctttagttctgacttatgcagattgaaattttcatgaatttattttccttttctgcatataccctagtaatgcatggtccttatgcaattagtatatgccaaggcttgcaggagcatttttattttatgaaatgaaatttaaatttaaaaaaaattttgatcttaaattacatcttataaattttacttatcaaaaataagaaaactcaaattgctcccttttcgatcacatagatgcttcaggtgtatttcttacagacagattcaaaatactggtggccttagttccaaaataccaaaagaaggatttttttcaataataagttatagcttttgatttattacatttttaggtatctttcttatagccagtcttaaattacaatgtaagtgatagtttttggttaaaaattgttttgttaaaacttttatgaggataactttaaactgagaagaccaatatctaaaagttggagaattataactttctatttggttaataaaactatagttttgtgactatatcttaggcaatatcctttttaatttcattttccagagttaccaattaatctttaactgctaaagaagttggcttgctgtacgtgaatataaactaatgcaagtggattgctaaaagccacttcagtactcagattgctttgggattaagtgacaatacagtttttaaagtaccaggttttctgttgacata

SEQ ID NO: 27200 - DNA, 209 bp, Homo sapiens
taatagtgagttttatgggttctatgcatagttttaaaatcaaaaatctaaagtatttctgtctccttctatctttatgtgcacatgtatatgttctatgttgtatcacatatatgtatatgtccatacctatgtttatatattgtttatacatggtatcaaattaatgcaaaaataaatgagtactcatcaattaagtaaataatccc

SEQ ID NO: 27201 - DNA, 476 bp, Homo sapiens
ggcctttctttcctttatctgttatcccaaagtcacatttccagccctgtttccaaaccaaaccccatgcttggactactctttctcgaggccaattttttctcttcctctcattatttgaacaactcctgagaattcatttccttgaagaaaaacatttagcaaattccacatcataaattaccatgaccctcacatacctgtgtaccagccactcaccggatccctgggctacagaagtgatgattcagccctttgtcctgaatgagctcatggtcttacatggaaggaaaggcatgcagaaggaggttgaccttgcctttctctggcatacactcacattcatttccttgatgctcttgcttccccactatactgtaagcttctcaaggacaaggattttatctgttttgtttaccactgtataatttgtaccttaaaagagtatcctcagtaaacatttgacgaacaaatga

SEQ ID NO: 27202 - DNA, 1415 bp, Homo sapiens
  misc_feature (1154)..(1159): n is a, c, g, or t
  misc_feature (1161)..(1161): n is a, c, g, or t
  misc_feature (1182)..(1184): n is a, c, g, or t
  misc_feature (1199)..(1200): n is a, c, g, or t
  misc_feature (1203)..(1203): n is a, c, g, or t
  misc_feature (1206)..(1210): n is a, c, g, or t
  misc_feature (1231)..(1233): n is a, c, g, or t
  misc_feature (1236)..(1237): n is a, c, g, or t
  misc_feature (1239)..(1239): n is a, c, g, or t
  misc_feature (1251)..(1251): n is a, c, g, or t
  misc_feature (1281)..(1282): n is a, c, g, or t
  misc_feature (1285)..(1285): n is a, c, g, or t
  misc_feature (1294)..(1295): n is a, c, g, or t
  misc_feature (1298)..(1298): n is a, c, g, or t
  misc_feature (1301)..(1303): n is a, c, g, or t
  misc_feature (1310)..(1310): n is a, c, g, or t
  misc_feature (1319)..(1319): n is a, c, g, or t
  misc_feature (1370)..(1370): n is a, c, g, or t
attcactgtttcctagcaaccaggaaaaagcatgtgttcctgatgtctgtgagcaccagtctgagatgcgcggatgcttcagcatgcctccagaagcagagaaagaacaaaagcactggaaccggtctccggttgcctctagactcagagaagctgggtctaagtgtagtgttagctgcagatacctgctcagctggctaagcctttaacatggaaagaaggctcataaagaaggaaatgaaaaagctcttgggagattatattggcatcagacttcgggaaaatgaatttgacccaaaaggaagacggcaactcacctttctagatgatatggcacactatgacttggccatcagtgttgctttgcaatggctggatccctcagaagacttaacttggctggagtgggaggaactgaaaataccactccatggcagacccatatatccaaatcgtagagaacgagaagctatgattttatcatcttatgctggaatcttaatgaacagtatcccgattgaggaagtctttaaaatttatggggctgattcttctgccgattctggtaccatcaaggttccccgagtttcatctctccgcctctccttgcacccctttgccatgttaacagcacccaaagcagcagcatacgcccgcaaacagggtcacttagaaaattggaattgtaccatggaacttcataatagattctctgggagcagacgagaagcatcatcttaaaaccacagctcttgccagtacatttttctttacaactgtttttggtacaactgcactgaagtgttatttttgatgttgagctttcttcttttagaagcatattgcatggctacattttcttaaaaaaaaaaaactgtgaccttatgctacttcattgtgactggaagactgctggagaattcagaaagtatatagtatttctgtgttagagcaagctggctttgtagcacattttacaaatgtgtggcattgaatattgcacagtgatggagtgggaggcagatttccaaagagttaatccaaaataaaattaatctgtcattgattgcctttactgtgttctcatatgaaaagaatgtttaaatcatttcaataaagcattaaaaaaatgaaaaaaaaaaaaaaaaaaaaannnnnngnggggggggggttttttttttnnnaaaaaaaaaaaaaannttnttnnnnnaaaaaaaaaaaaaaaaaaaannnaanntnaaaatttttatnaaaattaattttttttttttaaaaaagttnnttnatttttttnnatnttnnntgaaaantttttattntttttttttttttttttttttttttaatttttttagggtaattttttattnttttttttttaattaaattttttttttttttttttattttttaaa

SEQ ID NO: 27203 - DNA, 1529 bp, Homo sapiens
  misc_feature (1268)..(1273): n is a, c, g, or t
  misc_feature (1275)..(1275): n is a, c, g, or t
  misc_feature (1296)..(1298): n is a, c, g, or t
  misc_feature (1313)..(1314): n is a, c, g, or t
  misc_feature (1317)..(1317): n is a, c, g, or t
  misc_feature (1320)..(1324): n is a, c, g, or t
  misc_feature (1345)..(1347): n is a, c, g, or t
  misc_feature (1350)..(1351): n is a, c, g, or t
  misc_feature (1353)..(1353): n is a, c, g, or t
  misc_feature (1365)..(1365): n is a, c, g, or t
  misc_feature (1395)..(1396): n is a, c, g, or t
  misc_feature (1399)..(1399): n is a, c, g, or t
  misc_feature (1408)..(1409): n is a, c, g, or t
  misc_feature (1412)..(1412): n is a, c, g, or t
  misc_feature (1415)..(1417): n is a, c, g, or t
  misc_feature (1424)..(1424): n is a, c, g, or t
  misc_feature (1433)..(1433): n is a, c, g, or t
  misc_feature (1484)..(1484): n is a, c, g, or t
attcactgtttcctagcaaccaggaaaaagcatgtgttcctgatgtctgtgagcaccagtctgagatgcgcggatgcttcagcatgcctccagaagcagagaaagaacaaaagcactggaaccggtctccggttgcctctagactcagagaagctgggtctaagtgtagtgttagctgcagatacctgctcagctggctaagcctttaacatggaaagaaggctcataaagaaggaaatgaaaaagctcttgggagattatattggcatcagacttcgggaaaatgaatttgacccaaaaggaagacggcaactcacctttctagatgatatggcacactatgacttggccatcagtgttgctttgcaatggctggatccctcagaagacttaacttggctggagtgggaggaactgaaaataccactccatggcagacccatatatccaaatcgtagagaacgagaagctatgattttatcatcttatgctggaatcttaatgaacagtatcccgattgaggaagtctttaaaatttatggggctgattcttctgccgattctggtaccatcaaggttccccgagtttcatctctccgcctctccttgcacccctttgccatgttaacagcacccaaagcagcagcatacgcccgcaaacaggtagagacggggtttcaccgtggtctcgatctcctgacctcgcgatccgcccgccttggcctcccaaagcgctgggattacaggcttgagccaccgcgcccggcccaactcttgggtcacttagaaaattggaattgtaccatggaacttcataatagattctctgggagcagacgagaagcatcatcttaaaaccacagctcttgccagtacatttttctttacaactgtttttggtacaactgcactgaagtgttatttttgatgttgagctttcttcttttagaagcatattgcatggctacattttcttaaaaaaaaaaaactgtgaccttatgctacttcattgtgactggaagactgctggagaattcagaaagtatatagtatttctgtgttagagcaagctggctttgtagcacattttacaaatgtgtggcattgaatattgcacagtgatggagtgggaggcagatttccaaagagttaatccaaaataaaattaatctgtcattgattgcctttactgtgttctcatatgaaaagaatgtttaaatcatttcaataaagcattaaaaaaatgaaaaaaaaaaaaaaaaaaaaannnnnngnggggggggggttttttttttnnnaaaaaaaaaaaaaannttnttnnnnnaaaaaaaaaaaaaaaaaaaannnaanntnaaaatttttatnaaaattaattttttttttttaaaaaagttnnttnatttttttnnatnttnnntgaaaantttttattntttttttttttttttttttttttttaatttttttagggtaattttttattnttttttttttaattaaattttttttttttttttttattttttaaa

SEQ ID NO: 27204 - DNA, 1534 bp, Homo sapiens
  misc_feature (1273)..(1278): n is a, c, g, or t
  misc_feature (1280)..(1280): n is a, c, g, or t
  misc_feature (1301)..(1303): n is a, c, g, or t
  misc_feature (1318)..(1319): n is a, c, g, or t
  misc_feature (1322)..(1322): n is a, c, g, or t
  misc_feature (1325)..(1329): n is a, c, g, or t
  misc_feature (1350)..(1352): n is a, c, g, or t
  misc_feature (1355)..(1356): n is a, c, g, or t
  misc_feature (1358)..(1358): n is a, c, g, or t
  misc_feature (1370)..(1370): n is a, c, g, or t
  misc_feature (1400)..(1401): n is a, c, g, or t
  misc_feature (1404)..(1404): n is a, c, g, or t
  misc_feature (1413)..(1414): n is a, c, g, or t
  misc_feature (1417)..(1417): n is a, c, g, or t
  misc_feature (1420)..(1422): n is a, c, g, or t
  misc_feature (1429)..(1429): n is a, c, g, or t
  misc_feature (1438)..(1438): n is a, c, g, or t
  misc_feature (1489)..(1489): n is a, c, g, or t
attcactgtttcctagcaaccaggaaaaagcatgtgttcctgatgtctgtgagcaccagtctgagatgcgcggatgcttcagcatgcctccagaagcagagaaagaacaaaagcactggaaccggtctccggttgcctctagactcagagaagctgggtctaagtgtagtgttagctgcagatacctgctcagctggctaagcctttaacatggaaagaaggctcataaagaaggaaatgaaaaagctcttgggagattatattggcatcagacttcgggaaaatgaatttgacccaaaaggaagacggcaactcacctttctagatgatatggcacactatgacttggccatcagtgttgctttgcaatggctggatccctcagaagacttaacttggctggagtgggaggaactgaaaataccactccatggcagacccatatatccaaatcgtagagaacgagaagctatgattttatcatcttatgctggaatcttaatgaacagtatcccgattgaggaagtctttaaaatttatggggctgattcttctgccgattctggtaccatcaaggttccccgagtttcatctctccgcctctccttgcacccctttgccatgttaacagcacccaaagcagcagcatacgcccgcaaacagggtgtcaagtcaagaaaggtaacaacaaataaaaatgccaccagcatctctgcaaaggaagcaaatgccacagaatggaaatcatcacaaaggttttcagacacacagccaaagcacaaagtcacttagaaaattggaattgtaccatggaacttcataatagattctctgggagcagacgagaagcatcatcttaaaaccacagctcttgccagtacatttttctttacaactgtttttggtacaactgcactgaagtgttatttttgatgttgagctttcttcttttagaagcatattgcatggctacattttcttaaaaaaaaaaaactgtgaccttatgctacttcattgtgactggaagactgctggagaattcagaaagtatatagtatttctgtgttagagcaagctggctttgtagcacattttacaaatgtgtggcattgaatattgcacagtgatggagtgggaggcagatttccaaagagttaatccaaaataaaattaatctgtcattgattgcctttactgtgttctcatatgaaaagaatgtttaaatcatttcaataaagcattaaaaaaatgaaaaaaaaaaaaaaaaaaaaannnnnngnggggggggggttttttttttnnnaaaaaaaaaaaaaannttnttnnnnnaaaaaaaaaaaaaaaaaaaannnaanntnaaaatttttatnaaaattaattttttttttttaaaaaagttnnttnatttttttnnatnttnnntgaaaantttttattntttttttttttttttttttttttttaatttttttagggtaattttttattnttttttttttaattaaattttttttttttttttttattttttaaa

SEQ ID NO: 27205 - DNA, 1613 bp, Homo sapiens
  misc_feature (1352)..(1357): n is a, c, g, or t
  misc_feature (1359)..(1359): n is a, c, g, or t
  misc_feature (1380)..(1382): n is a, c, g, or t
  misc_feature (1397)..(1398): n is a, c, g, or t
  misc_feature (1401)..(1401): n is a, c, g, or t
  misc_feature (1404)..(1408): n is a, c, g, or t
  misc_feature (1429)..(1431): n is a, c, g, or t
  misc_feature (1434)..(1435): n is a, c, g, or t
  misc_feature (1437)..(1437): n is a, c, g, or t
  misc_feature (1449)..(1449): n is a, c, g, or t
  misc_feature (1479)..(1480): n is a, c, g, or t
  misc_feature (1483)..(1483): n is a, c, g, or t
  misc_feature (1492)..(1493): n is a, c, g, or t
  misc_feature (1496)..(1496): n is a, c, g, or t
  misc_feature (1499)..(1501): n is a, c, g, or t
  misc_feature (1508)..(1508): n is a, c, g, or t
  misc_feature (1517)..(1517): n is a, c, g, or t
  misc_feature (1568)..(1568): n is a, c, g, or t
attcactgtttcctagcaaccaggaaaaagcatgtgttcctgatgtctgtgagcaccagtctgagatgcgcggatgcttcagcatgcctccagaagcagagaaagaacaaaagcactggaaccggtctccggttggtgagcgattctcaaaggggaatttgttaagagcaggcacttaatagaacagcccgagagacctgtaccacgattgcagcctctagactcagagaagctgggtctaagtgtagtgttagctgcagatacctgctcagctggctaagcctttaacatggaaagaaggctcataaagaaggaaatgaaaaagctcttgggagattatattggcatcagacttcgggaaaatgaatttgacccaaaaggaagacggcaactcacctttctagatgatatggcacactatgacttggccatcagtgttgctttgcaatggctggatccctcagaagacttaacttggctggagtgggaggaactgaaaataccactccatggcagacccatatatccaaatcgtagagaacgagaagctatgattttatcatcttatgctggaatcttaatgaacagtatcccgattgaggaagtctttaaaatttatggggctgattcttctgccgattctggtaccatcaaggttccccgagtttcatctctccgcctctccttgcacccctttgccatgttaacagcacccaaagcagcagcatacgcccgcaaacagggtgtcaagtcaagaaaggtaacaacaaataaaaatgccaccagcatctctgcaaaggaagcaaatgccacagaatggaaatcatcacaaaggttttcagacacacagccaaagcacaaagtcacttagaaaattggaattgtaccatggaacttcataatagattctctgggagcagacgagaagcatcatcttaaaaccacagctcttgccagtacatttttctttacaactgtttttggtacaactgcactgaagtgttatttttgatgttgagctttcttcttttagaagcatattgcatggctacattttcttaaaaaaaaaaaactgtgaccttatgctacttcattgtgactggaagactgctggagaattcagaaagtatatagtatttctgtgttagagcaagctggctttgtagcacattttacaaatgtgtggcattgaatattgcacagtgatggagtgggaggcagatttccaaagagttaatccaaaataaaattaatctgtcattgattgcctttactgtgttctcatatgaaaagaatgtttaaatcatttcaataaagcattaaaaaaatgaaaaaaaaaaaaaaaaaaaaannnnnngnggggggggggttttttttttnnnaaaaaaaaaaaaaannttnttnnnnnaaaaaaaaaaaaaaaaaaaannnaanntnaaaatttttatnaaaattaattttttttttttaaaaaagttnnttnatttttttnnatnttnnntgaaaantttttattntttttttttttttttttttttttttaatttttttagggtaattttttattnttttttttttaattaaattttttttttttttttttattttttaaa

SEQ ID NO: 27206 - DNA, 1242 bp, Homo sapiens
tgcagccctatatgcctgaaatgcctcccccaggtccctcgctgtaactggctgacatctactcaactgaaaaggctcatcttgaggattactctccaggaagcattctgttatcccctcaggccaggagctgaaatttactggaatcattttaagaagagaagaaacagtgactcatcctcctggaaagaaatttcaagggataaagcaccatggatctaacttatattcccgaagacctatccagttgtccaaaatttgtaaataaatcctgtcctcccaccaaccgctcttttcatgtccaggtgataatgtattcggttatgactggagccatgattatcactattcggaaacttggttataatggtttccatatcgcatttcaaacagcttcactctcccacaaactttctgatcctctccatggcaaccacggactttctgctgggttttgtcattatgccatacagcataatgcgatcagtggagagttgctggtactttggggatggcttttgtaaattccacacaagctttgacatgatgctcagactgacctccattttccacctctgttccattgctattgaccgattttatgccgtgtgttaccctttacattacacaaccaaaatgacgaactccaccataaagcaactgctggcattttgctggtcagttcctgctcttttttcttttggtttagttctatctgaggccgatgtttccggtatgcagagctataagatacttgttgcttgcttcaatttctgtgcccttactttcaacaaattctgggggacaatattgttcactacatgtttctttacccctggctccatcatggttggtatttatggcaaaatctttatcgtttccaaacagcatgctcgagtcatcagccatgtgcctgaaaacacaaagggggcagtgaaaaaacacctatccaagaaaaaggacaggaaagcagcgaagacactgggtatagtaatgggggtgtttctggcttgctggttgccttgttttcttgctgttctgattgacccatacctagactactccactcccatactaatattggatcttttagtgtggctccggtacttcaactctacttgcaaccctcttattcatggcttttttaatccatggtttcagaaagcattcaagtacatagtgtcaggaaaaatatttagctcccattcagaaactgcaaatttgtttcctgaagcacattaa

SEQ ID NO: 27207 - DNA, 329 bp, Homo sapiens
tgcagccctatatgcctgaaatgcctcccccaggtccctcgctgtaactggctgacatctactcaactgaaaaggctcatcttgaggattactctccaggaagcattctgttatcccctcaggccaggagctgaaatttactggaatcattttaagaagagaagaaacagtgactcatcctcctggaaagaaatttcaagggataaagcaccatggatctaacttatattcccgaagacctatccagttgtccaaaatttgtaaataaatcctgtaccggacgaagagtggatacggatagtagaggatgacatcgggcgggtggaccg

SEQ ID NO: 27208 - DNA, 1166 bp, Homo sapiens
ctcagtatcttaccagatgtactttgaagcatcagcaactaaaaatgataggagctgaaatttactggaatcattttaagaagagaagaaacagtgactcatcctcctggaaagaaatttcaagggataaagcaccatggatctaacttatattcccgaagacctatccagttgtccaaaatttgtaaataaatcctgtcctcccaccaaccgctcttttcatgtccaggtgataatgtattcggttatgactggagccatgattatcactattcggaaacttggttataatggtttccatatcgcatttcaaacagcttcactctcccacaaactttctgatcctctccatggcaaccacggactttctgctgggttttgtcattatgccatacagcataatgcgatcagtggagagttgctggtactttggggatggcttttgtaaattccacacaagctttgacatgatgctcagactgacctccattttccacctctgttccattgctattgaccgattttatgccgtgtgttaccctttacattacacaaccaaaatgacgaactccaccataaagcaactgctggcattttgctggtcagttcctgctcttttttcttttggtttagttctatctgaggccgatgtttccggtatgcagagctataagatacttgttgcttgcttcaatttctgtgcccttactttcaacaaattctgggggacaatattgttcactacatgtttctttacccctggctccatcatggttggtatttatggcaaaatctttatcgtttccaaacagcatgctcgagtcatcagccatgtgcctgaaaacacaaagggggcagtgaaaaaacacctatccaagaaaaaggacaggaaagcagcgaagacactgggtatagtaatgggggtgtttctggcttgctggttgccttgttttcttgctgttctgattgacccatacctagactactccactcccatactaatattggatcttttagtgtggctccggtacttcaactctacttgcaaccctcttattcatggcttttttaatccatggtttcagaaagcattcaagtacatagtgtcaggaaaaatatttagctcccattcagaaactgcaaatttgtttcctgaagcacattaa

SEQ ID NO: 27209 - DNA, 380 bp, Homo sapiens
cacagacaaccacaggtaagaactggcattatgtgaggtcgtgaaactgctcagcctcaacaatttctccttgtcactacatagggtcccagtgcacagggcttgggcctttgtcttagtcccttttcctaagtcatgagtggatccctggcctgcacattgttcctttatcactgtccttatgacatttctgttttctgtgctgccttgttccagcctgtccctctgtacaggaaatggaattttgtcttatgagtcatcttggtgtttgagccttttctcctacgggaacacttcccagtgctaaccgttggtctgcctcactcctgagcaatcagccagttcctgaatttctctgtgttctgaattgccccttagat

SEQ ID NO: 27210 - DNA, 551 bp, Homo sapiens
  misc_feature (214)..(214): n is a, c, g, or t
accataataggaatttccatacctcctattgggaaagacagttatcccctgtaagagataattccatgcaattatccataatagtatttccataacactattatgaaaaatagtagagttcctataaatcaaaaactattttaaaataaaaaaaaaatttttaaatgtttaatgtccccctaacaggtggagagaaggtgaaaaagaccaaganaccctcaaggtttcaggttctagtaatgacgagaactctgctcaggaacggaaggctggctttgtaccgcacagctctaccccatcaacaggaggccaaagactcaccatgcctctggtctgttccactgaccttccttttctacttgctgcttatccacaaaagcagaacatttcattcactagtcaagcccttgtctccgactcttgagttatcagatgggctgttgttgagccaacttttattggaagatgctacagatgaaaagacaagaccttcactaagggtcccttccaaaggtaaaagtgaaaagattcaaaataactcaaagggttta

SEQ ID NO: 27211 - DNA, 511 bp, Homo sapiens
agttcatccaaaacagttaaacaattaaagcagcaagtacctagtgcgacaggctctgctgggagcagaatgaagacagtctaaccaaaattgtaactctccctttcagaactccctaatcatttaaaaggtaggctcttgagcaaattgcttagtctttctctacttcagtttcctcatctataaaacaggtagggtaatagtgcttatctcatctacggtttgtaagcattaagccagttcatgtaaaatgtattagcagtgcctggcatggagtgagcactcaataaatgttagttttaatcagcatgggtaatatggcaagacccagtctcttaaaaaaaaaaaaacaaaactttaaaaattagctgaacgtggtggggcatacccatggtcctagatacttgggaggctcaggtggtaagatcgcttaagcccaagaggtggaggctgcagtgagccatgttcataccactgtactccagcttgggtgacagagtgaaaccctatc

SEQ ID NO: 27212 - DNA, 964 bp, Homo sapiens
tgcttttttcacttaatgttatcttggtaaatgtttatgtgctttgctgtaactgcagaaccaaaaatcaactgtttttggcacagtggttaagacaaagaaaggttttcatggggttatatttcagaagaggagacaggacagataatgaataagtaatatgatttcatacagtcatgagtacaatggaaaaataatgagatcagggatagacagtgattcagagatactttatgtaaatggctgtctgtaaaggaaacgtttgtgcaaagactgaacaaagtaaggaagtgagtctatgaaagatggtgaaggatgtttaagacagaacagcaagtgagaagtctctggaattaggaatcagccttttagagtgacaaaagaaagaaactttgggttgtagcagcataatgggaattgaagttagggggtaagggaggagccacagtataaaggaatgtctaggcaagtagtcagcaaactatgtcccatggagccaaatttagcccatgacctgcaaggtaaggatgatttttaaatttaagaggttgtaattaagagggaaaaaaatgacaacaaaggtcttcatgtggcccataaagcttaaaatatttactgtttgaccttttgtagaaaaagtagattaagttttattgcagcaatctgaatgagagtatagtgtggtctgtgtgtgtcaaacaggctgtagtggggtttggcacaatggaagtcaggaaaccaagtacagcctatttcattaaccctggtaagagatcagagatcatggcttggttgagagaaatgaaagcagtgagaaatgattagattaagagtaaatttttaaagttggtgtcaataagaactgctgagcaattgaattgcatatgccagaacacatggactattctccatttttagtttcaaaaggaatgtttacctatcatttttaaatctgtaggcatct

SEQ ID NO: 27213 - DNA, 371 bp, Homo sapiens
acacatgggtatcattaagtgtgcattttctatttagacagggacattgaaacagttcagaaacatctgtcaccagcatgatgtgttgagaagcaaaggaaatggaaatgggtgtctgttttctcaaaagcattagaatctgtaaacataaacatcctttttaaagatctgccaatttagaatgagtttatgggcttaatgcaatttttaaaaacggtgacggcctacataatcatgttaaactagaatattttccaaattttcagaggaaaaaaaaaacccatattatgtgtttatttatagccttatctcagtcttggaggaaaaaacatattgtagcatgtttcattttgcagagattggggtaatct

SEQ ID NO: 27214 - DNA, 616 bp, Homo sapiens
tcttccctgactaggcaaagatattttacctttgaagtaggttttaattgtttccattttataaaacctataaattgagggtcagagaaattaaataatgcaaaacacccagctagctaatgaggtataaagttttaaagtatattgttggttctaaagctacctggtttagatggttataaatagtgctattacaatagaaaaaatataactttcacatgaaaggtagttaattaaagatatgtttaagattattaagatgcttttattttttatgtaatgaatatggctataaaaggtataaatataatcatatgcaaagctaaaaagagttaagattttacttgagggaatagttttattttaaaagtctgttgaaggttaagacattctatagtcaaccatctaccttgttgaacttgcctagattccctttcatttaagtttattcatatataataggtgctatataaagtttattcatgtggagagctgggcacagaggctgacgcctgtaatcgcagccacttgggagtctcagccaggaggatcacttgaggttaggagttcaagatagcaagggcaacttagcaagaccctgtctcataaagattaa

SEQ ID NO: 27215 - DNA, 367 bp, Homo sapiens
ggaaacaaaaagaacatactgaaaacctgaaaactagaaaatacaataaaagaacaaggaagtcaatggatagatttaatagcagataaatcacagatgaagagagtatcaatgaactggaagatcagttcagagaataaccaggatgaatcactgaagagatagacaaacaaaaaatacaaatgaggggaaagtgacattaaagacacaatgagaaagctgatatgcaagtacctgtagttatagaaagaatgaaaaaagggaaaagagaatgtactatttgtatagttaagggctgagaagtttccaaatgtgatgaataacatcaggccacaaattcaagaagtgccaaataggataaaaacaa

SEQ ID NO: 27216 - DNA, 648 bp, Homo sapiens
ctgtaggattagagcatggagcggttaactggagaagagactggtaaagctgaccagcgttagcctctaaaggaccatatgtgccaagtttaaacaattctgtaggtgtcaggaacaagcagaagaatgtgtgagatttggcaaggggagtgggtcaggactctagagaatgtgtggtgaataaatactggctggagctagagctggtaaacagaaccctcagatggtaggatgttgtctctgggagttaagaatcagacctggtttgggagcagattaacctaccatgcacctaggcacttttccaagtgctggagtacagtggtgaattactgctcccatggagctttcatccagaaagggtagacagatgaaacaacatacaggcacaaaagggcacatacacactctcaaaaccagaatgccgcgttgcagataaaatgttccaaggcagcactctccaagttaagcgttcagagcagtctggtgtctgcactgaatatttccctacaatatcgcagggaaccttcttatagtccgcatctcaggcatttactgcgaagtttttacaagtaaaatgacgaatacagtatttgttcttgatgtatataatactgaatgcactctacaaaaagtgtttcaaataag

SEQ ID NO: 27217 - DNA, 528 bp, Homo sapiens
aataatgtttgaagtgattaatctgctcattaccctgatttaattatgatacaatgcaatacatatactgacacatcaaattgtgtcccataaatatatgcaattatgtgtcaattaaaaataaaaataaagccaggcacagtggtgcatgcctgtagtcttggctactcaggaggctgaagttcgagagtcaattgagcccaggagtttgagtccagcctgagtaacatagtgagaccccaactctaaaaataaaataaataaaatcattttaaaatttaataaataaggagcagggcaagatgggcaaataggaacagttctggtctgcagctcccagcgagaccaatgcagaaggcaggatatttctgcatttccaactgagatacacagttcatctcaccggaactggttagagggaaagggcagcccactgagggtaggcagaagcagcgtggggtgtcacctcatctgggaagtgcaaggggctggggacctccctcccttagccaagggaagccctgaggg

SEQ ID NO: 27218 - DNA, 441 bp, Homo sapiens
caagctttccttaataagcctgtcaaatcttcttttattctagttgatggtagtgccacacttactggacaaaagccttaaagtcatgctttactcccattttctcatatctcagatgcttactgttaggaagtcctgttagtaccaccttttgggcatctaaaattgaaccacttctcatacctcctacctccattgctatcacctcagtccaagtcaccatcagtgcttcctaatcctacacccagttttaacccttgccccttataatatattctcaacatagtaatgagggagattttaaaatgtaaataagattatgacacttcaggccaggtgcggtggatcacacctgtaatcacagcactttcggaggccgaagcgggcggatcacaaggtcacgagttagagaccagcctggccgacatggtgaaaccccgt

SEQ ID NO: 27219 - DNA, 174 bp, Homo sapiens
cagtgtctacttataaacatgttttttgaactactgtttttgtgacaacatgcctttttcccagaaaatctcaggttaacattaaataggcactggatgtttatctgatcttgtttatagaaacacaagaaaattttaaccttgtatatactttactcaattaactaggtaaga

SEQ ID NO: 27220 - DNA, 267 bp, Homo sapiens
ctgtattttttgcacatatttgttgtgaacctaaaacttctctaaaaaaaaaacagagtccactttaaaaaattacaatgggaaacaatagataagctaaaatagtaaaataaaattaaccaataaaattaactgagttaaaatcattgagttttaaaacaatgtaatgtaatatgtaatgtaatgtaagtacattggaactaatgtaagtgacctaaattgtgttttatcgtggtatgaaatcaataaatatctgatattggtaaa

SEQ ID NO: 27221 - DNA, 350 bp, Homo sapiens
taaaaacatttctgtagagaatttaactggtattttaatagaagttttattatatctgtatatcagtttgtgtaatgctgatatttaacaatattaatcatgcctatttatgaattagaaatatctttttgtttgaatattatttattttctaactttttttagattctaatgtacagatctttcacctttttggttacattcatttctaagtatagttactgctgcaattattgtagatgggattggtttttggttttattttcagatactttattgttagtgtatagaaatgttactgaattttttatgttgattttgtgcaagtttaataaatttgtttattctaat

SEQ ID NO: 27222 - DNA, 1956 bp, Homo sapiens
ttaaaattcattagggttggaaggaatggagtaagagcacttttctgcagggatgaaccatgggggtgggcacctgcaccgagggtcccttgcctaccctaggccactgcacacctctatgccttgcagtggggaagcccatcgaggtacagaagacgctgcatccctcggaggaggaggtgaaccagctgcaccagcgttatatcaaagagctgtgcaacctcttcgaggcccacaaacttaagttcaacatccctgctgaccagcacttggagttctgctgagcccaaagggcagggccaacattagggagcccagcaggaggtgctgtgctgagaagacttcctggaggtgtttgttgaacatatctgcagagccttcccagactcctgcaaatccaacccatatcaggctgtaagtcagagcaggcaatgcagaagaggagaccagaccaaggggtcagctggggctaggacagtgagggctgctagaggggctgggcctctctttgcacatggacactgggcccctctctatattgagtggtctgttaacattcattggtggctgattccaaaagatgagagccaaagctgcacggactcgagtcctaggctgcacacctcacaagcatctcttctactgcattctgttggtcgaagcaagtcacaacccagcagattcaaggagtaaggaataggatccccctctggatgggaggagcagcaatgtcatattacaaaagggtgtggacacatgcagggattcttactgccgtctttgcaaacaatccaccaaaacttaaaaactaaaagcctgaagcacaagcactctccaccccaggcacacacaccctggaattccctgtgtgaccatggtaccaccactgtgtgtcccgaggatcccagctcagctttgcatcgctgccctatctccctctcgctctcccctgttgatccctcatgcacagccacagcgagctgtctaaaacacaaagctgaccgcgccatttcctactcagcatccttccatgaccctccattgctcctaggatagggtttggaccagtctgaatccagaggatcaggatccagcaggaaccagaggataatttgaggagggtttaaaaaggaaccattttttgaggtgtgtgcactgtttccaccctgaggcctggaaggatgaatggaagcagcagttcctgaaccaggaagactcatgtgtgggggccattgctggtcaaggggcacgaacaggtctggtgaccctgcaagggaggagccaggagcaagcattcccacttcaccttcctccattcagtctgctgccaagttccccactgcctgagcccaactagaagctggagggaaggagggcctgtggctgcagtccaggcatgtaggcctcctgggaaagggagaatggcaaagacaggcagagtggatctggaggggtcaacggaagacggaacatgtccacttccaggcccgagcttctcagcctgccgtttgccactctccagcatctggcccagcctgtccatcctcatctctcttcctcccttactccgtgctcccatcactcggaaccatttgcatttctttgtctcagctatattgtctcacctctgagtttttgcccatgatgttggatgccatggaatgccatatcctccccattatctcccccttgtctggataattcctactcatcctacaatactgattttatctgtgcaaagaagtcttccccagtgcctctggttgacaggggtttcctctggcttctccagactttctgttcctccaccacagcccttagcaccctggggaggaggtgttgctgtccaggtaaatgctgcgccaatgcccctgcctctagtgcactccctccagcctacccacaaacaggacctgcatcctgtctcacaaataaaactgaactcttgaaatggtg

SEQ ID NO: 27223 - DNA, 661 bp, Homo sapiens
aagagggttaggataggtggtgggaatagaggctgacagcagttttcagatgtccgtgtgttcatgcacgcagtatggcccaggtaagttcaaaaccttattcttaggctatttcgatcaaccctgccaggcaattttaaattcttggtgatgtagggcagggacactgtggatggctgaggaaactctgggctctgctggctaaccagcttcgctccactctgcagaggctgtctcatcttttgtgatctgcaaattcttgctttggtcttcatgtgaactctcagggaatttgagcagttcagtctgttaccagtgttgtgagcctacctggtcattttagctgttgcttttgtaacgtaggcttttggttgttcctcagttagaattgtgggactttcctgaaccttctgttcttgtttcttccttgaaagtaactgaatcctgggtattacacaggatttgccatagcggatcaagcaattggtctatcaagtatgctgtcttgtccccggcagtggctaatgctgcttcttcttgtcaggcaaacaggagatttcacaatttagcactgagatctaaagatgtaaccaggtctcctagtttacccttcagctttgacgcagactacctaatttcctaaggtcttagcatccacctg

SEQ ID NO: 27224 - DNA, 706 bp, Homo sapiens
ggccaatatacctgacaaacatagaagcaaatgtcctaaacaaaatactagcaaaccaagttcaacagtacattaaaaatgtcatccaccataatcaagtggaattcatcccaggatgcaggaatgatttattggaagtaaagcaatatatgtgatacaccacattaacagaaaaaaaggacaaaaccacatgatcatcctaacggatgcagaagaagcattcaacaaaattcaacacctcttcataataaaaactctcaacaaattttgtagacatacctcaacacaataatggcaatatatgacagacccacagctaacgtcgtactcagtggagaagcttttcctctaagatcaggaaaaaaacaagaattcccacttttactgcttctattcaacatgtgctagaattccccatcagagcaatttggcaagataaagaaataaaaagcacccaaattggaaaagatgaagtccaattatctttatttgcatataacatatcatatatagggaaaacccagatagctagattagatagatagatagatagatagatagatagatagataggtagatagataaatgatagatagataaatagagtctgttagaactaatacagaaattcagtaatgttgcaggttaaaaaatcaacacatgaaaatcagtaggtttttaatacattagtactgaactatctgaa

SEQ ID NO: 27225 - DNA, 1117 bp, Homo sapiens
cgtgacgcgtgggtcgacccacgcgtccggacaaggaggaggaggaggaggaggtctggctagctgtccctaacgtcatttcctggtctcaactcttttaagaccctgacatactctgagattggagtgaagatttctgtgacatgctggggtatctctgcattagccagattggacatatgtaaagggacatcagtatatctggatcatcagattgtgcttcaagaagaccatagggaagaacgcattttcatcttgctgcaaaagttgcaatagaagatctgaaggtttgaatgggccaatgagtatcctcatcattgaagcattctatggaggctcccataaacagctggtggatcttcttcaagaagagttaggagactgtgtcgtttatacccttcctgcaaagaaatggcattggagagcccggacatctgctttatatttctctcagaccattcccatcagtgagcattacaggaccctctttgcaagttcagtgcttaacctgaccgaactggctgcccttcggcctgaccttgggaaactgaaaaagattctgtattttcacgagaaccagttgatatatcctgtcaagaaatgtcaggagagggatttccaatatggatacaaccaaattctttcatgccttggcgagcatgaaagatggtagatattcacacatcaagatatataaatatgtgattcattttgttatctctgggggagaacatatagtagctcgattctgatccaagagaccaggttcagaaacacctaaaaaccatatgtaaacaataagttaccacaagtaccgaattgacacacattatcgcctcctaataacacccatataacaaatactgatacaaaaatggataatactcagaggaccaactaaaagagaaaagagagtagacctatcgaacataatgccacgaattggatgacgtggatacaacatgggacaccgcagatgaaagcagataaaatgagagagtgagagaggataaactacgagaatacaatcggatctattaggtacgactagaacacagcaactaggtgcacccgctacggcagcagcaccgaacgatcccgaacgacctactaaata

SEQ ID NO: 27226 - DNA, 880 bp, Homo sapiens
  misc_feature (847)..(847): n is a, c, g, or t
gcggccgcgggggaggggcacggcgtcagcgcgtcgccggctgggccgcgccggtggccaggagggagagacaaggaggaggaggaggaggagatctctgcattagccagattggacatatgtgaagggacatcagtatatctggatcatcggtatctctgcattagccagattggacatatgtaaagggacatcagtatatctggatcatcagattgtgcttcaagaagaccatagggaagaacgcattttcatcttgctgcaaaagttgcaatagaagatctgaaggtttgaatgggccaatgagtatcctcatcattgaagcattctatggaggctcccataaacagctggtggatcttcttcaagaagagttaggagactgtgtcgtttatacccttcctgcaaagaaatggcattggagagcccggacatctgctttatatttctctcagaccattcccatcagtgagcattacaggaccctctttgcaagttcagtgcttaacctgaccgaactggctgcccttcggcctgaccttgggaaactgaaaaagattctgtattttcacgagaaccagttgatatatcctgtcaagaaatgtcaggagagggatttccaatatggatacaaccaaattctttcatgcctggtggctgatgtggttgtattcaactcagtttttaatatggaatcatttctcacttccatgggaaaatttatgaagctgattcctgatcacagacccaaggatctggaaagcatcatcagacccaagtgccaagttatttactttcccatcaggtttcctgatgtgagcagattcatgcccaagcacaaaacaanccatttaaagaagatgtcggcttaaaggacatg

SEQ ID NO: 27227 - DNA, 822 bp, Homo sapiens
  misc_feature (789)..(789): n is a, c, g, or t
gcggccgcgggggaggggcacggcgtcagcgcgtcgccggctgggccgcgccggtggccaggagggagagacaaggaggaggaggaggaggagggtatctctgcattagccagattggacatatgtaaagggacatcagtatatctggatcatcagattgtgcttcaagaagaccatagggaagaacgcattttcatcttgctgcaaaagttgcaatagaagatctgaaggtttgaatgggccaatgagtatcctcatcattgaagcattctatggaggctcccataaacagctggtggatcttcttcaagaagagttaggagactgtgtcgtttatacccttcctgcaaagaaatggcattggagagcccggacatctgctttatatttctctcagaccattcccatcagtgagcattacaggaccctctttgcaagttcagtgcttaacctgaccgaactggctgcccttcggcctgaccttgggaaactgaaaaagattctgtattttcacgagaaccagttgatatatcctgtcaagaaatgtcaggagagggatttccaatatggatacaaccaaattctttcatgcctggtggctgatgtggttgtattcaactcagtttttaatatggaatcatttctcacttccatgggaaaatttatgaagctgattcctgatcacagacccaaggatctggaaagcatcatcagacccaagtgccaagttatttactttcccatcaggtttcctgatgtgagcagattcatgcccaagcacaaaacaanccatttaaagaagatgtcggcttaaaggacatg

SEQ ID NO: 27228 - DNA, 3173 bp, Homo sapiens
acgaaacgctgttcatttacttgttgtcaggtttatattctacaagcagagcttgtatcgtaacattatcattcaatctaggtatatgtattttgaagtgtagagataatgaggtagtgatactgtcttctagaatagctactctgtcttcatctctgaaattcacaggtctggctagctgtccctaacgtcatttcctggtctcaactcttttaagaccctgacatactctgagattggagtgaagatttctgtgacatgctgggtgggtataggctgctgtctcatgtcttggtcacatcttattgtttattttttcatatcatgtatcacaaattgaaatattgctgatatacttgtttgtcaccctgcatccttctcccattccccaaagtaaagcttcagcagaatagggctttgttgacctgttcactgctgagtcctcagcactgagtgcagtgcgtggtaaatgcccagaaggtgattgtctaaatatgttattttttgagaatatatacgacatgattattatttgaaacaggacaccacaaaaggtaatttttcccttcttctacttgatttctgtcttttcagcctttttcttataccccaccccttttttttggtggcatctcagttcaggatgttctctgtggctgtgaatgctttcccatcttgttcacagttggtacctggaaggttctctaaccttgtttctttctgatgtagcctattctgactctgggattactatttaaagtaattcttttaagagatatgtttggctaattctgtaatttttttgttatgtagactgtttgggagccacatttcctattgatttgatcacaccttattttttccttgtcataaatggtcctttttggatgagttactgtgtgagttctgaccctgtcagaattgatattcttaggaatcctgactttaatatacacagaacaggaaaagtttccttgtcataaatggtcctttttggatgagttactgtgtgagttctgaccctgtcagaattgatattcttaggaatcctgactttaatatacacagaacaggaaaagtcatgataggcacccttgggtatatatggtaacatgttagttctcttcaagactgtgcatggcttacagggatcacaggactgtgtgagttaagcaacagtttaaacctgatgtattgctctcccagaaagtagtattcttaaggtatttaccccagatctgcaagtgtctgtgtttctctgggagggaacccccaaacctggaatgctcatccatatgcattccaacctgcctctgagatgttaggcaagcctcagcagaggttcttgacagttttttggactatagaccttttggcaaatctgacaaactattgaccttctcccagagatacttatttacataaacccacaaattttacatatatcattcaggagtgcatagattcctgaaggccatccagtgaccaaggttaaacacctctaatctgaatagtaataataataataattattattattactgagttacagatgatttggaaaatctctggagagactgaaaatctcttattaattaagaataaccttagaagcactcagaaaatttctgttcttgcacgttcttctcccatcttggaatatccaagagccagactagatcatccgaatcagctcttgaccagctcaagattgagaattcaggctgggtttattttgaagttactaactatgtcttttgtgatcttacaggtatctctgcattagccagattggacatatgtaaagggacatcagtatatctggatcatcagattgtgcttcaagaagaccatagggaagaacgcattttcatcttgctgcaaaagttgcaatagaagatctgaaggtttgaatgggccaatgagtatcctcatcattgaagcattctatggaggctcccataaacagctggtggatcttcttcaagaagagttaggagactgtgtcgtttatacccttcctgcaaagaaatggcattggagagcccggacatctgctttatatttctctcagaccattcccatcagtgagcattacaggcaatcagaaattacaaattaggaaacaggagagatgagaatggaatgttaaccttttggtatgaagcaggtcaacattgaaaatgcaagaagcctggatccagcttcctgaaaagaagctccttggtgactctttttcttccggcatcagttgattatttctagtatccaaccctttttactttctctaaatctctctgaggaacatcctggagtttcttttctggctttcgttgtaactagttcctggcctacctgaggggatgaatagcattatggtatagggtaggtgctgcagaccatatggagaccagcaggatacaagagtgtgagatgcctagggaaagcctccctttgtcaagttaaaggagagaggtttccatttggaggcagctgaaatagagaaagaagtattgagcacaaatttacaaatcaaaataacagtcttccagggataggatagagcatggaccaacatgatacagtgtcaacctgcattttcatgggtgaaggatggatggactatagtaatcaaaacagaaacatagcatcctctggaaatagtgaccacagagacagagatctttgtattagtaatgacaggtaacgtttataaagtgcctcactgattgcttatgtgtgtgtcatctcatttgatcctgatagcaacccaaaatggtggataagcgtgaagaatctccttttacggatcaggttcagaaaaatgatttgaccaagttacccactaggaaattttagagtcaaaacttgaaccctaggcttctaatataggaaatggctttgtttctcaaacaggatgcattcctcacttctttcctcctcgctgtcatgaaaatatatccaggaactgtacgagcactggataaacggtggtgaacaacatagccctgttccctacctttgtggaacttagtctgcacttcttaggactgtgctgattagtatggggttattgggcacacttgaaatggggctagtctgaactagatgtattataattgtaaaatatatcctaaatttaaaagatttcaaataaagaatgtaaaacatta

SEQ ID NO: 27229 - DNA, 2737 bp, Homo sapiens
acgaaacgctgttcatttacttgttgtcaggtttatattctacaagcagagcttgtatcgtaacattatcattcaatctaggtatatgtattttgaagtgtagagataatgaggtagtgatactgtcttctagaatagctactctgtcttcatctctgaaattcacaggtctggctagctgtccctaacgtcatttcctggtctcaactcttttaagaccctgacatactctgagattggagtgaagatttctgtgacatgctgggtgggtataggctgctgtctcatgtcttggtcacatcttattgtttattttttcatatcatgtatcacaaattgaaatattgctgatatacttgtttgtcaccctgcatccttctcccattccccaaagtaaagcttcagcagaatagggctttgttgacctgttcactgctgagtcctcagcactgagtgcagtgcgtggtaaatgcccagaaggtgattgtctaaatatgttattttttgagaatatatacgacatgattattatttgaaacaggacaccacaaaaggtaatttttcccttcttctacttgatttctgtcttttcagcctttttcttataccccaccccttttttttggtggcatctcagttcaggatgttctctgtggctgtgaatgctttcccatcttgttcacagttggtacctggaaggttctctaaccttgtttctttctgatgtagcctattctgactctgggattactatttaaagtaattcttttaagagatatgtttggctaattctgtaatttttttgttatgtagactgtttgggagccacatttcctattgatttgatcacaccttattttttccttgtcataaatggtcctttttggatgagttactgtgtgagttctgaccctgtcagaattgatattcttaggaatcctgactttaatatacacagaacaggaaaagtttccttgtcataaatggtcctttttggatgagttactgtgtgagttctgaccctgtcagaattgatattcttaggaatcctgactttaatatacacagaacaggaaaagtcatgataggcacccttgggtatatatggtaacatgttagttctcttcaagactgtgcatggcttacagggatcacaggactgtgtgagttaagcaacagtttaaacctgatgtattgctctcccagaaagtagtattcttaaggtatttaccccagatctgcaagtgtctgtgtttctctgggagggaacccccaaacctggaatgctcatccatatgcattccaacctgcctctgagatgttaggcaagcctcagcagaggttcttgacagttttttggactatagaccttttggcaaatctgacaaactattgaccttctcccagagatacttatttacataaacccacaaattttacatatatcattcaggagtgcatagattcctgaaggccatccagtgaccaaggttaaacacctctaatctgaatagtaataataataataattattattattactgagttacagatgatttggaaaatctctggagagactgaaaatctcttattaattaagaataaccttagaagcactcagaaaatttctgttcttgcacgttcttctcccatcttggaatatccaagagccagactagatcatccgaatcagctcttgaccagctcaagattgagaattcaggctgggtttattttgaagttactaactatgtcttttgtgatcttacaggtatctctgcattagccagattggacatatgtaaagggacatcagtatatctggatcatcagattgtgcttcaagaagaccatagggaagaacgcattttcatcttgctgcaaaagttgcaatagaagatctgaaggtttgaatgggccaatgagtatcctcatcattgaagcattctatggaggctcccataaacagctggtggatcttcttcaagaagagttaggagactgtgtcgtttatacccttcctgcaaagaaatggcattggagagcccggacatctgctttatatttctctcagaccattcccatcagtgagcattacaggaccctctttgcaagttcagtgcttaacctgaccgaactggctgcccttcggcctgaccttgggaaactgaaaaagattctgtattttcacgagaaccagttgatatatcctgtcaagaaatgtcaggagagggatttccaatatggatacaaccaaattctttcatgccttggcgagcatgaaagatggtagatattcacacatcaagatatataaatatgtgattcattttgttatctctgggggagaacatatagtagctcgattctgatccaagagaccaggttcagaaacacctaaaaaccatatgtaaacaataagttaccacaagtaccgaattgacacacattatcgcctcctaataacacccatataacaaatactgatacaaaaatggataatactcagaggaccaactaaaagagaaaagagagtagacctatcgaacataatgccacgaattggatgacgtggatacaacatgggacaccgcagatgaaagcagataaaatgagagagtgagagaggataaactacgagaatacaatcggatctattaggtacgactagaacacagcaactaggtgcacccgctacggcagcagcaccgaacgatcccgaacgacctactaaata

SEQ ID NO: 27230 - DNA, 1496 bp, Homo sapiens
gcggccgcgggggaggggcacggcgtcagcgcgtcgccggctgggccgcgccggtggccaggagggagagacaaggaggaggaggaggaggagggtatctctgcattagccagattggacatatgtaaagggacatcagtatatctggatcatcagattgtgcttcaagaagaccatagggaagaacgcattttcatcttgctgcaaaagttgcaatagaagatctgaaggtttgaatgggccaatgagtatcctcatcattgaagcattctatggaggctcccataaacagctggtggatcttcttcaagaagagttaggagactgtgtcgtttatacccttcctgcaaagaaatggcattggagagcccggacatctgctttatatttctctcagaccattcccatcagtgagcattacaggcaatcagaaattacaaattaggaaacaggagagatgagaatggaatgttaaccttttggtatgaagcaggtcaacattgaaaatgcaagaagcctggatccagcttcctgaaaagaagctccttggtgactctttttcttccggcatcagttgattatttctagtatccaaccctttttactttctctaaatctctctgaggaacatcctggagtttcttttctggctttcgttgtaactagttcctggcctacctgaggggatgaatagcattatggtatagggtaggtgctgcagaccatatggagaccagcaggatacaagagtgtgagatgcctagggaaagcctccctttgtcaagttaaaggagagaggtttccatttggaggcagctgaaatagagaaagaagtattgagcacaaatttacaaatcaaaataacagtcttccagggataggatagagcatggaccaacatgatacagtgtcaacctgcattttcatgggtgaaggatggatggactatagtaatcaaaacagaaacatagcatcctctggaaatagtgaccacagagacagagatctttgtattagtaatgacaggtaacgtttataaagtgcctcactgattgcttatgtgtgtgtcatctcatttgatcctgatagcaacccaaaatggtggataagcgtgaagaatctccttttacggatcaggttcagaaaaatgatttgaccaagttacccactaggaaattttagagtcaaaacttgaaccctaggcttctaatataggaaatggctttgtttctcaaacaggatgcattcctcacttctttcctcctcgctgtcatgaaaatatatccaggaactgtacgagcactggataaacggtggtgaacaacatagccctgttccctacctttgtggaacttagtctgcacttcttaggactgtgctgattagtatggggttattgggcacacttgaaatggggctagtctgaactagatgtattataattgtaaaatatatcctaaatttaaaagatttcaaataaagaatgtaaaacatta

SEQ ID NO: 27231 - DNA, 1891 bp, Homo sapiens
ctgcgccgccgtccgcaccgcgctcggaatggggcgtcacgccgtggcattttgtgccttctgcaaactggtcgtgttcgaattgcgtttttttggtgcctacatgtcgtgcgtgctggttttctgcggcccggcgctccgcttcttcctcgcgcaggctgagaggacgggtgggggcacgtcgccctcgcgcgggagaagggaggccgggcgtccgggttggcctgagttggctggggtgcttcgccgaccaccaggctgcccggcgcttggccccttgcagtgcgagccccaggccttcctgacggaaagcttcgcttctggctcctagtcgccctcagttaccagacctccccagcgccccactcctctctgccagccgagtgtgaagaccctcactgtgccccccaccccggaatccctcgtctgaggattaagcacataacttcccattttcatcgggatccagacaatcccattctgtccagggtatctctgcattagccagattggacatatgtaaagggacatcagtatatctggatcatcagattgtgcttcaagaagaccatagggaagaacgcattttcatcttgctgcaaaagttgcaatagaagatctgaaggtttgaatgggccaatgagtatcctcatcattgaagcattctatggaggctcccataaacagctggtggatcttcttcaagaagagttaggagactgtgtcgtttatacccttcctgcaaagaaatggcattggagagcccggacatctgctttatatttctctcagaccattcccatcagtgagcattacaggcaatcagaaattacaaattaggaaacaggagagatgagaatggaatgttaaccttttggtatgaagcaggtcaacattgaaaatgcaagaagcctggatccagcttcctgaaaagaagctccttggtgactctttttcttccggcatcagttgattatttctagtatccaaccctttttactttctctaaatctctctgaggaacatcctggagtttcttttctggctttcgttgtaactagttcctggcctacctgaggggatgaatagcattatggtatagggtaggtgctgcagaccatatggagaccagcaggatacaagagtgtgagatgcctagggaaagcctccctttgtcaagttaaaggagagaggtttccatttggaggcagctgaaatagagaaagaagtattgagcacaaatttacaaatcaaaataacagtcttccagggataggatagagcatggaccaacatgatacagtgtcaacctgcattttcatgggtgaaggatggatggactatagtaatcaaaacagaaacatagcatcctctggaaatagtgaccacagagacagagatctttgtattagtaatgacaggtaacgtttataaagtgcctcactgattgcttatgtgtgtgtcatctcatttgatcctgatagcaacccaaaatggtggataagcgtgaagaatctccttttacggatcaggttcagaaaaatgatttgaccaagttacccactaggaaattttagagtcaaaacttgaaccctaggcttctaatataggaaatggctttgtttctcaaacaggatgcattcctcacttctttcctcctcgctgtcatgaaaatatatccaggaactgtacgagcactggataaacggtggtgaacaacatagccctgttccctacctttgtggaacttagtctgcacttcttaggactgtgctgattagtatggggttattgggcacacttgaaatggggctagtctgaactagatgtattataattgtaaaatatatcctaaatttaaaagatttcaaataaagaatgtaaaacatta

SEQ ID NO: 27232 - DNA, 3207 bp, Homo sapiens
acgaaacgctgttcatttacttgttgtcaggtttatattctacaagcagagcttgtatcgtaacattatcattcaatctaggtatatgtattttgaagtgtagagataatgaggtagtgatactgtcttctagaatagctactctgtcttcatctctgaaattcacaggtctggctagctgtccctaacgtcatttcctggtctcaactcttttaagaccctgacatactctgagattggagtgaagatttctgtgacatgctgggtgggtataggctgctgtctcatgtcttggtcacatcttattgtttattttttcatatcatgtatcacaaattgaaatattgctgatatacttgtttgtcaccctgcatccttctcccattccccaaagtaaagcttcagcagaatagggctttgttgacctgttcactgctgagtcctcagcactgagtgcagtgcgtggtaaatgcccagaaggtgattgtctaaatatgttattttttgagaatatatacgacatgattattatttgaaacaggacaccacaaaaggtaatttttcccttcttctacttgatttctgtcttttcagcctttttcttataccccaccccttttttttggtggcatctcagttcaggatgttctctgtggctgtgaatgctttcccatcttgttcacagttggtacctggaaggttctctaaccttgtttctttctgatgtagcctattctgactctgggattactatttaaagtaattcttttaagagatatgtttggctaattctgtaatttttttgttatgtagactgtttgggagccacatttcctattgatttgatcacaccttattttttccttgtcataaatggtcctttttggatgagttactgtgtgagttctgaccctgtcagaattgatattcttaggaatcctgactttaatatacacagaacaggaaaagtttccttgtcataaatggtcctttttggatgagttactgtgtgagttctgaccctgtcagaattgatattcttaggaatcctgactttaatatacacagaacaggaaaagtcatgataggcacccttgggtatatatggtaacatgttagttctcttcaagactgtgcatggcttacagggatcacaggactgtgtgagttaagcaacagtttaaacctgatgtattgctctcccagaaagtagtattcttaaggtatttaccccagatctgcaagtgtctgtgtttctctgggagggaacccccaaacctggaatgctcatccatatgcattccaacctgcctctgagatgttaggcaagcctcagcagaggttcttgacagttttttggactatagaccttttggcaaatctgacaaactattgaccttctcccagagatacttatttacataaacccacaaattttacatatatcattcaggagtgcatagattcctgaaggccatccagtgaccaaggttaaacacctctaatctgaatagtaataataataataattattattattactgagttacagatgatttggaaaatctctggagagactgaaaatctcttattaattaagaataaccttagaagcactcagaaaatttctgttcttgcacgttcttctcccatcttggaatatccaagagccagactagatcatccgaatcagctcttgaccagctcaagattgagaattcaggctgggtttattttgaagttactaactatgtcttttgtgatcttacaggtatctctgcattagccagattggacatatgtaaagggacatcagtatatctggatcatcagattgtgcttcaagaagaccatagggaagaacgcattttcatcttgctgcaaaagttgcaatagaagatctgaaggtttgaatgggccaatgagtatcctcatcattgaagcattctatggaggctcccataaacagctggtggatcttcttcaagaagagttaggagactgtgtcgtttatacccttcctgcaaagaaatggcattggagagcccggacatctgctttatatttctctcagaccattcccatcagtgagcattacaggcaatcagaaattacaaattaggaaacaggagagatgagaatggaatgttaaccttttggtatgaagcaggtcaacattgaaaatgcaagaagcctggatccagcttcctgaaaagaagctccttggtgactctttttcttccggcatcagttgattatttctagtatccaaccctttttactttctctaaatctctctgaggaacatcctggagtttcttttctggctttcgttgtaactagttcctggcctacctgaggggatgaatagcattatggtatagggtaggtgctgcagaccatatggagaccagcaggatacaagagtgtgagatgcctagggaaagcctccctttgtcaagttaaaggagagaggtttccatttggaggcagctgaaatagagaaagaagtattgagcacaaatttacaaatcaaaataacagtcttccagggataggatagagcatggaccaacatgatacagtgtcaacctgcattttcatgggtgaaggatggatggactatagtaatcaaaacagaaacatagcatcctctggaaatagtgaccacagagacagagatctttgtattagtaatgacaggtaacgtttataaagtgcctcactgattgcttatgtgtgtgtcatctcatttgatcctgatagcaacccaaaatggtggataagcgtgaagaatctccttttacggatcaggttcagaaaaatgatttgaccaagttacccactaggaaattttagagtcaaaacttgaaccctaggcttctaatataggaaatggctttgtttctcaaacaggatgcattcctcacttctttcctcctcgctgtcatgaaaatatatccaggaactgtacgagcactggataaacggtggtgaacaacatagccctgttccctacctttgtggaacttagtctgcacttcttaggactgtgctgattagtatggggttattgggcacacttgaaatggggctagtctgaactagatgtattataattgtaaaatatatcctaaatttaacgaaattctatatttctgttggattactgcaatacttaagaagaattcacaccaacatgtcaat

SEQ ID NO: 27233 - DNA, 2823 bp, Homo sapiens
  misc_feature (2790)..(2790): n is a, c, g, or t
acgaaacgctgttcatttacttgttgtcaggtttatattctacaagcagagcttgtatcgtaacattatcattcaatctaggtatatgtattttgaagtgtagagataatgaggtagtgatactgtcttctagaatagctactctgtcttcatctctgaaattcacaggtctggctagctgtccctaacgtcatttcctggtctcaactcttttaagaccctgacatactctgagattggagtgaagatttctgtgacatgctgggtgggtataggctgctgtctcatgtcttggtcacatcttattgtttattttttcatatcatgtatcacaaattgaaatattgctgatatacttgtttgtcaccctgcatccttctcccattccccaaagtaaagcttcagcagaatagggctttgttgacctgttcactgctgagtcctcagcactgagtgcagtgcgtggtaaatgcccagaaggtgattgtctaaatatgttattttttgagaatatatacgacatgattattatttgaaacaggacaccacaaaaggtaatttttcccttcttctacttgatttctgtcttttcagcctttttcttataccccaccccttttttttggtggcatctcagttcaggatgttctctgtggctgtgaatgctttcccatcttgttcacagttggtacctggaaggttctctaaccttgtttctttctgatgtagcctattctgactctgggattactatttaaagtaattcttttaagagatatgtttggctaattctgtaatttttttgttatgtagactgtttgggagccacatttcctattgatttgatcacaccttattttttccttgtcataaatggtcctttttggatgagttactgtgtgagttctgaccctgtcagaattgatattcttaggaatcctgactttaatatacacagaacaggaaaagtttccttgtcataaatggtcctttttggatgagttactgtgtgagttctgaccctgtcagaattgatattcttaggaatcctgactttaatatacacagaacaggaaaagtcatgataggcacccttgggtatatatggtaacatgttagttctcttcaagactgtgcatggcttacagggatcacaggactgtgtgagttaagcaacagtttaaacctgatgtattgctctcccagaaagtagtattcttaaggtatttaccccagatctgcaagtgtctgtgtttctctgggagggaacccccaaacctggaatgctcatccatatgcattccaacctgcctctgagatgttaggcaagcctcagcagaggttcttgacagttttttggactatagaccttttggcaaatctgacaaactattgaccttctcccagagatacttatttacataaacccacaaattttacatatatcattcaggagtgcatagattcctgaaggccatccagtgaccaaggttaaacacctctaatctgaatagtaataataataataattattattattactgagttacagatgatttggaaaatctctggagagactgaaaatctcttattaattaagaataaccttagaagcactcagaaaatttctgttcttgcacgttcttctcccatcttggaatatccaagagccagactagatcatccgaatcagctcttgaccagctcaagattgagaattcaggctgggtttattttgaagttactaactatgtcttttgtgatcttacaggtatctctgcattagccagattggacatatgtaaagggacatcagtatatctggatcatcagattgtgcttcaagaagaccatagggaagaacgcattttcatcttgctgcaaaagttgcaatagaagatctgaaggtttgaatgggccaatgagtatcctcatcattgaagcattctatggaggctcccataaacagctggtggatcttcttcaagaagagttaggagactgtgtcgtttatacccttcctgcaaagaaatggcattggagagcccggacatctgctttatatttctctcagaccattcccatcagtgagcattacaggcaatcagaaattacaaattaggaaacaggagagatgagaatggaatgttaaccttttggtatgaagcaggtcaacattgaaaatgcaagaagcctggatccagcttcctgaaaagaagctccttggaccctctttgcaagttcagtgcttaacctgaccgaactggctgcccttcggcctgaccttgggaaactgaaaaagattctgtattttcacgagaaccagttgatatatcctgtcaagaaatgtcaggagagggatttccaatatggatacaaccaaattctttcatgcctggtggctgatgtggttgtattcaactcagtttttaatatggaatcatttctcacttccatgggaaaatttatgaagctgattcctgatcacagacccaaggatctggaaagcatcatcagacccaagtgccaagttatttactttcccatcaggtttcctgatgtgagcagtaaacactgggctactcatataaaacttatttgaagagtgaggaataagagtttccagcatttgaaactcagaacctggtggctgtagcaacactcctgttctgcctcttcctgtggctatcaggtgaatccttctttttatccctgagtcctgttgggatagctggctgacgtcatgaggcgtgggctgatgttctgattcatgcccaagcacaaaacaanccatttaaagaagatgtcggcttaaaggacatg

SEQ ID NO: 27234 - DNA, 343 bp, Homo sapiens
ctgtgtcgtttatacccttcctgcaaagaaatggcattggagagcccggacatctgctttatatttctctcagaccattcccatcagtgagcattacaggtaattagagctcaggatgcattttcagcgttttttaaaaagtacctgttatgaggatgttgcttctccatcagtatctttgagaatttctccaactatggaattggttattatgactatagtagatatttctttagagagagcagagcagtggagtatactcatcctctaaggacacctggtcagtaggaaagaagcttcatttagaaccaaccatatgtgttttctcattgtcttgtgattt

SEQ ID NO: 27235 - DNA, 2437 bp, Homo sapiens
acgaaacgctgttcatttacttgttgtcaggtttatattctacaagcagagcttgtatcgtaacattatcattcaatctaggtatatgtattttgaagtgtagagataatgaggtagtgatactgtcttctagaatagctactctgtcttcatctctgaaattcacaggtctggctagctgtccctaacgtcatttcctggtctcaactcttttaagaccctgacatactctgagattggagtgaagatttctgtgacatgctgggtgggtataggctgctgtctcatgtcttggtcacatcttattgtttattttttcatatcatgtatcacaaattgaaatattgctgatatacttgtttgtcaccctgcatccttctcccattccccaaagtaaagcttcagcagaatagggctttgttgacctgttcactgctgagtcctcagcactgagtgcagtgcgtggtaaatgcccagaaggtgattgtctaaatatgttattttttgagaatatatacgacatgattattatttgaaacaggacaccacaaaaggtaatttttcccttcttctacttgatttctgtcttttcagcctttttcttataccccaccccttttttttggtggcatctcagttcaggatgttctctgtggctgtgaatgctttcccatcttgttcacagttggtacctggaaggttctctaaccttgtttctttctgatgtagcctattctgactctgggattactatttaaagtaattcttttaagagatatgtttggctaattctgtaatttttttgttatgtagactgtttgggagccacatttcctattgatttgatcacaccttattttttccttgtcataaatggtcctttttggatgagttactgtgtgagttctgaccctgtcagaattgatattcttaggaatcctgactttaatatacacagaacaggaaaagtttccttgtcataaatggtcctttttggatgagttactgtgtgagttctgaccctgtcagaattgatattcttaggaatcctgactttaatatacacagaacaggaaaagtcatgataggcacccttgggtatatatggtaacatgttagttctcttcaagactgtgcatggcttacagggatcacaggactgtgtgagttaagcaacagtttaaacctgatgtattgctctcccagaaagtagtattcttaaggtatttaccccagatctgcaagtgtctgtgtttctctgggagggaacccccaaacctggaatgctcatccatatgcattccaacctgcctctgagatgttaggcaagcctcagcagaggttcttgacagttttttggactatagaccttttggcaaatctgacaaactattgaccttctcccagagatacttatttacataaacccacaaattttacatatatcattcaggagtgcatagattcctgaaggccatccagtgaccaaggttaaacacctctaatctgaatagtaataataataataattattattattactgagttacagatgatttggaaaatctctggagagactgaaaatctcttattaattaagaataaccttagaagcactcagaaaatttctgttcttgcacgttcttctcccatcttggaatatccaagagccagactagatcatccgaatcagctcttgaccagctcaagattgagaattcaggctgggtttattttgaagttactaactatgtcttttgtgatcttacaggtatctctgcattagccagattggacatatgtaaagggacatcagtatatctggatcatcaggtaagcagatgggacttcatttttatatctccatcaattccgtcctgtggcaatatgcgggcattttctatcatgtcttgtttactgcagtgtgggtcagtaagatgattgatatttctaaagagaaggaagcagccttttttaagtttcaccagattatttccctgctgcttaaagtcagatttcttcatttttatctcattattatttcatgtattcatacatctatagtagataataattctctacttttcttttaatgtatattctttggagagttgtggacagctctcatattgttccttggttgtcagccaagttatagacatttaactcctttaatctttctttgtaattgagttagcttggctgccttttccagattttcccctcgttttatggtaccattaataaacagaaaatcagtctattgcctggcttcttctacacctttcattctttttgttttctgtttttgcctcatattccttgttgaactaaggccagccagacatcattctctggactactttggcactacatgaatgccttgcctgcaactatcagtgtcccatgcagtaataccatcagcagtatgtcctag

SEQ ID NO: 27236 - DNA, 317 bp, Homo sapiens
tacaaaaaaatttttggagagacaggttcttactatgttgcccatgtagttctcaaactctgggcttcaagcgatccccccacctcggcctctcaaagtgttgggattacaggcatgagcctctgtgcctggccaatatactattttctatatagagttaatgcataagagcattcgaagatcttttgccatccttaacaaaacttaactatattttggttgctcctttatgtctcatcattatctgttctttcagcagctcttacaattgtagttcctttgccatggtaaagtttcatgtttaatttttttaagat

SEQ ID NO: 27237 - DNA, 453 bp, Homo sapiens
cattttgaagctgtgaaccctccctgccattgcatcatttcttggtaaataggatgccctttccacttgacaaggaagagacttggaccagatccgtgaactccagagcccctggcttttccaattagcatgttgctagtttctctcattgaactaaatcatgagggatccttaaatactacaggagacaggaaaagcaaccttctatctctttctccattttatccacaacagtctgagaatcactcattcttctcaaatgacttcttccagtgttctcgacttacccctttttcggcatctgcctttgactgaccctcccctttcccatctacaggctcagtggagtcagtgctaggaactagggagcacccaccgcccactgccacatactccctcctagctcaggagccggattggactagagccagacccagcactgggctgcctcca

SEQ ID NO: 27238 - DNA, 497 bp, Homo sapiens
acattgaatcctctgttatgttaattctggcaatctctatgtcttctgggtcctaccatcaaacctctgaaagcaattcaaatattttgccactccctttgaccgtttattttttaaatctgagattagaattgtggaacacatagtggattgatataaagaggaaaatcaagcaccaggaataaagattataaaagagttagctccttgaaggttgttggtaatagaccaatcatgccaacataaaaaaaattaaatactactttaatgaaatttcatacttttaataaattactttcatcttgttagttctgatctagaatatctttgtatttaacataaatgagataaaattataaagagattcatcctctattttccattataacatgcataaagtaaaatttcaaaaatttaaataaatgtgtcagaatattcatggaaagtattcagctgtgagattatgtacttatttgaataaagtgtctttttacaat

SEQ ID NO: 27239 - DNA, 477 bp, Homo sapiens
ttttttttgagacggagtctcgctctgtcgcccaggctggagtgcagtggcgcgatctcggctcactgcaagctccgcctcccgggttcacgccattctcctgcctcagcctcccgagtagctgggactacaggcgcccgccactacgcccggctaattttttgtatttttagtagaggcggggtttcaccgttttagccgggatggtctcgatctcctgacctcgtgatccgcccgcctcggcctcccaaagtgctgggattacaggcgtcagccaccgcgcccggcctccagcccttcttaaaacaagcctgggggcaggttcaggaggatctactccttggctgcccaaggacaccagaggaccctggtggttccaacacttacctatgtttactaccatgaggcactgctgcacttcgggtgattcatgaagagaaaaacaggagcaacaatgtttcagggctcgaagggtgt

SEQ ID NO: 27240 - DNA, 220 bp, Homo sapiens
cctgaccctcatcagttctctccattactctttgtccttccttttgtaaatctcaggtatttcccttactgttctcctttttactttcccaataggtctttgaaagtgtgagtcttggctgggcgcagtggctcacgcctgtaatcccagcactttgggaggccgaggtgggcggatcacctgaggtcaggagttcgagaccagcctgaccaacatggag

SEQ ID NO: 27241 - DNA, 286 bp, Homo sapiens
gcgtcgaccttctacaagggctgacccctctaactaaacattatgacagagggtgtgtgtgtgtagaagtgtacagagaatattcagtcatccaccatgtatttattgatttccaactcccaggcctgtactgggccctcttcaaaggggaagaattcacagattagcagatgacatatgcatgaaataaataccacacagaatgggggtataatgatggaattagtaaatttgctatgggggccactaacttttttggggtagaggagggaactcaggaagtctt

SEQ ID NO: 27242 - DNA, 402 bp, Homo sapiens
atgacctacctgcctcagcctcccaaagtgctgggattacaggcatgagccatcatgcctggccatattttaattttttccctaacttatactgtgttgaaaatttcaaacccatagaaatgttgactgggcatggtggctcacacctgtaatcccaacactttgggaggccgagacgggaagattgcttgagccaagaaatttgagatcagcctgggcaatatagggagaccccgtctctacaagaagtttaaaaattagctgggcctggtgtcacatccctatagtcccagctactcaaaaactgaggtgggaggatcgcttgatcgcccgagacagaggcagcagtgagctgcaattgtgccactgcactcctgcctgggcaacagagcaagacaatgt

SEQ ID NO: 27243 - DNA, 408 bp, Homo sapiens
tctttcttttgggggaagaatgagagatgcacatttcgttagtaaattgtgaacaacttgaaacaaacccaaatccaattgtgaatttaagaagtagagttaaaatgaaaggtagccattcaaatactatgccttgctgccttcacttattaagttaggattttcttccttttagccctttagggatacagtagtttaaaagagcagtagccacatatgaaaggatcagatttagcttagagggaattccttagaccagccctgctgttaagacttgacattcaatattgtttgatcacattccaaaatatagcttagctaatggcaacatttgtaaacatataaattgcaaaagaagctttcttgtgtacatacatttttaaaagcttgaaattgatgtgaactttt

SEQ ID NO: 27244 - DNA, 352 bp, Homo sapiens
gatgatggcctatgaattggtccttccatgtggattatacaggcaactgcctaccctgtgtgatgtttggagaaaatgatgggtcttgggccacacacgcacacaaaaatccctgccctaaagtttaatgcttctaaacccatagcttcatcccttgtgtttaatgatttgttcaataagaatagcccaggggtaagggaggcttaactctttaaatgtcagtagtcatttacaccttagtaagattaaaggacacaagaaaagttttggatgagaacaaaagaaaggcaatatgagggttcctaaggaaaggggaggccaggcgcagtggctcagaccagcctgaccaaca

SEQ ID NO: 27245 - DNA, 596 bp, Homo sapiens
gaatctcctagaaggaagatggaagatgtaataaatagtcatttttcagttttctcactgcattgctcaaatactacatcctacttcaaaaacgtataaaaaaatttaggagacatacgaattagaagataaacgcgaagataaatagcactctagacctaagttgtccaatatggtagccacttgccacatgtgactatgtatatttaaaataattaaaattaataaaatttaaaattccattcctcatcacacttttaaggggttatgtaggagaagaatacaacttacaattactcttacttcacggtggctggctgccatgttggactgcacagatacggaacattgtcatcgttgtggaaagttatattagatattgctgttccatacgccaataatgatagtgaaattgagcatataaatgaagtcagactttgattcttgagatgatcatatcctgtatgaattttctcagacttaagaattgaatgcagaagacgttttgacaaagaaaatatggtatttttatccagttagtcattcaacaggaatatttcacaacatgaacctgaaccatccctttttgctttaaa

SEQ ID NO: 27246 - DNA, 239 bp, Homo sapiens
ttctgttcttcatctattttggtgcaagtccttatggttttagttagtgtagcttatactgatgctccttgacttatgatgggattacgtcctgataagcccattgtatgttgaaaatgttgcagccgggtgcagtggctcatgcctgtaatcccgacactttgggatgccagggtgggaggatcacttgagtccaggagttcgagatcagcctgggcaacataaggagaccctctccc

SEQ ID NO: 27247 - DNA, 390 bp, Homo sapiens
gtaaccacttggcttacacctagcttacatttaagcctgtggaaagactgagagagatttcacatgtaggtggtggaatatggaaatgcagattgatagtctccttggagttatgggtctttgaagtttagcagtctttttgttgttcaaaaatacactatgacattaaaaagacgtgggtcttctgaccctgatgtcttattgtgtattagggcttcaggtgttacagttcattttaactgaggttgaacgtaatacacaaaaatgtggattgttttatagtttataaaagaacagttattttaggtacctttttgtttcatgttccactcttagagttccttattagctggcttgattttattttttcagctacgtgcttttagatta

SEQ ID NO: 27248 - DNA, 414 bp, Homo sapiens
tgttaatcttctcaaaaaatcctcaaggacataaacctttttgaaacagtaggaagccattaaagcagagtaggcttggaattgaaaggctggggatacagaaagaacagctgaaatgaggagggaaaaacaaccctagaaatgttttagaagagactttaaaaactatgttgaaggcagtaaagaagagaaatgattaaaaatcagtcaaatacatgataaaagagaaactggagacgcccttctggaatgaaaaggaacaggataaagataaaaactacgtgacaggctggacacagtagttctctcctgtaatcccagcactttcggaggccagagtgggaggatctcttgaaaccaggagtctgagaccaacctgggcaacatagcaagactctgtctctgtaagaaaat

SEQ ID NO: 27249 - DNA, 345 bp, Homo sapiens
ttatgttttatgatgtgcaaactgttactttttatgttaaaaatctttaaaaatatatgtgacatggtgctttttaggagcattacatagggccaaaatctgccatgttttatattgaaccgtctatgtaattccatgcatagttagagaaaatcatataggatggaataataatactgactgaaaatgtttctttctggtggcatttgtgagtgagtcaatgaaataggtttgaaaaatctttttaactctgtatgtattcaggagaacaataggtagtttgagaaaatagacccactcaggcaataaaatgctatattagccttgcaaatgttgctcttccac

SEQ ID NO: 27250 - DNA, 330 bp, Homo sapiens
aactgaatgataatagtgacacaacctatcaaaacctctgggatacggaaaaggcggtgctaagaggaaagttcatagcattaaatgtctacactaaaaagcctgaaagagcacaaataggcaatctaaggtcacgcctcaaggaactagagaaactagaacaaagcaaacacaaacccagcattagaaaagaaataacaaagatcagagcagaactgaattaaattaaatatatatatttatatacaaaaaataaataaaacaaaaagctggttctttgagaaaataaataaaaccgttagaccattagtgagttaaccaataaaagaa

SEQ ID NO: 27251 - DNA, 631 bp, Homo sapiens
attgaactttattgaattctattttcttttccttttccttttttatttttttagaccaggtctcatgttgttgcccaggctggaatgcagtggtgggatcaccactcacagcagcctcgaactcctgggctcgagccatcttcccacttcatcatgtcacctacctccccagtagctgggaccacaggtgtgccaccatccctggctaatttttaatttttttgtagaaatgatgtctcactatgccgcccaggcagatctccaactcctgggctcaagtgatcctcccacctcagcctcccaaagtgctgggattgtaggagtgagccaccacaccggctcctattgaattggtatttctgtgcctaatgggatatgtttgctctttaaatctctaaatgtgtaaattatattaatagattttccaatgttaaaccattcttgcattcttgggataaattcaacttggtcataatctagtttttaaatacataactggtttctgattgctaatattttagtaagatctttgcaactacattaacgaaacagattgacttgtaattttttttttttcttttttgagatggagttttgctcttgttgcccagcagcctggagtgcaatggcg

SEQ ID NO: 27252 - DNA, 416 bp, Homo sapiens
gatattcttaaaggacttaatccctatcttaattgacattttatggtaagtactgctgaaccaggtattcaaataaagtgtcttcatacaggtgatattcattattgaactgatattattacaaagtaaaacattgccacctttctactactcttggttttttttccagaatttttgttgctagatcagaggtatgtgagaaagagagtgggaagaggtgaagtcagagaaagagagtgggaagaggtgaaatcagagaaatagctgggggcacaaactgtgttgagttttttaggactttgtttaggactttaacctacatgcagagtgaagtgggaagccattgttgggtttaagaaatgctatgaactgaccttgcattttaacaaaacaaattgagtgaagggcagcgagtc

SEQ ID NO: 27253 - DNA, 355 bp, Homo sapiens
tttttccggtgacttttgttgtccatttaagtaggggtgtgtacatgtggtgtgtttttgtttcttgtgtttttttatgctagcatgttttgggtgcctgaagtggataaaagggagtgaaattgaagggcacctgctgatggaacaggccctgaactgagagccaggaaatctgtataccctttagtgctctacacaccagccagacgtgaaaccttggggaagtcaagtgaccttttctaagatacagtttccttatccatggaagacagcttagttcagctccacagtcccaaaaagctccctgcactttctttttctccatttgtttcttcttcttcttttttttttttta

SEQ ID NO: 27254 - DNA, 450 bp, Homo sapiens
ctaatttttttttttctttttctgagacagagttttgctctgttgcccaggctagagtacagtggtacaatcatggctcactgcaggtcctcgcaggctcaagcaatcctcccaccttagcctcccaggtagctgtgactacagccacacaccactacacccagctaatttttttattttttgtagagatggagtctcaccatgttgacaggctggtctccaactcctgggctcaagaaatcctcctaccttggcctctaaactgctgggattacaggtgtgagccaccacacctggccaagatctaagttcttcttaatttttctcctctgaagagaaagttcaagttctaaacctttagttatttctaatataattcttccacagcctcccataatatcctgaaattgtcatcctttctgtgagatgataaagtcttccttgatttga

SEQ ID NO: 27255 - DNA, 5523 bp, Homo sapiens
gcggcgggagcgcggcttcccaggcccgccgctccgcagggctgctggcgttgctgctgttgagaggcggcggcggcggcgcaggcgggcgggaaggatggtgtttctgcgactggagcggcaggtgcggaccgggagccggaccgaggtttggcagaagcaacgtgtgctcgggagcaaccggcgcgggtgccactgaggcagcggagggaggcaggatcgactgacgggcgaacggacggacggacggaaggcgactcgagggccggccccggagccgcgccgtgggcgagatgccggggccgccggcgttgcggcggaggctgctgctgctgctgctggtcctcctgatcgccggcagtgctggggccgcgccacttccgcaaacaggtgcaggggaggcgccacctgctgcagaagtttcctcatcttttgtgatcctgtgtgtgtgcagtttaataatattaatagtgttaattgcaaactgtgtatcctgctgtaaggacccagaaatagactttaaggaatttgaagataattttgatgatgagatagatttcacaccaccagcagaagacactccctctgttcagtccccagcagaggtcttcacactttcagtaccaaatatttcactcccagctccctcgcaattccagccttctgtagagggattgaagtctcaagttgcccgccacagtctaaactacatacaggaaattggaaatggctggtttggaaaggttctcttgggagagatttacacgggcactagcgtagcaagagtcatcgtgaaggagttaaaagcaagtgccaacccaaaggaacaagatacttttttgaaaaatggagaaccttactacattcttcagcatccaaatattcttcagtgtgttggacagtgcgtagaagcgattccctacctcctggtgtttgagttctgtgacttgggtgacctgaaggcgtatctgcgcagcgagcaggagcacatgcggggggactcacagaccatgctgctgcagaggatggcgtgcgaggtcgccgcggggctggccgccatgcacaagctgcacttcctgcacagtgatttagccctgcggaattgttttctcacctccgacttaaatgtgaaagtgggagattacggaataggattcagcaggtacaaggaggattatattgaaacagatgataaaaaagttttccctctgcgatggactgctccagaattagtaaccagctttcaagacagactgctaactgcagatcagactaagtatagtaatatctggtctctgggtgtgacactttgggagctttttgacaatgccgcacagccgtattcaaacctttccaacttagatgtcctcaaccaagtcattagagagagagacacaaaactcccgaagccccagctggagcagccctactctgatagatggtatgaagtcttacagttctgttggctgtcaccagaaaagagacccgcggctgaagatgtgcacaggctgctgacttacctgcggctgcagagccagcgggactcagaggtcgactttgaacagcagtggaacgctctgaagccgaacacaaacagcagagactcctccaacaatgctgcattcccaattctcgaccactttgccagggaccggctgggtcgtgaaatggaggaagtcctcaccgtgaccgaaaccagccagggcctgagcttcgagtatgtctgggaggccgctaagcacgaccactttgacgagcgcagccggggccacctggacgaaggcttgtcctacacgagcatcttctatccggttgaagtttttgagagttcgctttcagatcctgggcccggaaagcaagatgacagcggccaggatgtccccctgagggtccctggagtggttcctgtttttgatgcccacaacctttctgttggaagcgactattatatccagttagaagaaaaaagtggtagtaacttggagcttgattacccaccagcgctgctcacaaccgacatggataatccagaaaggactggccctgaactgtcccagctcacggcgctcaggagcgttgaacttgaggagtccagtacagatgaggacttcttccaaagcagtacagaccccaaagactctagcttaccaggggacttacacgtgaccagtggccccgagagccctttcaacaatatatttaatgatgtggacaaatcggaagatttgcccagtcaccaaaaaatattcgacttaatggaattaaacggagttcaagccgactttaaacctgccactttaagttccagtttggataaccccaaagagtcagtcataacaggccactttgagaaagaaaagccccgtaagatttttgacagtgagcctctctgcctatcagataatcttatgcaccaagataattttgatccattgaatgttcaagaattgtcagaaaactttttatttcttcaagagaaaaacttactaaaaggctcattgtccagcaaagaacacataaatgatcttcagacagaacttaagaatgctggttttactgaagctatgttagaaacgtcatgtagaaactctttagatactgagcttcagtttgctgaaaataagccaggcatgtctttgttgcaggaaaacgtaagcacaaagggtgacgatacagatgtcatgctcacaggtgacactttgagcacctcattgcagtcttccccagaagtgcaggtacctcctacctccttcgaaacagaagaaacgccccgtcgggtacccccagactcactcccaacacagggagaaacccagcccacgtgtttagatgttattgtcccggaggactgtctccaccaggacatcagtccagacgctgtgactgtcccggttgaaattctctcaactgatgccagaacccacagcctggataacaggtcccaggactctcctggcgagagtgaggagaccctgcgactcaccgaaagtgactctgttcttgctgatgacatccttgccagcagggtgagtgtagggagtagtctcccggaactgggacaggaattgcacaataaaccattttcggaagaccatcacagtcatcgccggctagagaaaaacttagaggctgtggagactttaaatcagctcaattctaaagacgcagcaaaagaagcaggcttggtgtctgccctctcctcggactcaaccagtcaggacagcctcctggaggacagcttgtcagcacccttcccagcctctgagccgtccctggaaaccccggactctctggagtcagtggatgtccacgaagcgctactggactctttaggatctcacactccccagaaactagtgccccccgataagccggcagacagtggctacgaaacagagaacttggagtctcccgagtggaccttgcatcccgctcccgagggcaccgcagactcagaaccagccaccacgggcgatggcggccacagcggtctgcctcccaacccggtcattgtcatctcagatgccggcgatggtcacagaggcacagaagtgacccctgagacgttcacagctggctcccagggttcataccgagactctgcgtacttctcagacaatgactctgagcccgagaaaaggtctgaggaggtcccgggaacctccccatccgccttggtgttggtacaggagcagcccctacccgagccagtcctccccgagcaaagtcctgctgcccaggatagctgcctggaagccagaaagagccagccagatgaaagttgtctgtctgctttgcacaactccagtgacctggaattaagagccacgccggagccagcacagactggtgttccccagcaggtgcatcccacggaagacgaggccagcagtccctggagtgtgctgaatgcagaacttagcagcggcgatgacttcgagacacaggacgatcgcccctgcaccctcgcttccacggggaccaacacgaacgaactccttgcctacaccaattctgcgctggacaagtccctgtccagccactccgagggcccgaagttgaaggagccggacatcgaagggaagtacctggggaaactcggggtgtcagggatgctcgacctctcagaggacgggatggatgcagacgaggaggacgaaaacagcgacgactcggacgaggacctgcgggccttcaacctgcatagcctcagctccgagtcggaggacgagaccgagcaccccgtgcccatcatcctcagcaacgaggacggaaggcacctgcggagtctgttgaagcccacagcggccaatgcccccgacccactgcccgaggactggaagaaggaaaagaaggcagtcacgtttttcgatgatgtcacagtctacctgtttgaccaggagaccccaaccaaagagctggggccctgtggaggagaggcgtgcggcccggacctgagcggcccagccccagcctcaggctctccctacctgagcaggtgcatcaactccgaaagctccaccgacgaagaaggtggtggctttgagtgggatgatgacttctccccagatccttttatgtcaaagacaacaagtaacctgctcagctccaagccttctctcccgccaacattgccagcttttccctcacacacctgaccgactcggacatcgagcagggcggaagcagcgaagacggagaaaaggactaggtggctgccaacgcgcacgctcgggtccgaggctgctcccctggagcggcgcccctgcgccctcagcccgagcagcgacatccactcgccatttgctgacatgagattgggaggaagaatccagaggtgaagagggagacggctcttagctgcgttcaaggcggggccctcgggagcccaggtgcagagcgaggccgtgtccaggagccggcgtccctcagtgccccgtgcacccgcggccgcggcctcccaggcagtgctcatgcgctggccgtcgggggaggcaggggcacagcctccatgtgcgcgcgcgtgtggagctgtgtgcaccgcatgtgtgctttccacaggggcgtctctgcgtccacgcctgcacatcccggcgcacgtgtgggcaccacagaggacacgtgaggggaatggtcaccagtgagccatatttattatttctagagaaatcacgaactgctttctgtaattgcactgtggataaatgttccgagagtctccattgttgtacaggatcttcagttattcgaggggaatgaggcaggtcaagccgatgctagccactagtttgattttttttctgttttatagtttgcgctgcatggtacttgtgaagcttaaatattttgagtgttctactgtgtctaggattgttgggattgtacatatggtactctttcataaatgataaatgattctgaatgttagtgttttatgttcatataggaaatattttcattgagtccaaaataccactgttttgttgatggacttgaatgcatttgtctcttcttgatgaagcg

SEQ ID NO: 27256 - DNA, 1150 bp, Homo sapiens
taggcttcatttgtgccgattagataacacctgctatctgccagtctgtcggggcagatgtgtggatcccagctgacttcttctgcaccctgacccttagcgcccagcgggcatttgagcctagcagatgtgggagagtcaggcaggggctgcttccgaaggaaaggacaggaagggcggctcaggcggtgctgggctcaaaacacccgcttccgttcctgtggtgcagcgcacatgccatccacgccatgcctgtctgatcattttaaaaacccagctttgtcgtctcgcttcctctctcctcaacaggaagcagcgaagacggagaaaaggactaggtggctgccaacgcgcacgctcgggtccgaggctgctcccctggagcggcgcccctgcgccctcagcccgagcagcgacatccactcgccatttgctgacatgagattgggaggaagaatccagaggtgaagagggagacggctcttagctgcgttcaaggcggggccctcgggagcccaggtgcagagcgaggccgtgtccaggagccggcgtccctcagtgccccgtgcacccgcggccgcggcctcccaggcagtgctcatgcgctggccgtcgggggaggcaggggcacagcctccatgtgcgcgcgcgtgtggagctgtgtgcaccgcatgtgtgctttccacaggggcgtctctgcgtccacgcctgcacatcccggcgcacgtgtgggcaccacagaggacacgtgaggggaatggtcaccagtgagccatatttattatttctagagaaatcacgaactgctttctgtaattgcactgtggataaatgttccgagagtctccattgttgtacaggatcttcagttattcgaggggaatgaggcaggtcaagccgatgctagccactagtttgattttttttctgttttatagtttgcgctgcatggtacttgtgaagcttaaatattttgagtgttctactgtgtctaggattgttgggattgtacatatggtactctttcataaatgataaatgattctgaatgttagtgttttatgttcatataggaaatattttcattgagtccaaaataccactgttttgttgatggacttgaatgcatttgtctcttcttgatgaagcg

SEQ ID NO: 27257 - DNA, 5617 bp, Homo sapiens
gcggcgggagcgcggcttcccaggcccgccgctccgcagggctgctggcgttgctgctgttgagaggcggcggcggcggcgcaggcgggcgggaaggatggtgtttctgcgactggagcggcaggtgcggaccgggagccggaccgaggtttggcagaagcaacgtgtgctcgggagcaaccggcgcgggtgccactgaggcagcggagggaggcaggatcgactgacgggcgaacggacggacggacggaaggcgactcgagggccggccccggagccgcgccgtgggcgagatgccggggccgccggcgttgcggcggaggctgctgctgctgctgctggtcctcctgatcgccggcagtgctggggccgcgccacttccgcaaacaggtgcaggggaggcgccacctgctgcagaagtttcctcatcttttgtgatcctgtgtgtgtgcagtttaataatattaatagtgttaattgcaaactgtgtatcctgctgtaaggacccagaaatagactttaaggaatttgaagataattttgatgatgagatagatttcacaccaccagcagaagacactccctctgttcagtccccagcagaggtcttcacactttcagtaccaaatatttcactcccagctccctcgcaattccagccttctgtagagggattgaagtctcaagttgcccgccacagtctaaactacatacaggaaattggaaatggctggtttggaaaggttctcttgggagagatttacacgggcactagcgtagcaagagtcatcgtgaaggagttaaaagcaagtgccaacccaaaggaacaagatacttttttgaaaaatggagaaccttactacattcttcagcatccaaatattcttcagtgtgttggacagtgcgtagaagcgattccctacctcctggtgtttgagttctgtgacttgggtgacctgaaggcgtatctgcgcagcgagcaggagcacatgcggggggactcacagaccatgctgctgcagaggatggcgtgcgaggtcgccgcggggctggccgccatgcacaagctgcacttcctgcacagtgatttagccctgcggaattgttttctcacctccgacttaaatgtgaaagtgggagattacggaataggattcagcaggtacaaggaggattatattgaaacagatgataaaaaagttttccctctgcgatggactgctccagaattagtaaccagctttcaagacagactgctaactgcagatcagactaagtatagtaatatctggtctctgggtgtgacactttgggagctttttgacaatgccgcacagccgtattcaaacctttccaacttagatgtcctcaaccaagtcattagagagagagacacaaaactcccgaagccccagctggagcagccctactctgatagatggtatgaagtcttacagttctgttggctgtcaccagaaaagagacccgcggctgaagatgtgcacaggctgctgacttacctgcggctgcagagccagcgggactcagaggtcgactttgaacagcagtggaacgctctgaagccgaacacaaacagcagagactcctccaacaatgctgcattcccaattctcgaccactttgccagggaccggctgggtcgtgaaatggaggaagtcctcaccgtgaccgaaaccagccagggcctgagcttcgagtatgtctgggaggccgctaagcacgaccactttgacgagcgcagccggggccacctggacgaaggcttgtcctacacgagcatcttctatccggttgaagtttttgagagttcgctttcagatcctgggcccggaaagcaagatgacagcggccaggatgtccccctgagggtccctggagtggttcctgtttttgatgcccacaacctttctgttggaagcgactattatatccagttagaagaaaaaagtggtagtaacttggagcttgattacccaccagcgctgctcacaaccgacatggataatccagaaaggactggccctgaactgtcccagctcacggcgctcaggagcgttgaacttgaggagtccagtacagatgaggacttcttccaaagcagtacagaccccaaagactctagcttaccaggggacttacacgtgaccagtggccccgagagccctttcaacaatatatttaatgatgtggacaaatcggaagatttgcccagtcaccaaaaaatattcgacttaatggaattaaacggagttcaagccgactttaaacctgccactttaagttccagtttggataaccccaaagagtcagtcataacaggccactttgagaaagaaaagccccgtaagatttttgacagtgagcctctctgcctatcagataatcttatgcaccaagataattttgatccattgaatgttcaagaattgtcagaaaactttttatttcttcaagagaaaaacttactaaaaggctcattgtccagcaaagaacacataaatgatcttcagacagaacttaagaatgctggttttactgaagctatgttagaaacgtcatgtagaaactctttagatactgagcttcagtttgctgaaaataagccaggcatgtctttgttgcaggaaaacgtaagcacaaagggtgacgatacagatgtcatgctcacaggtgacactttgagcacctcattgcagtcttccccagaagtgcaggtacctcctacctccttcgaaacagaagaaacgccccgtcgggtacccccagactcactcccaacacagggagaaacccagcccacgtgtttagatgttattgtcccggaggactgtctccaccaggacatcagtccagacgctgtgactgtcccggttgaaattctctcaactgatgccagaacccacagcctggataacaggtcccaggactctcctggcgagagtgaggagaccctgcgactcaccgaaagtgactctgttcttgctgatgacatccttgccagcagggtgagtgtagggagtagtctcccggaactgggacaggaattgcacaataaaccattttcggaagaccatcacagtcatcgccggctagagaaaaacttagaggctgtggagactttaaatcagctcaattctaaagacgcagcaaaagaagcaggcttggtgtctgccctctcctcggactcaaccagtcaggacagcctcctggaggacagcttgtcagcacccttcccagcctctgagccgtccctggaaaccccggactctctggagtcagtggatgtccacgaagcgctactggactctttaggatctcacactccccagaaactagtgccccccgataagccggcagacagtggctacgaaacagagaacttggagtctcccgagtggaccttgcatcccgctcccgagggcaccgcagactcagaaccagccaccacgggcgatggcggccacagcggtctgcctcccaacccggtcattgtcatctcagatgccggcgatggtcacagaggcacagaagtgacccctgagacgttcacagctggctcccagggttcataccgagactctgcgtacttctcagacaatgactctgagcccgagaaaaggtctgaggaggtcccgggaacctccccatccgccttggtgttggtacaggagcagcccctacccgagccagtcctccccgagcaaagtcctgctgcccaggatagctgcctggaagccagaaagagccagccagatgaaagttgtctgtctgctttgcacaactccagtgacctggaattaagagccacgccggagccagcacagactggtgttccccagcaggtgcatcccacggaagacgaggccagcagtccctggagtgtgctgaatgcagaacttagcagcggcgatgacttcgagacacaggacgatcgcccctgcaccctcgcttccacggggaccaacacgaacgaactccttgcctacaccaattctgcgctggacaagtccctgtccagccactccgagggcccgaagttgaaggagccggacatcgaagggaagtacctggggaaactcggggtgtcagggatgctcgacctctcagaggacgggatggatgcagacgaggaggacgaaaacagcgacgactcggacgaggacctgcgggccttcaacctgcatagcctcagctccgagtcggaggacgagaccgagcaccccgtgcccatcatcctcagcaacgaggacggaaggcacctgcggagtctgttgaagcccacagcggccaatgcccccgacccactgcccgaggactggaagaaggaaaagaaggcagtcacgtttttcgatgatgtcacagtctacctgtttgaccaggagaccccaaccaaagagctggggccctgtggaggagaggcgtgcggcccggacctgagcggcccagccccagcctcaggctctccctacctgagcaggtgcatcaactccgaaagctccaccgacgaagaaggtggtggctttgagtgggatgatgacttctccccagatccttttatgtcaaagacaacaagtaacctgctcagctccaagccttctctccaaacatccaagtacttttctccgccgccaccggcccggagcacggagcagagctggccgcactcggcgccttactcccggttctccatctctcccgccaacattgccagcttttccctcacacacctgaccgactcggacatcgagcagggcggaagcagcgaagacggagaaaaggactaggtggctgccaacgcgcacgctcgggtccgaggctgctcccctggagcggcgcccctgcgccctcagcccgagcagcgacatccactcgccatttgctgacatgagattgggaggaagaatccagaggtgaagagggagacggctcttagctgcgttcaaggcggggccctcgggagcccaggtgcagagcgaggccgtgtccaggagccggcgtccctcagtgccccgtgcacccgcggccgcggcctcccaggcagtgctcatgcgctggccgtcgggggaggcaggggcacagcctccatgtgcgcgcgcgtgtggagctgtgtgcaccgcatgtgtgctttccacaggggcgtctctgcgtccacgcctgcacatcccggcgcacgtgtgggcaccacagaggacacgtgaggggaatggtcaccagtgagccatatttattatttctagagaaatcacgaactgctttctgtaattgcactgtggataaatgttccgagagtctccattgttgtacaggatcttcagttattcgaggggaatgaggcaggtcaagccgatgctagccactagtttgattttttttctgttttatagtttgcgctgcatggtacttgtgaagcttaaatattttgagtgttctactgtgtctaggattgttgggattgtacatatggtactctttcataaatgataaatgattctgaatgttagtgttttatgttcatataggaaatattttcattgagtccaaaataccactgttttgttgatggacttgaatgcatttgtctcttcttgatgaagcg

SEQ ID NO: 27258 - DNA, 134 bp, Homo sapiens
agagagagagacacaaaactcccgaagccccagctggagcagccctactctgatagatggttggtagcctcacattccgcctgttctgtttcgtcttcactgtgaggtgtccccaaaacacaaaaaaattcgtg

SEQ ID NO: 27259 - DNA, 688 bp, Homo sapiens
agaccgagttcgtctattttcacttctttgcccctcgcgcaaccctcagtttcctcttcatgcctctactcctatgcagtttgacctctcagtgtgcagctggtgatagatggaaacccttgttcataagctttgtggcactgtcggcaggatgaggggacttctggatcctcactggtcactgtggcagagtggttggtgttgtctgctccctagacaggaacccactgaagaatctgacattttttgatatgctggcattcattgttacagcccatcatcccagccatcaatccaggacatggggtccgtgcccacggtgggaaggaggaggaggaagctggctttgttctgacgttgggcttcttctgctccaccagtactttctgtgggggaaataggtaaagaaatggctgttcagatgagaagatgtgtcagtaaacttttgctacagtgatgctgcaaaacaaatcactggtgactttcagtggcacacagcaataaacatttatttagctcagggattgacaatctttttttttttttaaagggccaaatagtaaatattttaggtgtttcaggccatacagtctctgaactctgaacttgtagcacaacagtagccttagatgctatgcaaatggaggagcatgactgtgttccaataaaactttatttatggacacta

SEQ ID NO: 27260 - DNA, 753 bp, Homo sapiens
agaccgagttcgtctattttcacttctttgcccctcgcgcaaccctcagtttcctcttcatgcctctactcctatgcagtttgacctctcagtgtgcagctggtgatagatggaaacccttgttcataagctttgtggcactgtcggcaggatgaggggacttctggatcctcactggtcactgtggcagagtggttggtgttgtctgctccctagacaggaacccactgaagaatctgacattttttgatatgctggcattcattgttacagcccatcatcccagccatcaatccaggacatggggtccgtgcccacggtgggaaggaggaggaggaagctggctttgttctgacgttgggcttcttctgctccaccagtactttctgtgggggaaataggtaaagaaatggctgttcagatgagaagatgtgtcagtaaacttttgctacagtgatgctgcaaaacaaatcactggtgactttcagtggcacacagcaataaacatttatttagctcagggattgacaatctttttttttttttaaagggccaaatagtaaatattttaggtgtttcaggccatacagtctctgaactctgaacttgtagcacaacagtagccttagatgctatgcaaatggaggagcatgactgtgttccaataaaactttatttatggacactaaaattggaatttcatggaatttttatatgttaagaaatattatactttgatttttttcaaccacg

SEQ ID NO: 27261 - DNA, 498 bp, Homo sapiens
ttcatatgtctaagatatgagagtaaaaaaagatcatgagaaaatatttctgtaaacattgtggccatcttgttcttttgactaggtagttttgtatcattctagagaataaaagaataaaactgtcagtacatattttctagtaaaaatgtgaattgaagaaacatataaggaattaagttgtttataacagtgtcatctcataataaaaccaaaacacttttaaaatgcaagtacatatacttaagtaaacacatttgcactttctttttccactttattaaataaataaaaaaaaatccctaaatacagtattatgacaccacctactgggaatttagaagacagcaatcaagttatctaagtataactatctttttttcaactgcaagcaaaatatatcaataaagtgatcaaaagaatggccaatatatacacactggtgacagcatagagacatttaacaaaattattagtcaattttcatgttagggaagc

SEQ ID NO: 27262 - DNA, 431 bp, Homo sapiens
ccaaaaaaaaaagaaaagaaaaaagaaaaaaaaatattattcaatagccaggagttgcagggagttagaatgaggagtcagtatttaatgggtacagagtttcatttggggaagatgaaaaatttctagatggttacacaaccatgtgagtgtactcagtcccacagagcagtacattaaaaaatgcctaaaatggccgggtgtggtgactcacacctgtaatcccaacactttgggaggccaaggtgagcagatcacttgaggtcaggaattcgagaccagcctggccaacatggtgaaaccccgtctttactaaaaatacaaaaattagccaggcgtggtggcgggcacctgtagtcccagctactcgggaggctgaggctggagaatcgcttgaacccaggaggtggaggttgcagtgaacctagatt

SEQ ID NO: 27263 - DNA, 4327 bp, Homo sapiens
  misc_feature (737)..(737): n is a, c, g, or t
  misc_feature (775)..(775): n is a, c, g, or t
  misc_feature (839)..(839): n is a, c, g, or t
  misc_feature (893)..(893): n is a, c, g, or t
  misc_feature (943)..(943): n is a, c, g, or t
agatccttccttctctcctccttcttcattctacaccacccccaacacatatccctgcaccccgcccattctttgctctctctcctttcttacacttaactccttcttgctccacagcctaacatgctgattaacaggaccccaaaggtttgggtgggtattaggggccttctcaacaaaagcagcacactcttgagcttgttcttccttttgttgccatctcagataaaaaggccccatgagggaggagacagataagtatagacttggtattctgataactctgtgttacatgggatcagatgtaaatgagttgtaccctgtggtgtttcatgctctgctgtgttgtcttctcatggtgagcttttctgtgcccttatttcatccagctctggtttctgtgtttcatgttatttctcctagcctctgtaaactctgcagcatactaataatgctctggctttctgattaaagataaatggcttactatcatcacccctggcttgagggccagctcacatgtaatcccttataggattccaaagttgttaaataaatgcagttctttttgtcattttgaagcattcaaaaatttttcaagaaaagctatgatcatataaatagaaattttatccagaatgttacagtgtagcatttgtgaataaatgtgtaggtgctgtatttgctcagactctagtttgggttgtgttttcttttccctttttttttttgagacngggtctctctctgtcatctgggctgcagtgcagtggtntaatcacagctcactgcaacctctactcccaggctcaagcaatcctcctgagtagctgggactngagacatgcgccacaacgcccagctaatttttaggtttttctttcacatagacngggtctcactctgttggccaggctggtttcgaactcctggactcaagcanttccccccacctcagcctcctaaagtgctgggattacaggcctgagccaccatacccagcaagttatattttctttttccttatatagagtaaaataagggtgagtgaccgagaggttgatgcatagctagatcaccagtttaaatgccttcccacacacccctttcctcctgttccctccacctacaggttgtagatgagcatgagagtgtggagcagagttggcgagtgcaagtcgagcccatcaacctggacagctgtctccgtgctttcaccagtgaggaagagctaggggaagatgagatatactactgttccaagtgtaagacccactgctttagcaacaaagaagctggatctctggaggcttccacccttcctgattattcaccttaagcgatttcaatttgtaaatgatcagtggataaaatcacagaaaattgtcaaatttcctcgggaaagttttgatccgagtgcttttttggtaccacgagacccggctctctgccagcatcaaccactcacaccccagggggatgagctctccaagcccaggattctggcaagagaggtgaagaaagtggatgtgcagagtttggctggggaagaggacatgctcctgagcaaaagcccatcctcactcagcgctaacatcagcagcagcccaaaaggttctccttcttcatcaagaaaaagtggaaccagctgtccctccagcaaaaacagcagccctaatagctgcccacggactttggggaggagcaaagggaggctccggctgccccagattggcagcaaaaataaactgtcaagtagtaagaagaacttggatgccagcaaagagaatggggctgggcagatctgtgagctggctgatgccttgagctgagggcatatgcgggggggcagccaaccagagctggtcactcctcaggaccacgaggtagctttgggcaatggattcctttatgagcatgaagcatatggcaatggctacagcaatggtcagcttggaaaccacagtgaagaagacagcactgatgaccaaagagaagacactcatattaagcctatttataatctatatgcaatttcatgccattcaggaattctgagtgggggccattacgtcacttatgccaaaaacccaaactgcaagtggtactgctacaatggcagcatctgtgaggaacatcaccctgatgaaattgacaccgactctgcctacattcttttctatgagcagcagaggatagactacgcacaatttctgccaaagattgatggcaaaaagatggcagacacaagcagtatggatgaagactttgagtctgattacgaaaagtactgtgtgttacagtaaagctaccactctggctgctagatagcttggtggggagggagatgactccttgtagctgatacttggcaaaagtgtcactgagaggcaagctaaatgtagttattttatcctgttagaatacaaattctaattaaaatagttaactttaagagtagtagtaattttattttgaagtctcatgcaagttgtctgatagagaactttcaggcagatcccaccattagcctgtaaacaaaaagtttggcaccagccacctgggaccaaataagaattcaattgtgcttgtccagatatgaacaaatatgtagtgagtatagagtttatcaataatcataacaaatattaaagatttccttggagtcaaagtaaaaaacaaaaaattgtaatgttgtctagggatgacatgatatgctacctcctttttcctgaagttttattccattctgttgacaagatggagaaagcaagatcatgaaggtgtgcaaatgattcttacggcatgggcgaggatttttcaatttattttttaaagtttccataccctttctttgtctttcttgctttttgtttttgccgttgtgtttatgtttgagatacaaccagtcattggtggcaggggcatagagtggtcagtctgaaagggaggctctcttaagagctatgtgccttccacccagagggagacccagtagaaagaaaaacatcctgggaaatccagctaccatggccctcccagtggaggcatcttacatttaggatacttcaggtatcctcagaaatgtattctgcaccccccggccccgcccatgctgagggaaggggagcagttgccaatatttgcaccatcttcacatgcacatgttgcaacaagagcttctgggaaggtaagcggcatcggagctagatcacgtttcacaattagtggtggttcttttccatgtttgttttgcactttaaaaaagagagaacacatgcaaatgaacttgcttgtgtgtatttgatggctccaagggctataaattacaaacaaaacacatcccagacattaggagttcataagtatatttaatgaaattggtggttttaggaagtcaactttagttttgctttgtttgcatgtccactaatttttttattttgatattagtcttttttaaaaaattttacagtagtcattgaaagttatgtttctttgtttacttcattttttcctctaaatattcaagactgggacaaaagtataaatattatttatttcaggtagaatttttttggtgtagttttttaatatatacttgaaggaaatgtttcaccttatttttggtctttgtttattcatttagaccctgcaagttgattctcattaattgtcagattccactacactttcttcctcataggtagtaattaccagtgtaactaagcatttgtgttctgatatctgaggccagtaactattaatatctagttctcagagcatttggaaaggttatcttaaatggctacctaaattgaaatccttttcagaaaaaatataattgcaaataggtaggagtggcctaaattatctaatgtaataaagtcagacaaaatgcatactttatagttcaagattttcggtatataaaatctgtcctttcctacctggacatgtcccattaaaaagtggaagattttaaataatttctttacagatgttttatttaagcaggtagcacaatctactaatgttgtttgatctgtgtttgttatactggttgtaattaatttttttaattcatgaactagcggaaaatttattaaattaactattaaccacattcaccttgtaaatgactgtataaaacttgttgacaatgcactgactttagaaagatgttaatgtgcataaatagagtgtaaataaaatagtgttgatgtactgaaatatgaactgtataaaaagtattagtaattgtatatggggtgtacctgtttatctgtaactgttatccaaacaaattaaatactgtggatgcctt

SEQ ID NO: 27264 - DNA, 3272 bp, Homo sapiens
ggcattatgcaaatgagaagctttccttctcttcacctcatctcctgatctgcacaaaagtgactgtaggacccagtgttgtagatgagcatgagagtgtggagcagagttggcgagtgcaagtcgagcccatcaacctggacagctgtctccgtgctttcaccagtgaggaagagctaggggaagatgagatatactactgttccaagtgtaagacccactgctttagcaacaaagaagctggatctctggaggcttccacccttcctgattattcaccttaagcgatttcaatttgtaaatgatcagtggataaaatcacagaaaattgtcaaatttcctcgggaaagttttgatccgagtgcttttttggtaccacgagacccggctctctgccagcatcaaccactcacaccccagggggatgagctctccaagcccaggattctggcaagagaggtgaagaaagtggatgtgcagagtttggctggggaagaggacatgctcctgagcaaaagcccatcctcactcagcgctaacatcagcagcagcccaaaaggttctccttcttcatcaagaaaaagtggaaccagctgtccctccagcaaaaacagcagccctaatagctgcccacggactttggggaggagcaaagggaggctccggctgccccagattggcagcaaaaataaactgtcaagtagtaagaagaacttggatgccagcaaagagaatggggctgggcagatctgtgagctggctgatgccttgagctgagggcatatgcgggggggcagccaaccagagctggtcactcctcaggaccacgaggtagctttgggcaatggattcctttatgagcatgaagcatatggcaatggctacagcaatggtcagcttggaaaccacagtgaagaagacagcactgatgaccaaagagaagacactcatattaagcctatttataatctatatgcaatttcatgccattcaggaattctgagtgggggccattacgtcacttatgccaaaaacccaaactgcaagtggtactgctacaatggcagcatctgtgaggaacatcaccctgatgaaattgacaccgactctgcctacattcttttctatgagcagcagaggatagactacgcacaatttctgccaaagattgatggcaaaaagatggcagacacaagcagtatggatgaagactttgagtctgattacgaaaagtactgtgtgttacagtaaagctaccactctggctgctagatagcttggtggggagggagatgactccttgtagctgatacttggcaaaagtgtcactgagaggcaagctaaatgtagttattttatcctgttagaatacaaattctaattaaaatagttaactttaagagtagtagtaattttattttgaagtctcatgcaagttgtctgatagagaactttcaggcagatcccaccattagcctgtaaacaaaaagtttggcaccagccacctgggaccaaataagaattcaattgtgcttgtccagatatgaacaaatatgtagtgagtatagagtttatcaataatcataacaaatattaaagatttccttggagtcaaagtaaaaaacaaaaaattgtaatgttgtctagggatgacatgatatgctacctcctttttcctgaagttttattccattctgttgacaagatggagaaagcaagatcatgaaggtgtgcaaatgattcttacggcatgggcgaggatttttcaatttattttttaaagtttccataccctttctttgtctttcttgctttttgtttttgccgttgtgtttatgtttgagatacaaccagtcattggtggcaggggcatagagtggtcagtctgaaagggaggctctcttaagagctatgtgccttccacccagagggagacccagtagaaagaaaaacatcctgggaaatccagctaccatggccctcccagtggaggcatcttacatttaggatacttcaggtatcctcagaaatgtattctgcaccccccggccccgcccatgctgagggaaggggagcagttgccaatatttgcaccatcttcacatgcacatgttgcaacaagagcttctgggaaggtaagcggcatcggagctagatcacgtttcacaattagtggtggttcttttccatgtttgttttgcactttaaaaaagagagaacacatgcaaatgaacttgcttgtgtgtatttgatggctccaagggctataaattacaaacaaaacacatcccagacattaggagttcataagtatatttaatgaaattggtggttttaggaagtcaactttagttttgctttgtttgcatgtccactaatttttttattttgatattagtcttttttaaaaaattttacagtagtcattgaaagttatgtttctttgtttacttcattttttcctctaaatattcaagactgggacaaaagtataaatattatttatttcaggtagaatttttttggtgtagttttttaatatatacttgaaggaaatgtttcaccttatttttggtctttgtttattcatttagaccctgcaagttgattctcattaattgtcagattccactacactttcttcctcataggtagtaattaccagtgtaactaagcatttgtgttctgatatctgaggccagtaactattaatatctagttctcagagcatttggaaaggttatcttaaatggctacctaaattgaaatccttttcagaaaaaatataattgcaaataggtaggagtggcctaaattatctaatgtaataaagtcagacaaaatgcatactttatagttcaagattttcggtatataaaatctgtcctttcctacctggacatgtcccattaaaaagtggaagattttaaataatttctttacagatgttttatttaagcaggtagcacaatctactaatgttgtttgatctgtgtttgttatactggttgtaattaatttttttaattcatgaactagcggaaaatttattaaattaactattaaccacattcaccttgtaaatgactgtataaaacttgttgacaatgcactgactttagaaagatgttaatgtgcataaatagagtgtaaataaaatagtgttgatgtactgaaatatgaactgtataaaaagtattagtaattgtatatggggtgtacctgtttatctgtaactgttatccaaacaaattaaatactgtggatgcctt

SEQ ID NO: 27265 - DNA, 3317 bp, Homo sapiens
ggcattatgcaaatgagaagctttccttctcttcacctcatctcctgatctgcacaaaagtgactgtaggacccagtgttgtagatgagcatgagagtgtggagcagagttggcgagtgcaagtcgagcccatcaacctggacagctgtctccgtgctttcaccagtgaggaagagctaggggaagatgagatatactactgttccaagtgtaagacccactgctttagcaacaaagaagctggatctctggaggcttccacccttcctgattattcaccttaagcgatttcaatttgtaaatgatcagtggataaaatcacagaaaattgtcaaatttcctcgggaaagttttgatccgagtgcttttttggtaccacgagacccggctctctgccagcatcaaccactcacaccccagggggatgagctctccaagcccaggattctggcaagagaggtgaagaaagtggatgtgcagagtttggctggggaagaggacatgctcctgagcaaaagcccatcctcactcagcgctaacatcagcagcagcccaaaaggttctccttcttcatcaagaaaaagtggaaccagctgtccctccagcaaaaacagcagccctaatagctgcccacggactttggggaggagcaaagggaggctccggctgccccagattggcagcaaaaataaactgtcaagtagtaagaagaacttggatgccagcaaagagaatggggctgggcagatctgtgagctggctgatgccttgagctgagggcatatgcgggggggcagccaaccagagctggtcactcctcaggaccacgaggtagctttgggcaatggattcctttatgagcatgaagcatatggcaatggctacagcaatggtcagcttggaaaccacagtgaagaagacagcactgatgaccaaagagaagacactcatattaagcctatttataatctatatgcaatttcatgccattcaggaattctgagtgggggccattacgtcacttatgccaaaaacccaaactgcaagtggtactgctacaatggcagcatctgtgaggaacatcaccctgatgaaattgacaccgactctgcctacattcttttctatgagcagcagaggatagactacgcacaatttctgccaaagattgatggcaaaaagatggcagacacaagcagtatggatgaagactttgagtctgattacgaaaagtactgtgtgttacagtaaagctaccactctggctgctagatagcttggtggggagggagatgactccttgtagctgatacttggcaaaagtgtcactgagaggcaagctaaatgtagttattttatcctgttagaatacaaattctaattaaaatagttaactttaagagtagtagtaattttattttgaagtctcatgcaagttgtctgatagagaactttcaggcagatcccaccattagcctgtaaacaaaaagtttggcaccagccacctgggaccaaataagaattcaattgtgcttgtccagatatgaacaaatatgtagtgagtatagagtttatcaataatcataacaaatattaaagatttccttggagtcaaagtaaaaaacaaaaaattgtaatgttgtctagggatgacatgatatgctacctcctttttcctgaagttttattccattctgttgacaagatggagaaagcaagatcatgaaggtgtgcaaatgattcttacggcatgggcgaggatttttcaatttattttttaaagtttccataccctttctttgtctttcttgctttttgtttttgccgttgtgtttatgtttgagatacaaccagtcattggtggcaggggcatagagtggtcagtctgaaagggaggctctcttaagagctatgtgccttccacccagagggagacccagtagaaagaaaaacatcctgggaaatccagctaccatggccctcccagtggaggcatcttacatttaggatacttcaggtatcctcagaaatgtattctgcaccccccggccccgcccatgctgagggaaggggagcagttgccaatatttgcaccatcttcacatgcacatgttgcaacaagagcttctgggaaggtaagcggcatcggagctagatcacgtttcacaattagtggtggttcttttccatgtttgttttgcactttaaaaaagagagaacacatgcaaatgaacttgcttgtgtgtatttgatggctccaagggctataaattacaaacaaaacacatcccagacattaggagttcataagtatatttaatgaaattggtggttttaggaagtcaactttagttttgctttgtttgcatgtccactaatttttttattttgatattagtcttttttaaaaaattttacagtagtcattgaaagttatgtttctttgtttacttcattttttcctctaaatattcaagactgggacaaaagtataaatattatttatttcaggtagaatttttttggtgtagttttttaatatatacttgaaggaaatgtttcaccttatttttggtctttgtttattcatttagaccctgcaagttgattctcattaattgtcagattccactacactttcttcctcataggtagtaattaccagtgtaactaagcatttgtgttctgatatctgaggccagtaactattaatatctagttctcagagcatttggaaaggttatcttaaatggctacctaaattgaaatccttttcagaaaaaatataattgcaaataggtaggagtggcctaaattatctaatgtaataaagtcagacaaaatgcatactttatagttcaagattttcggtatataaaatctgtcctttcctacctggacatgtcccattaaaaagtggaagattttaaataatttctttacagatgttttatttaagcaggtagcacaatctactaatgttgtttgatctgtgtttgttatactggttgtaattaatttttttaattcatgaactagcggaaaatttattaaattaactattaaccacattcaccttgtaaatgactgtataaaacttgttgacaatgcactgactttagaaagatgttaatgtgcataaatagagtgtaaataaaatagtgttgatgtactgaaatatgaactgtataaaaagtattagtaattgtatatggggtgtacctgtttatctgtaactgttatccaaacaaattaaatactgtggatgcctttatgtactgtttttcctcatacaagtaaacacagaaagtcaaatt

SEQ ID NO: 27266 - DNA, 3302 bp, Homo sapiens
  misc_feature (3246)..(3246): n is a, c, g, or t
  misc_feature (3252)..(3252): n is a, c, g, or t
ggcattatgcaaatgagaagctttccttctcttcacctcatctcctgatctgcacaaaagtgactgtaggacccagtgttgtagatgagcatgagagtgtggagcagagttggcgagtgcaagtcgagcccatcaacctggacagctgtctccgtgctttcaccagtgaggaagagctaggggaagatgagatatactactgttccaagtgtaagacccactgctttagcaacaaagaagctggatctctggaggcttccacccttcctgattattcaccttaagcgatttcaatttgtaaatgatcagtggataaaatcacagaaaattgtcaaatttcctcgggaaagttttgatccgagtgcttttttggtaccacgagacccggctctctgccagcatcaaccactcacaccccagggggatgagctctccaagcccaggattctggcaagagaggtgaagaaagtggatgtgcagagtttggctggggaagaggacatgctcctgagcaaaagcccatcctcactcagcgctaacatcagcagcagcccaaaaggttctccttcttcatcaagaaaaagtggaaccagctgtccctccagcaaaaacagcagccctaatagctgcccacggactttggggaggagcaaagggaggctccggctgccccagattggcagcaaaaataaactgtcaagtagtaagaagaacttggatgccagcaaagagaatggggctgggcagatctgtgagctggctgatgccttgagctgagggcatatgcgggggggcagccaaccagagctggtcactcctcaggaccacgaggtagctttgggcaatggattcctttatgagcatgaagcatatggcaatggctacagcaatggtcagcttggaaaccacagtgaagaagacagcactgatgaccaaagagaagacactcatattaagcctatttataatctatatgcaatttcatgccattcaggaattctgagtgggggccattacgtcacttatgccaaaaacccaaactgcaagtggtactgctacaatggcagcatctgtgaggaacatcaccctgatgaaattgacaccgactctgcctacattcttttctatgagcagcagaggatagactacgcacaatttctgccaaagattgatggcaaaaagatggcagacacaagcagtatggatgaagactttgagtctgattacgaaaagtactgtgtgttacagtaaagctaccactctggctgctagatagcttggtggggagggagatgactccttgtagctgatacttggcaaaagtgtcactgagaggcaagctaaatgtagttattttatcctgttagaatacaaattctaattaaaatagttaactttaagagtagtagtaattttattttgaagtctcatgcaagttgtctgatagagaactttcaggcagatcccaccattagcctgtaaacaaaaagtttggcaccagccacctgggaccaaataagaattcaattgtgcttgtccagatatgaacaaatatgtagtgagtatagagtttatcaataatcataacaaatattaaagatttccttggagtcaaagtaaaaaacaaaaaattgtaatgttgtctagggatgacatgatatgctacctcctttttcctgaagttttattccattctgttgacaagatggagaaagcaagatcatgaaggtgtgcaaatgattcttacggcatgggcgaggatttttcaatttattttttaaagtttccataccctttctttgtctttcttgctttttgtttttgccgttgtgtttatgtttgagatacaaccagtcattggtggcaggggcatagagtggtcagtctgaaagggaggctctcttaagagctatgtgccttccacccagagggagacccagtagaaagaaaaacatcctgggaaatccagctaccatggccctcccagtggaggcatcttacatttaggatacttcaggtatcctcagaaatgtattctgcaccccccggccccgcccatgctgagggaaggggagcagttgccaatatttgcaccatcttcacatgcacatgttgcaacaagagcttctgggaaggtaagcggcatcggagctagatcacgtttcacaattagtggtggttcttttccatgtttgttttgcactttaaaaaagagagaacacatgcaaatgaacttgcttgtgtgtatttgatggctccaagggctataaattacaaacaaaacacatcccagacattaggagttcataagtatatttaatgaaattggtggttttaggaagtcaactttagttttgctttgtttgcatgtccactaatttttttattttgatattagtcttttttaaaaaattttacagtagtcattgaaagttatgtttctttgtttacttcattttttcctctaaatattcaagactgggacaaaagtataaatattatttatttcaggtagaatttttttggtgtagttttttaatatatacttgaaggaaatgtttcaccttatttttggtctttgtttattcatttagaccctgcaagttgattctcattaattgtcagattccactacactttcttcctcataggtagtaattaccagtgtaactaagcatttgtgttctgatatctgaggccagtaactattaatatctagttctcagagcatttggaaaggttatcttaaatggctacctaaattgaaatccttttcagaaaaaatataattgcaaataggtaggagtggcctaaattatctaatgtaataaagtcagacaaaatgcatactttatagttcaagattttcggtatataaaatctgtcctttcctacctggacatgtcccattaaaaagtggaagattttaaataatttctttacagatgttttatttaagcaggtagcacaatctactaatgttgtttgatctgtgtttgttatactggttgtaattaatttttttaattcatgaactagcggaaaatttattaaattaactattaaccacattcaccttgtaaatgactgtataaaacttgttgacaatgcactgactttagaaagatgttaatgtgcataaatagagtgtaaataaaatagtgttgatgtactgaaatatgaactgtataaaaagtattagtaattgtatatgggtgactattattggactgtatccaacaatanatctgngatgctcttgtctgttttctatacaagacacagagtaaatcaaaaaaaaa

SEQ ID NO: 27267 - DNA, 3218 bp, Homo sapiens
ggcattatgcaaatgagaagctttccttctcttcacctcatctcctgatctgcacaaaagtgactgtaggacccagtgttgtagatgagcatgagagtgtggagcagagttggcgagtgcaagtcgagcccatcaacctggacagctgtctccgtgctttcaccagtgaggaagagctaggggaagatgagatatactactgttccaagtgtaagacccactgctttagcaacaaagaagctggatctctggaggcttccacccttcctgattattcaccttaagcgatttcaatttgtaaatgatcagtggataaaatcacagaaaattgtcaaatttcctcgggaaagttttgatccgagtgcttttttggtaccacgagacccggctctctgccagcatcaaccactcacaccccagggggatgagctctccaagcccaggattctggcaagagaggtgaagaaagtggatgtgcagagtttggctggggaagaggacatgctcctgagcaaaagcccatcctcactcagcgctaacatcagcagcagcccaaaaggttctccttcttcatcaagaaaaagtggaaccagctgtccctccagcaaaaacagcagccctaatagctgcccacggactttggggaggagcaaagggaggctccggctgccccagattggcagcaaaaataaactgtcaagtagtaagaagaacttggatgccagcaaagagaatggggctgggcagatctgtgagctggctgatgccttgagctgagggcatatgcgggggggcagccaaccagagctggtcactcctcaggaccacgaggtagctttgggcaatggattcctttatgagcatgaagcatatggcaatggctacagcaatggtcagcttggaaaccacagtgaagaagacagcactgatgaccaaagagaagacactcatattaagcctatttataatctatatgcaatttcatgccattcaggaattctgagtgggggccattacgtcacttatgccaaaaacccaaactgcaagtggtactgctacaatggcagcatctgtgaggaacatcaccctgatgaaattgacaccgactctgcctacattcttttctatgagcagcagaggatagactacgcacaatttctgccaaagattgatggcaaaaagatggcagacacaagcagtatggatgaagactttgagtctgattacgaaaagtactgtgtgttacagtaaagctaccactctggctgctagatagcttggtggggagggagatgactccttgtagctgatacttggcaaaagtgtcactgagaggcaagctaaatgtagttattttatcctgttagaatacaaattctaattaaaatagttaactttaagagtagtagtaattttattttgaagtctcatgcaagttgtctgatagagaactttcaggcagatcccaccattagcctgtaaacaaaaagtttggcaccagccacctgggaccaaataagaattcaattgtgcttgtccagatatgaacaaatatgtagtgagtatagagtttatcaataatcataacaaatattaaagatttccttggagtcaaagtaaaaaacaaaaaattgtaatgttgtctagggatgacatgatatgctacctcctttttcctgaagttttattccattctgttgacaagatggagaaagcaagatcatgaaggtgtgcaaatgattcttacggcatgggcgaggatttttcaatttattttttaaagtttccataccctttctttgtctttcttgctttttgtttttgccgttgtgtttatgtttgagatacaaccagtcattggtggcaggggcatagagtggtcagtctgaaagggaggctctcttaagagctatgtgccttccacccagagggagacccagtagaaagaaaaacatcctgggaaatccagctaccatggccctcccagtggaggcatcttacatttaggatacttcaggtatcctcagaaatgtattctgcaccccccggccccgcccatgctgagggaaggggagcagttgccaatatttgcaccatcttcacatgcacatgttgcaacaagagcttctgggaaggtaagcggcatcggagctagatcacgtttcacaattagtggtggttcttttccatgtttgttttgcactttaaaaaagagagaacacatgcaaatgaacttgcttgtgtgtatttgatggctccaagggctataaattacaaacaaaacacatcccagacattaggagttcataagtatatttaatgaaattggtggttttaggaagtcaactttagttttgctttgtttgcatgtccactaatttttttattttgatattagtcttttttaaaaaattttacagtagtcattgaaagttatgtttctttgtttacttcattttttcctctaaatattcaagactgggactatatacttgaaggaaatgtttcaccttatttttggtctttgtttattcatttagaccctgcaagttgattctcattaattgtcagattccactacactttcttcctcataggtagtaattaccagtgtaactaagcatttgtgttctgatatctgaggccagtaactattaatatctagttctcagagcatttggaaaggttatcttaaatggctacctaaattgaaatccttttcagaaaaaatataattgcaaataggtaggagtggcctaaattatctaatgtaataaagtcagacaaaatgcatactttatagttcaagattttcggtatataaaatctgtcctttcctacctggacatgtcccattaaaaagtggaagattttaaataatttctttacagatgttttatttaagcaggtagcacaatctactaatgttgtttgatctgtgtttgttatactggttgtaattaatttttttaattcatgaactagcggaaaatttattaaattaactattaaccacattcaccttgtaaatgactgtataaaacttgttgacaatgcactgactttagaaagatgttaatgtgcataaatagagtgtaaataaaatagtgttgatgtactgaaatatgaactgtataaaaagtattagtaattgtatatggggtgtacctgtttatctgtaactgttatccaaacaaattaaatactgtggatgcctt

SEQ ID NO: 27268 - DNA, 3216 bp, Homo sapiens
ggcattatgcaaatgagaagctttccttctcttcacctcatctcctgatctgcacaaaagtgactgtaggacccagtgttgtagatgagcatgagagtgtggagcagagttggcgagtgcaagtcgagcccatcaacctggacagctgtctccgtgctttcaccagtgaggaagagctaggggaagatgagatatactactgttccaagtgtaagacccactgctttagcaacaaagaagctggatctctggaggcttccacccttcctgattattcaccttaagcgatttcaatttgtaaatgatcagtggataaaatcacagaaaattgtcaaatttcctcgggaaagttttgatccgagtgcttttttggtaccacgagacccggctctctgccagcatcaaccactcacaccccagggggatgagctctccaagcccaggattctggcaagagaggtgaagaaagtggatgtgcagagtttggctggggaagaggacatgctcctgagcaaaagcccatcctcactcagcgctaacatcagcagcagcccaaaaggttctccttcttcatcaagaaaaagtggaaccagctgtccctccagcaaaaacagcagccctaatagctgcccacggactttggggaggagcaaagggaggctccggctgccccagattggcagcaaaaataaactgtcaagtagtaagaagaacttggatgccagcaaagagaatggggctgggcagatctgtgagctggctgatgccttgagctgagggcatatgcgggggggcagccaaccagagctggtcactcctcaggaccacgaggtagctttgggcaatggattcctttatgagcatgaagcatatggcaatggctacagcaatggtcagcttggaaaccacagtgaagaagacagcactgatgaccaaagagaagacactcatattaagcctatttataatctatatgcaatttcatgccattcaggaattctgagtgggggccattacgtcacttatgccaaaaacccaaactgcaagtggtactgctacaatggcagcatctgtgaggaacatcaccctgatgaaattgacaccgactctgcctacattcttttctatgagcagcagaggatagactacgcacaatttctgccaaagattgatggcaaaaagatggcagacacaagcagtatggatgaagactttgagtctgattacgaaaaggagatgactccttgtagctgatacttggcaaaagtgtcactgagaggcaagctaaatgtagttattttatcctgttagaatacaaattctaattaaaatagttaactttaagagtagtagtaattttattttgaagtctcatgcaagttgtctgatagagaactttcaggcagatcccaccattagcctgtaaacaaaaagtttggcaccagccacctgggaccaaataagaattcaattgtgcttgtccagatatgaacaaatatgtagtgagtatagagtttatcaataatcataacaaatattaaagatttccttggagtcaaagtaaaaaacaaaaaattgtaatgttgtctagggatgacatgatatgctacctcctttttcctgaagttttattccattctgttgacaagatggagaaagcaagatcatgaaggtgtgcaaatgattcttacggcatgggcgaggatttttcaatttattttttaaagtttccataccctttctttgtctttcttgctttttgtttttgccgttgtgtttatgtttgagatacaaccagtcattggtggcaggggcatagagtggtcagtctgaaagggaggctctcttaagagctatgtgccttccacccagagggagacccagtagaaagaaaaacatcctgggaaatccagctaccatggccctcccagtggaggcatcttacatttaggatacttcaggtatcctcagaaatgtattctgcaccccccggccccgcccatgctgagggaaggggagcagttgccaatatttgcaccatcttcacatgcacatgttgcaacaagagcttctgggaaggtaagcggcatcggagctagatcacgtttcacaattagtggtggttcttttccatgtttgttttgcactttaaaaaagagagaacacatgcaaatgaacttgcttgtgtgtatttgatggctccaagggctataaattacaaacaaaacacatcccagacattaggagttcataagtatatttaatgaaattggtggttttaggaagtcaactttagttttgctttgtttgcatgtccactaatttttttattttgatattagtcttttttaaaaaattttacagtagtcattgaaagttatgtttctttgtttacttcattttttcctctaaatattcaagactgggacaaaagtataaatattatttatttcaggtagaatttttttggtgtagttttttaatatatacttgaaggaaatgtttcaccttatttttggtctttgtttattcatttagaccctgcaagttgattctcattaattgtcagattccactacactttcttcctcataggtagtaattaccagtgtaactaagcatttgtgttctgatatctgaggccagtaactattaatatctagttctcagagcatttggaaaggttatcttaaatggctacctaaattgaaatccttttcagaaaaaatataattgcaaataggtaggagtggcctaaattatctaatgtaataaagtcagacaaaatgcatactttatagttcaagattttcggtatataaaatctgtcctttcctacctggacatgtcccattaaaaagtggaagattttaaataatttctttacagatgttttatttaagcaggtagcacaatctactaatgttgtttgatctgtgtttgttatactggttgtaattaatttttttaattcatgaactagcggaaaatttattaaattaactattaaccacattcaccttgtaaatgactgtataaaacttgttgacaatgcactgactttagaaagatgttaatgtgcataaatagagtgtaaataaaatagtgttgatgtactgaaatatgaactgtataaaaagtattagtaattgtatatggggtgtacctgtttatctgtaactgttatccaaacaaattaaatactgtggatgcctt

SEQ ID NO: 27269 - DNA, 3218 bp, Homo sapiens
ggcattatgcaaatgagaagctttccttctcttcacctcatctcctgatctgcacaaaagtgactgtaggacccagtgttgtagatgagcatgagagtgtggagcagagttggcgagtgcaagtcgagcccatcaacctggacagctgtctccgtgctttcaccagtgaggaagagctaggggaagatgagatatactactgttccaagtgtaagacccactgctttagcaacaaagaagctggatctctggaggcttccacccttcctgattattcaccttaagcgatttcaatttgtaaatgatcagtggataaaatcacagaaaattgtcaaatttcctcgggaaagttttgatccgagtgcttttttggtaccacgagacccggctctctgccagcatcaaccactcacaccccagggggatgagctctccaagcccaggattctggcaagagaggtgaagaaagtggatgtgcagagtttggctggggaagaggacatgctcctgagcaaaagcccatcctcactcagcgctaacatcagcagcagcccaaaaggttctccttcttcatcaagaaaaagtggaaccagctgtccctccagcaaaaacagcagccctaatagctgcccacggactttggggaggagcaaagggaggctccggctgccccagattggcagcaaaaataaactgtcaagtagtaagaagaacttggatgccagcaaagagaatggggctgggcagatctgtgagctggctgatgccttgagctgagggcatatgcgggggggcagccaaccagagctggtcactcctcaggaccacgaggtagctttgggcaatggattcctttatgagcatgaagcatatggcaatggctacagcaatggtcagcttggaaaccacagtgaagaagacagcactgatgaccaaagagaagacactcatattaagcctatttataatctatatgcaatttcatgccattcaggaattctgagtgggggccattacgtcacttatgccaaaaacccaaactgcaagtggtactgctacaatggcagcatctgtgaggaacatcaccctgatgaaattgacaccgactctgcctacattcttttctatgagcagcagaggatagactacgcacaatttctgccaaagattgatggcaaaaagatggcagacacaagcagtatggatgaagactttgagtctgattacgaaaagtactgtgtgttacagtaaagctaccactctggctgctagatagcttggtggggagggagatgactccttgtagctgatacttggcaaaagtgtcactgagaggcaagctaaatgtagttattttatcctgttagaatacaaattctaattaaaatagttaactttaagagtagtagtaattttattttgaagtctcatgcaagttgtctgatagagaactttcaggcagatcccaccattagcctgtaaacaaaaagtttggcaccagccacctgggaccaaataagaattcaattgtgcttgtccagatatgaacaaatatgtagtgagtatagagtttatcaataatcataacaaatattaaagatttccttggagtcaaagtaaaaaacaaaaaattgtaatgttgtctagggatgacatgatatgctacctcctttttcctgaagttttattccattctgttgacaagatggagaaagcaagatcatgaaggtgtgcaaatgattcttacggcatgggcgaggatttttcaatttattttttaaagtttccataccctttctttgtctttcttgctttttgtttttgccgttgtgtttatgtttgagatacaaccagtcattggtggcaggggcatagagtggtcagtctgaaagggaggctctcttaagagctatgtgccttccacccagagggagacccagtagaaagaaaaacatcctgggaaatccagctaccatggccctcccagtggaggcatcttacatttaggatacttcaggtatcctcagaaatgtattctgcaccccccggccccgcccatgctgagggaaggggagcagttgccaatatttgcaccatcttcacatgcacatgttgcaacaagagcttctgggaaggtaagcggcatcggagctagatcacgtttcacaattagtggtggttcttttccatgtttgttttgcactttaaaaaagagagaacacatgcaaatgaacttgcttgtgtgtatttgatggctccaagggctataaattacaaactttaggaagtcaactttagttttgctttgtttgcatgtccactaatttttttattttgatattagtcttttttaaaaaattttacagtagtcattgaaagttatgtttctttgtttacttcattttttcctctaaatattcaagactgggacaaaagtataaatattatttatttcaggtagaatttttttggtgtagttttttaatatatacttgaaggaaatgtttcaccttatttttggtctttgtttattcatttagaccctgcaagttgattctcattaattgtcagattccactacactttcttcctcataggtagtaattaccagtgtaactaagcatttgtgttctgatatctgaggccagtaactattaatatctagttctcagagcatttggaaaggttatcttaaatggctacctaaattgaaatccttttcagaaaaaatataattgcaaataggtaggagtggcctaaattatctaatgtaataaagtcagacaaaatgcatactttatagttcaagattttcggtatataaaatctgtcctttcctacctggacatgtcccattaaaaagtggaagattttaaataatttctttacagatgttttatttaagcaggtagcacaatctactaatgttgtttgatctgtgtttgttatactggttgtaattaatttttttaattcatgaactagcggaaaatttattaaattaactattaaccacattcaccttgtaaatgactgtataaaacttgttgacaatgcactgactttagaaagatgttaatgtgcataaatagagtgtaaataaaatagtgttgatgtactgaaatatgaactgtataaaaagtattagtaattgtatatggggtgtacctgtttatctgtaactgttatccaaacaaattaaatactgtggatgcctt

SEQ ID NO: 27270 - DNA, 3203 bp, Homo sapiens
ggcattatgcaaatgagaagctttccttctcttcacctcatctcctgatctgcacaaaagtgactgtaggacccagtgttgtagatgagcatgagagtgtggagcagagttggcgagtgcaagtcgagcccatcaacctggacagctgtctccgtgctttcaccagtgaggaagagctaggggaagatgagatatactactgttccaagtgtaagacccactgctttagcaacaaagaagctggatctctggaggcttccacccttcctgattattcaccttaagcgatttcaatttgtaaatgatcagtggataaaatcacagaaaattgtcaaatttcctcgggaaagttttgatccgagtgcttttttggtaccacgagacccggctctctgccagcatcaaccactcacaccccagggggatgagctctccaagcccaggattctggcaagagaggtgaagaaagtggatgtgcagagtttggctggggaagaggacatgctcctgagcaaaagcccatcctcactcagcgctaacatcagcagcagcccaaaaggttctccttcttcatcaagaaaaagtggaaccagctgtccctccagcaaaaacagcagccctaatagctgcccacggactttggggaggagcaaagggaggctccggctgccccagattggcagcaaaaataaactgtcaagtagtaagaagaacttggatgccagcaaagagaatggggctgggcagatctgtgagctggctgatgccttgagctgagggcatatgcgggggggcagccaaccagagctggtcactcctcaggaccacgaggtagctttgggcaatggattcctttatgagcatgaagcatatggcaatggctacagcaatggtcagcttggaaaccacagtgaagaagacagcactgatgaccaaagagaagacactcatattaagcctatttataatctatatgcaatttcatgccattcaggaattctgagtgggggccattacgtcacttatgccaaaaacccaaactgcaagtggtactgctacaatggcagcatctgtgagtacgcacaatttctgccaaagattgatggcaaaaagatggcagacacaagcagtatggatgaagactttgagtctgattacgaaaagtactgtgtgttacagtaaagctaccactctggctgctagatagcttggtggggagggagatgactccttgtagctgatacttggcaaaagtgtcactgagaggcaagctaaatgtagttattttatcctgttagaatacaaattctaattaaaatagttaactttaagagtagtagtaattttattttgaagtctcatgcaagttgtctgatagagaactttcaggcagatcccaccattagcctgtaaacaaaaagtttggcaccagccacctgggaccaaataagaattcaattgtgcttgtccagatatgaacaaatatgtagtgagtatagagtttatcaataatcataacaaatattaaagatttccttggagtcaaagtaaaaaacaaaaaattgtaatgttgtctagggatgacatgatatgctacctcctttttcctgaagttttattccattctgttgacaagatggagaaagcaagatcatgaaggtgtgcaaatgattcttacggcatgggcgaggatttttcaatttattttttaaagtttccataccctttctttgtctttcttgctttttgtttttgccgttgtgtttatgtttgagatacaaccagtcattggtggcaggggcatagagtggtcagtctgaaagggaggctctcttaagagctatgtgccttccacccagagggagacccagtagaaagaaaaacatcctgggaaatccagctaccatggccctcccagtggaggcatcttacatttaggatacttcaggtatcctcagaaatgtattctgcaccccccggccccgcccatgctgagggaaggggagcagttgccaatatttgcaccatcttcacatgcacatgttgcaacaagagcttctgggaaggtaagcggcatcggagctagatcacgtttcacaattagtggtggttcttttccatgtttgttttgcactttaaaaaagagagaacacatgcaaatgaacttgcttgtgtgtatttgatggctccaagggctataaattacaaacaaaacacatcccagacattaggagttcataagtatatttaatgaaattggtggttttaggaagtcaactttagttttgctttgtttgcatgtccactaatttttttattttgatattagtcttttttaaaaaattttacagtagtcattgaaagttatgtttctttgtttacttcattttttcctctaaatattcaagactgggacaaaagtataaatattatttatttcaggtagaatttttttggtgtagttttttaatatatacttgaaggaaatgtttcaccttatttttggtctttgtttattcatttagaccctgcaagttgattctcattaattgtcagattccactacactttcttcctcataggtagtaattaccagtgtaactaagcatttgtgttctgatatctgaggccagtaactattaatatctagttctcagagcatttggaaaggttatcttaaatggctacctaaattgaaatccttttcagaaaaaatataattgcaaataggtaggagtggcctaaattatctaatgtaataaagtcagacaaaatgcatactttatagttcaagattttcggtatataaaatctgtcctttcctacctggacatgtcccattaaaaagtggaagattttaaataatttctttacagatgttttatttaagcaggtagcacaatctactaatgttgtttgatctgtgtttgttatactggttgtaattaatttttttaattcatgaactagcggaaaatttattaaattaactattaaccacattcaccttgtaaatgactgtataaaacttgttgacaatgcactgactttagaaagatgttaatgtgcataaatagagtgtaaataaaatagtgttgatgtactgaaatatgaactgtataaaaagtattagtaattgtatatggggtgtacctgtttatctgtaactgttatccaaacaaattaaatactgtggatgcctt

SEQ ID NO: 27271 - DNA, 1922 bp, Homo sapiens
ggcattatgcaaatgagaagctttccttctcttcacctcatctcctgatctgcacaaaagtgactgtaggacccagtgttgtagatgagcatgagagtgtggagcagagttggcgagtgcaagtcgagcccatcaacctggacagctgtctccgtgctttcaccagtgaggaagagctaggggaagatgagatatactactgttccaagtgtaagacccactgctttagcaacaaagaagctggatctctggaggcttccacccttcctgattattcaccttaagcgatttcaatttgtaaatgatcagtggataaaatcacagaaaattgtcaaatttcctcgggaaagttttgatccgagtgcttttttggtaccacgagacccggctctctgccagcatcaaccactcacaccccagggggatgagctctccaagcccaggattctggcaagagaggtgaagaaagtggatgtgcagagtttggctggggaagaggacatgctcctgagcaaaagcccatcctcactcagcgctaacatcagcagcagcccaaaaggttctccttcttcatcaagaaaaagtggaaccagctgtccctccagcaaaaacagcagccctaatagctgcccacggactttggggaggagcaaagggaggctccggctgccccagattggcagcaaaaataaactgtcaagtagtaagaagaacttggatgccagcaaagagaatggggctgggcagatctgtgagctggctgatgccttgagctgagggcatatgcgggggggcagccaaccagagctggtcactcctcaggaccacgaggtagctttgggcaatggattcctttatgagcatgaagcatatggcaatggctacagcaatggtcagcttggaaaccacagtgaagaagacagcactgatgaccaaagagaagacactcatattaagcctatttataatctatatgcaatttcatgccattcaggaattctgagtgggggccattacgtcacttatgccaaaaacccaaactgcaagtggtactgctacaatggcagcatctgtgaggaacatcaccctgatgaaattgacaccgactctgcctacattcttttctatgagcagcagaggatagactacgcacaatttctgccaaagattgatggcaaaaagatggcagacacaagcagtatggatgaagactttgagtctgattacgaaaagtactgtgtgttacagtaaagctaccactctggctgctagatagcttggtggggagggagatgactccttgtagctgatacttggcaaaagtgtcactgagaggcaagctaaatgtagttattttatcctgttagaatacaaattctaattaaaatagttaactttaagagtagtagtaattttattttgaagtctcatgcaagttgtctgatagagaactttcaggcagatcccaccattagcctgtaaacaaaaagtttggcaccagccacctgggaccaaataagaattcaattgtgcttgtccagatatgaacaaatatgtagtgagtatagagtttatcaataatcataacaaatattaaagatttccttggagtcaaagtaaaaaactgtaatatgatggtcagtctagggatgaatctctagtcgcgttcgcctcttgccggtactctgttgccagacatcgactcaggatggagggcacatgattatgaagggggcctaactgatcagtaacgcactcgtgcgaggattctgccatctatgtctggtggtttccttaccctttctctgtcactccttgcttcttgttgcgcgcgttgtctttatttttgtaagacaaccagtcaattggtggcttggggcatcagtgtggctctgtctgaaaggtgaaggctctcttcagag

SEQ ID NO: 27272 - DNA, 375 bp, Homo sapiens
tgtaagacatttgtataggaaatgtggagaataaaaagtttgacatttataacctcaccaaccagcatggttgctaatattttgggtgtgttttcttgggagtgatgtttaaacatattcaagatcttgctgtttaatgaatgtgtatcatgcttctttcactttatcataaacaaccgtgttcctagaagccattcacgaggatggctgagaatggctgcagaatatttcatcagatcaatataagcaggccaccaaataatggtctgcattgggactctgttgctagtgacaagaaacctaagtcaaagttgtttaaacaaaaagagttcattgatcttatattattcagaacttggctttcatttcctggct

SEQ ID NO: 27273 - DNA, 947 bp, Homo sapiens
ctctttccatttctattctctctcacttgaattctggcattatttttagtggcctctactgataatacctaccctagagtacataaaaattatattaaaagaggaagtagcagtatgcataattttaacagattctataatgggtgcctcaaaatatgtattgtgccattccgcaaatttaaaagctaattgaggacaatttttttttaatttcctaaatgagaccaccttggatttttatttttgccatttagatgtttatacttatttagcttttataaaacataagccaagctaaatcccacataacaactctggtattcttccctcatatgagcagtgattttatttgttacccaccttagatagactaagaaagttctagtcttgtttctccttctccccgcttccctggggtttttccttaccataagtattctggtccgagggttcagttcctttagtcaagatgtcacaagtttaaaaacaaaacttgagaaactaccaaaggctcaggagttgtccactttgttgaaatccattaaattagagaagtctcactaacagatgtatttaaatataggtacaacaaataatttctttttctccccttccccaaattacagtcagcatttaaagctgtttatggcttgccatcagcattattctggtaggcttgttagtgttaaaatctatttgatttttttttttttttttgcctcttaaagtctaattttaggatggatgaattcagatgtttaccagagtgtgtattttacataatgttcttgattaaaaagacttgtttgtaaattatccgttgtttttgcatatgcccagttgatgtgataaaattttcattgtcttgccatataaagccttggttatcaacaggtggaatgtagatattgtaaagctttttgtgaattaaaagtgcaaaataaagc

SEQ ID NO: 27274 - DNA, 2227 bp, Homo sapiens
  misc_feature (583)..(583): n is a, c, g, or t
gaggcactaaagaaaaagtggcagtaatgtaatccgcttgttttgccaagccactaaaaataccttggtaaatattagctaatgtgcagccctttgcttgctattaagatttactgatttcaatagaaaggaacctaaaaactgagcatattatataacccagacaccagggacaatctctaatcacctaagagttcataaaatacatattggctctgtctgtggttagattaaatgccattatctaaaaaaagtaggatctgtgcaataataggtctgccatgtgaatgacagttttggttagtggatgaatttatcctgtatcattgcattctctaagaataatccctctcactctgaacaaataaatcaatagcattggctaacccagtgcatgtaaaaaacaccttcagtaaatgccaggttttcccgaataataaagacttccaacaataaagacttcttttaagtctgtttcttacataactgttgtatggagagattaacatggtatcttgtttcttcctggtgtgatcttacttttgtcttgtaaatatgtacttatgtctgtatgttcacctgnatctttgtgaacccttggaaaactcagtatttcagtgggtttcagagaataggccgggagattgatgataagtaagtgtttccggccagttgttattaggcacaacttttaggagaaacaagtgagcgatagagcgtggccaaggagaggaaggcaatgctggaacccaatccacgcctgctgcccagagaccttagctgatggcttgtcatgtcttagcatgttggtattcaagccatgtgatgttggaaagaaaaaatacctattcagcttggggcttggtctgagaacaaccaattgccttggtttaaatcacacgactccactatcaaattaagtgtttccaagtttacacaaattagcgtcagtccactgactgtcgcctacaataaattaggctgagtctaaaagaaatcagtctgcatagaaagaccaacaaccagcaccacttccttgctttttccagccatgaatgcttccagtcggaatgtgtttgacacgttgatcagggtgttgacagaaagtatgttcaaacatcttcggaaatgggtcgtcactcgcttttttgggcattctcggcaaagagcaaggctagtctccaaagatggaaggtgcaacatagaatttggcaatgtggaggcacagtcaaggtttatattctttgtggacatctggacaacggtacttgacctcaagtggagatacaaaatgaccattttcatcacagccttcttggggagttggtttttctttggtctcctgtggtatgcagtagcgtacattcacaaagacctcccggaattccatccttctgccaatcacactccctgtgtggagaatattaatggcttgacctcagcttttctgttttctctggagactcaagtgaccattggatatggattcaggtgtgtgacagaacagtgtgccactgccatttttctgcttatctttcagtctatacttggagttataatcaattctttcatgtgtggggccatcttagccaagatctccaggcccaaaaaacgtgccaagaccattacgttcagcaagaacgcagtgatcagcaaacggggagggaagctttgcctcctaatccgagtggctaatctcaggaagagccttcttattggcagtcacatttatggaaagcttctgaagaccacagtcactcctgaaggagagaccattattttggaccagatcaatatcaactttgtagttgacgctgggaatgaaaatttattcttcatctccccattgacaatttaccatgtcattgatcacaacagccctttcttccacatggcagcggagacccttctccagcaggactttgaattagtggtgtttttagatggcacagtggagtccaccagtgctacctgccaagtccggacatcctatgtcccagaggaggtgctttggggctaccgttttgctcccatagtatccaagacaaaggaagggaaataccgagtggatttccataactttagcaagacagtggaagtggagacccctcactgtgccatgtgcctttataatgagaaagatgttagagccaggatgaagagaggctatgacaaccccaacttcatcttgtcagaagtcaatgaaacagatgacaccaaaatgtaa

SEQ ID NO: 27275 - DNA, 314 bp, Homo sapiens
tcttcatgcacagacttgttcctgatgtctcagtcccacagtcgtgtgcttctcatagtttatttgatccacaagttaagtaattttatctgcattttaccagtaaggataatgactaaaagatcttactaaagttactgcacctacttagtgttaagagattggggccaggtgcggtggctcacacctgtaatcctagcactttgggaggctgaggtgggaggattgcttgagcctgggaggtcgaggctgcaatgagccatgaagtatgccactgtgctccagtctgggtgatagagcaagactctgtctca

SEQ ID NO: 27276 - DNA, 357 bp, Homo sapiens
gccatatgtattttaaatgtattctcttagtggttagcctggggattacaattaacatcttaaaacaatctcttttggattcatatccacttaatttcaatagtggcagtcaagagtcactccaatatacctttattctctcctcactcccttgtgctattattatcatacaaattacatctctatatattataaggcccatcaacacagttttgtaattattgctttagggcagctgtcctttaaaacaggaaaatttacaaacaaaactgtttatattgtctttcaccatacctacataggtacccttacctctgctctttatttcttcatctggatgcaagttaatgtctggtg

SEQ ID NO: 27277 - DNA, 1829 bp, Homo sapiens
  misc_feature (1556)..(1556): n is a, c, g, or t
gttattaacacactgaagctaccgtgtgaggaggtgcctcactcatgtactgcattattatagcttgctaaacataccttggttaataaggaactatttcttgaatgtcacttccttgtctcctgccacgcatctggtggtgggcccggagcccttgttgaccaataggctcaatatttgtgagggagacctggacagcagagtagaggtgtgttaggacacgctgggccctgccagcatttgtgtctgtcacctctaaccacgaagaggataatgacttgagagagcagtgcctgctgctgcagctcctccttcccaatctcaagtgaatacctcttgaattcctctagctgtagcctagaatcatgtatagaaaaggattctgggaaatgtagttccccttaacccaaatgctaacagtacaaactgcagttgtgcagttaagtatgtgtttgtacttatttgttatactggaaacaggagagatatttgtaattatttctgcttaaaagatatcagaatagttatttactattcaggtatcagatttgtttaaaaatgacatttaacttgattatatcattattttcttttccattaaaccctaacaatttttaaagccatgaaataacttaaaaaacagaagtaatttaatcttaccctctcctttggaaagaaaatattccttttttaaagtgaaagcaagtttcaaaaaaagaaaaggaataaagaacagctactccataggcagagcagcggcctggtctgcttgactgagtatccttgcagttatttctggattatatgctaaacaaggggtggattattcatgagttttccaggaaaggggtggagatttcccggaactgagagttcctcccctttttagaccatatagggtaacttccggacattgccttgggatttctaaactgtcatggcgctggcaggagcgccttttagcatgctaatatattataattagtgtataatgagcagcggggacgaccagaggtctctttcattgccatcttggttttggtgagttttggccggcttctttatggcatcctgtgttatcagcagggtctttgtgacctgtatcctgtgccgacctcctatctcatcctgtgactaagaaaatattcttttaatttgacaaatcaagttggatctcattgtgctaaaaaaggtttttaaaaatattatccaatacagtgccatctagtgacaaatcatttacttgctggttattgaaaatagttgactacaagttttatgtcctgataagtcaggaacttcacttctaattgtgcaaattcttaagatattttaagcgactatttctaaataaataaaatatttgtaaatagagagctggaaaatattttctaaccctcaggttttatacatatgtatcacaatgtgtcttatttaatgccacgtggacccaggagtaaaatcaaaatcagtgttttgtctaataaggtggtaataggattattttagaaatgtgatgtaaaggaatgagcatggctttaaaatcaaacagacangagtttgtctatttggacttatttttcttatgacttagcaggtaattactacctgcttggaagtgcaccaagcactatataggtactgcctcattacatattcacaaaactctataggtattttacaaatgaggaaaccggccaggcgcggtggctcacgcctgtaatcccagcactttgggaggccgaggcgggggaatcacgaggtctggagatccagaccatcctggctaacacagtgaaaccccgtctctactaaaaatacaaaaaaaa

SEQ ID NO: 27278 - DNA, 925 bp, Homo sapiens
atttgaactataaattcaaggcatgaaaaagttaggctctggagaaaggattccaacacaataaggtgaattcaataccctgacctttgcctttgtcccgtgatactggattttgtcttttcctaacccggcttagtctcccatccatgcactgagaagggcacaagagaatgtactttcaatagtgcctgggatttcatcttttactttatacagagaatattaaacttaccttgaaagatgtcaccttgaagaagttcccattggctgaatctgggacaatttgaacatccaaataaatatgatagtaatggcttataacccattgaataaaatccatgagtccattcagataatgaacaatcagctgggcacagtagctcacgcctataatcccagcaccttggggctgaagcaggagaatcacttaaggccaggagttcaagaccagcctgggcagcatagttgagacccccgtctgtactttttaaaaataaaaataataaaataaaaaatttttaaggaggtaataaacaacaaggtcaagccccattacagctgattaaaatctaataaatataaaaggaatgataacatcagaaaatcaccataactgtcatagctacaattaattgaggcaagagtcatcaagggatgcccaaattttgggacaataataacctccttacttggaaaatgaaatggtaacttcacagtggagaaagcaaatggacactaagttacccaagtggtaaaagttaacaatcctaataataaaacaaaatgacataatcacttatgtagtattgatgccaaaaaatgtattacctgaatctagtcatgaaggaactccagatcagcccagattgaggaatgctgtacaaatcaagtggcctgtactcttttaaaatgctaataacattta

SEQ ID NO: 27279 - DNA, 438 bp, Homo sapiens
gcttatctacatggatatctgtgtttaataaggagaataacagctaccagatgtgatttgctggatagtggaaagtcacaggactcaaatacctttcctaacggcctgctaactgcaacctctgcctcccggatccaagcgattctcctgccgcagcctgcagagtagctgggattataggcacaccttggtaatccgcccgcctcggcctcccaaagttctaggattacaggtgtgagccactgcacctggcccttccccatagtttaatactttaggcttaggtttttcctttaacagttcaaattccccttgctaagccctaggaaccgtcctttgcagacggaataaggaactattccaaagtacttgctggccggacacagtggtgcaaacctgtaatcccagcactttgggagacggaggcaggaagatctc

SEQ ID NO: 27280 - DNA, 309 bp, Homo sapiens
atggcaaaaatctccagccctacagagactgagcggtgcattgagtccctgattgctgttttccagaagtatgctggaaaggatggttacaaccgcaatctctccaagacggagttcctaagcttcatgaatacagagctggctgcctttacaaagaaccagaaggaccccggtgtccttgaccacatgaagaaactggatgtcagcagtgatgggcagttagatttcccaaaatttcttaatctgattggtggcctagctgtggcttgccatgactccttcctcaaggctgtcccctcccagaagtag

SEQ ID NO: 27281 - DNA, 1487 bp, Homo sapiens
atgatttcatttcccagaaaatgtaaagaatggataccagcaatgattcctggctgttacctattctggaggggtggggttggggagggggttgtccatacctctgtggtatgagtatttcagggaaaaagaaagcaggcatggcacccattcgattttccctgacagcatctgagatccttttggggagacgctgaggagtgtttgctgccatgtactcttacagctctatgctgacactcccatttgatgtggtccagaacttagacctcagtccttggatcagccctgtggtccctgcaagcaggggcatctttctgcatgtgagccagcccccttcctgttcaagggttctgctggatctgggcttttcctgtccttcacttctgggatgattcaccccacatcttccagtaccctgtaaaccattttaaaatatttagaaaactatcctcccaaaaatgcttttgaaaatgagagccctctgtccctgccacttacagctagtctctttgggataggggtgtatgtggagagattcatgtaagtctcacatgagtgacctgtgcccctatgtgtactaatgtgtgtactgggtcagaaggtgccctgggttcccacagaccttggtttcctgcctgggtgggtgggagggagggaacttcagagagtatgtgcgaacagccatagcagagccacccctgccaaggacccagtgagggaaactcaggagcaggtggttggttcagttcccgcgctgatgtctggggcagtgcatgtgtgagaagagaggcgcaaagcagtgaaaggagtgatttggcatccagagggcccgggagccccacggataccccagggaagccactgactcacaccgctgcagaggctcctgggcccaatgcccgacccctgctggccagcatggggcctagcactggaagatgcctcaggtgtgtttggagtgggggaaacggaagtagggcacgctctcagagaccaggatagagagtcagggaacctgggaaagagtagtgccagttccgggtaggctgctgcaccaggccctaccagctcaggctataaacagtctgctttgccccaagtcttttccgtccacccccaacagccttgtcatcacttagctactgatcacgcccatggcttgacattggagggttacattagtggagtccgccacagcttcgaaccctctccccagatgccctttgcctctgctgtggccctggggttttatcaactgtccccttcctatcctcctctccaccctgttttttgttttttttttttttaaataatattttgctatgggggaggggaatatcaaatggacaagatcacttttaaatggtagtttttataagatgttataaacttgtatctttttaccattaaagtgcagtgtatgttccttcgtgatatatttaggatatttaaataaaaggaaaatggggcttttctacatacta

SEQ ID NO: 27282 - DNA, 552 bp, Homo sapiens
atgatttcatttcccagaaaatgtaaagaatggataccagcaatgattcctggctgttacctattctggaggggtggggttggggagggggttgtccatacctctgtggtatgagtatttcagggaaaaagaaagcaggcatggcacccattcgattttccctgacagcatctgagatccttttggggagacgctgaggagtgtttgctgccatgtactcttacagctctatgctgacactcccatttgatgtggtccagaacttagacctcagtccttggatcagcccctttgcctctgctgtggccctggggttttatcaactgtccccttcctatcctcctctccaccctgttttttgttttttttttttttaaataatattttgctatgggggaggggaatatcaaatggacaagatcacttttaaatggtagtttttataagatgttataaacttgtatctttttaccattaaagtgcagtgtatgttccttcgtgatatatttaggatatttaaataaaaggaaaatggggcttttctacatacta

SEQ ID NO: 27283 - DNA, 399 bp, Homo sapiens
tggctccctttcaagtttgtttttccatcagaagtgtgactttgtcttaaaccatccacactagatccccagccttcatagtgacctcattaaagattcagcctgtggctcctgagaattaaacctcttttgatttgaaggaatcgggatttttcaattatctcaagaaaagggataggccaggtgcagtggctcacacctgtaatcccagccctttgggaggctgaggtgggaggatcaccagaggccaggagttggcatccagtctgggcaacatagcaacaccctatctctaaaaaaaattaggtgtgtggtggtgtgtgcctgtaggcctagctgcttgggaggctgaggccagaggatcgcttgagcccaggagttggagatttcactccagcc

SEQ ID NO: 27284 - DNA, 408 bp, Homo sapiens
acactaaggaatatgctgctaatttgcacagtagacatatttatgaaattttacttttttgagaaattaatccattttcctcttgatatacactatgaattctaagacatggatgcacacacacatttaaaaactgtatttaagagtgcataggccgggcacggtggctcacacctgtaatcccagcactttgggaggccaaggtgggcagatcacaaggtcaggagatggagaccatcctggctaacacggtgaaacctcatctctactaaaaatacaaaaaaattagccaggcatggtagtgggtgcctgtaatcccagctacttgggaggctgaggcaggagaatggcgtgaacccaggaggcgaagcctgcagtgagctgagattgtgccactgcactccagcc

SEQ ID NO: 27285 - DNA, 261 bp, Homo sapiens
tgcccctcagcaaatccaaaattgcagattaaagtaacaatgggaagccattgttatccatcaagttagtgcagataattacaagaacactcaatgctcatgagggtaaggtgaaacacagcagcttcacatgcctcctgtagggatagaaactggaccatttagggggtgaatatctatacacatcataagctttaaaagggttcaaaacttttaacccaataatttaagcaaataattaggaatacaggcaatgataca

SEQ ID NO: 27286 - DNA, 537 bp, Homo sapiens
tcagcatttcaggcaacctgttttcaacacttcgtcaatttaacacactgtgttcagttccctgtaagctgagtaggcaataccttccctctgtttgtgccatcaaacaaaagctgcctgctattgttaacccgaagattgtccccaatgttgagcagcctcaatccagctaggtcaggatgtgatgacactggatagtttgtctctctctgtttccaagaacaaatagtacacaacttgagtcaagggctgaacagtcttgccttttcataaaaaatgcccatgcgtgtcatagcatgccctcttttctgggacagacattttcaaactggggttccttgggctcttgttcagtttagggaagatccatcgacctgacttttgggtcactgggtcactgcagaggtgagagggaagccaaagggatgggctctggatcctaggatcctgccttcaaatagaggagtaccactcttcactgttggatcaattaattctaagtaaaatttcttaaaataaagggtatgactatgctgt

SEQ ID NO: 27287 - DNA, 243 bp, Homo sapiens
ctgacctagaaatattatccatactttttgtacacccacagataaattcaatacatctgtacctaagtgaaagtcaagactggaaagaaaagtaaaaatctaaagaatgttttaaaatgatcagcagtatgggatgtagtatagttgtaatgctacacttccaagaaacattacttatgaagaagagatgaaatttaaaattgactaacatgattgaaattaataaaatacatgagaaatttg

SEQ ID NO: 27288 - DNA, 436 bp, Homo sapiens
cacacaacctttaaatgaccagatctcgcgagaacttactcactatcatgaagacggcaccaagccatgagagatccatcccgtgatccaatcacctcccaccggcccccacctccagcactggggattacaattcaacctgagatttgggtgggtacagatatccaaactatatcaattggatataagtttaccaagattgagaatattgcaggaagaactggtttgggagcaggaagtcaagcatcccattttggaaatgttatatttgaatgaccattagatatctaagtaataatttagagcaagcaattggaggacatataagtctggagctcaggagtaggtcagagctagaggtataaatttgagtctttggctttgaggtggtattttaaagctatgggattagatgaatgtatctatggaagaaatc

SEQ ID NO: 27289 - DNA, 369 bp, Homo sapiens
aaaaaaaagaaaaaaaaaaccctgctgcactgtctttggagttggagaacagatacagtttatagtagagagtgtcaggcgcacactgtgtgatgttggataaaaggcatgctgacttgtagagaagctgtgtacagaagtgtttttgctggttccctttttgtggtttgtgaaactacctctgtttttatgtgggagctgggcagaagactattttctggcagtgctttttagagaatcattttaagatagcttgaaggacatgaaacagatgatgttaggtagctcctgatgacctctgctggcctgggcagatcatcagaagttggtttactttttttccaagttgattttttcaaacctccaaac

SEQ ID NO: 27290 - DNA, 235 bp, Homo sapiens
gaaacacatggagatggctgaaaagtgaagagctatttcaagtgtaataaaactatcagcaaggtgtggtggctcatgcctgtaataccagcaactggggaggtcaaggtgggcagattgcttgagctcaggagttcaagaccagcctgtgcaacatggcgagaccccacctctataaaatgaaaggtaagaccagcatatcaaactatttccgcattaaatgcagtaacagata

SEQ ID NO: 27291 - DNA, 364 bp, Homo sapiens
cgagacttcatctgaaaaaaaaaaaaaaaaagccaagtgttgctaaaaccttgagtttttaagagaagccagaagtttggtttttaaaatgagagcgctccagatatttttcagtgaaggcttaatttttacttttttatttcagaaaatgttagatatagtcagaagtagatagtagtttagatagtagtagtttaatgaactctcatcactcaacttctgttacctcattgtcctcacttacctctcccctgccctgatgattttgaagtaaggttcagacatcatattatttcacctataaactatattaccatcatcacacacacctgaaatgtcttcacaatcccgggactgttcccat

SEQ ID NO: 27292 - DNA, 349 bp, Homo sapiens
ttccccatagcagtctatgcttggctttcatccctcttatcctaaggatcctaaattatatattttgtcatgaactacccacccacacccatcccaaaggagactgcaggctacctgctggcaatctgtctttcctattcggctcaccgcctaacacacagaatacgatgaaggaacaaataaaggaatgaatgaatgaggatcaacgtcatctggctcccggtgtctctcacaccctcactttccattcgctctggttgagctgttcatttttccacccagcaattctcacatctaggtaaggccatcagagccctttcagagtgaatgaggatgagaaacagaaaca

SEQ ID NO: 27293 - DNA, 343 bp, Homo sapiens
tcttgccatattgcccaggctggactcaaactcctggggcttaagcagttctcctgcctcaacttctcactgaaagatatttttaatccttgtaccaaccctctaggcaggatgtttcctcttaggttaatgggtagggaaactggcttagatgaaaatgacttgctcatggtcacacttgctagtatagagttagtgggaacctacacaccttggattactgtgctttttttcattgcataatgttgcttactttgtaccttcatctttcatttacagctgttaccgaacatacttcttgatcacctaatttgtgctgaggataaagcactaaatacaagac

SEQ ID NO: 27294 - DNA, 514 bp, Homo sapiens
gccatgcacagctcaggaatacaggttattggggcttgaagctgagtcatctgcccctcacctgacttcacccacccctaactgccatgacaacgggagccggtcaccccagagtcacctggatacttcacaactttactggtggcccaggacttgcagggctggaagatagtgcaggcttattggaaacgtggggcagaggcggctgtgacctcacagggtacttctctgggccttcacactgtactccttcctgccaactttactctcggcacctactgtcccctgtgagatgctattaaagtaagaagactaattttccaaatacttatggaaacacaactcatgacatgtttttgatttttcatgaacatttcaaaaagtgaaaaaagcactagtaaaacaaaacccttttagttctgctcccccaagaaataaccactgttaacactgtggtatatttccttcaagtctttgtgtgtgtgtgtctaaaatacagagttgtaaatatatg

SEQ ID NO: 27295 - DNA, 3468 bp, Homo sapiens
  misc_feature (69)..(69): n is a, c, g, or t
  misc_feature (854)..(854): n is a, c, g, or t
  misc_feature (1302)..(1302): n is a, c, g, or t
ctcctgcatagagggtaccattctgcgctgctgcaagttacggaatgaaaaattagaacaacagaaacntggttctcttgacacttcagtgttagggaacatcagcaagacccatcccaggagaccttgaaggaagcctttgaaagggagaatgaaggagtcatctttgcaaaatagctcctgcagcctgggaaaggagactaaaaaggaaaacatgttccttcagtcgtcaatgctgacctgcattttcctgctaatatctggttcctgtgagttatgcgccgaagaaaatttttctagaagctatccttgtgatgagaaaaagcaaaatgactcagttattgcagagtgcagcaatcgtcgactacaggaagttccccaaacggtgggcaaatatgtgacagaactagacctgtctgataatttcatcacacacataacgaatgaatcatttcaagggctgcaaaatctcactaaaataaatctaaaccacaaccccaatgtacagcaccagaacggaaatcccggtatacaatcaaatggcttgaatatcacagacggggcattcctcaacctaaaaaacctaagggagttactgcttgaagacaaccagttaccccaaataccctctggtttgccagagtctttgacagaacttagtctaattcaaaacaatatatacaacataactaaagagggcatttcaagacttataaacttgaaaaatctctatttggcctggaactgctattttaacaaagtttgcgagaaaactaacatagaagatggagtatttgaaacgctgacaaatttggagttgctatcactatctttcaattctctttcacacgtgncacccaaactgccaagctccctacgcaaactttttctgagcaacacccagatcaaatacattagtgaagaagatttcaagggattgataaatttaacattactagatttaagcgggaactgtccgaggtgcttcaatgccccatttccatgcgtgccttgtgatggtggtgcttcaattaatatagatcgttttgcttttcaaaacttgacccaacttcgatacctaaacctctctagcacttccctcaggaagattaatgctgcctggtttaaaaatatgcctcatctgaaggtgctggatcttgaattcaactatttagtgggagaaatagcctctggggcatttttaacgatgctgccccgcttagaaatacttgacttgtcttttaactatataaaggggagttatccacagcatattaatatttccagaaacttctctaaacntttgtctctacgggcattgcatttaagaggttatgtgttccaggaactcagagaagatgatttccagcccctgatgcagcttccaaacttatcgactatcaacttgggtattaattttattaagcaaatcgatttcaaacttttccaaaatttctccaatctggaaattatttacttgtcagaaaacagaatatcaccgttggtaaaagatacccggcagagttatgcaaatagttcctcttttcaacgtcatatccggaaacgacgctcaacagattttgagtttgacccacattcgaacttttatcatttcacccgtcctttaataaagccacaatgtgctgcttatggaaaagccttagatttaagcctcaacagtattttcttcattgggccaaaccaatttgaaaatcttcctgacattgcctgtttaaatctgtctgcaaatagcaatgctcaagtgttaagtggaactgaattttcagccattcctcatgtcaaatatttggatttgacaaacaatagactagactttgataatgctagtgctcttactgaattgtccgacttggaagttctagatctcagctataattcacactatttcagaatagcaggcgtaacacatcatctagaatttattcaaaatttcacaaatctaaaagttttaaacttgagccacaacaacatttatactttaacagataagtataacctggaaagcaagtccctggtagaattagttttcagtggcaatcgccttgacattttgtggaatgatgatgacaacaggtatatctccattttcaaaggtctcaagaatctgacacgtctggatttatcccttaataggctgaagcacatcccaaatgaagcattccttaatttgccagcgagtctcactgaactacatataaatgataatatgttaaagttttttaactggacattactccagcagtttcctcgtctcgagttgcttgacttacgtggaaacaaactactctttttaactgatagcctatctgactttacatcttcccttcggacactgctgctgagtcataacaggatttcccacctaccctctggctttctttctgaagtcagtagtctgaagcacctcgatttaagttccaatctgctaaaaacaatcaacaaatccgcacttgaaactaagaccaccaccaaattatctatgttggaactacacggaaacccctttgaatgcacctgtgacattggagatttccgaagatggatggatgaacatctgaatgtcaaaattcccagactggtagatgtcatttgtgccagtcctggggatcaaagagggaagagtattgtgagtctggagctaacaacttgtgtttcagatgtcactgcagtgatattatttttcttcacgttctttatcaccaccatggttatgttggctgccctggctcaccatttgttttactgggatgtttggtttatatataatgtgtgtttagctaaggtaaaaggctacaggtctctttccacatcccaaactttctatgatgcttacatttcttatgacaccaaagatgcctctgttactgactgggtgataaatgagctgcgctaccaccttgaagagagccgagacaaaaacgttctcctttgtctagaggagagggattgggacccgggattggccatcatcgacaacctcatgcagagcatcaaccaaagcaagaaaacagtatttgttttaaccaaaaaatatgcaaaaagctggaactttaaaacagctttttacttggctttgcagaggctaatggatgagaacatggatgtgattatatttatcctgctggagccagtgttacagcattctcagtatttgaggctacggcagcggatctgtaagagctccatcctccagtggcctgacaacccgaaggcagaaggcttgttttggcaaactctgagaaatgtggtcttgactgaaaatgattcacggtataacaatatgtatgtcgattccattaagcaatactaactgacgttaagtcatgatttcgcgccataataaagatgcaaaggaatgacatttctgtattagttatctattgctatgtaacaaattatcccaaaacttagtggtttaaaacaacacatttgctggcccacagtttt

SEQ ID NO: 27296 - DNA, 3331 bp, Homo sapiens
  misc_feature (69)..(69): n is a, c, g, or t
  misc_feature (717)..(717): n is a, c, g, or t
  misc_feature (1165)..(1165): n is a, c, g, or t
ctcctgcatagagggtaccattctgcgctgctgcaagttacggaatgaaaaattagaacaacagaaacntggaaaacatgttccttcagtcgtcaatgctgacctgcattttcctgctaatatctggttcctgtgagttatgcgccgaagaaaatttttctagaagctatccttgtgatgagaaaaagcaaaatgactcagttattgcagagtgcagcaatcgtcgactacaggaagttccccaaacggtgggcaaatatgtgacagaactagacctgtctgataatttcatcacacacataacgaatgaatcatttcaagggctgcaaaatctcactaaaataaatctaaaccacaaccccaatgtacagcaccagaacggaaatcccggtatacaatcaaatggcttgaatatcacagacggggcattcctcaacctaaaaaacctaagggagttactgcttgaagacaaccagttaccccaaataccctctggtttgccagagtctttgacagaacttagtctaattcaaaacaatatatacaacataactaaagagggcatttcaagacttataaacttgaaaaatctctatttggcctggaactgctattttaacaaagtttgcgagaaaactaacatagaagatggagtatttgaaacgctgacaaatttggagttgctatcactatctttcaattctctttcacacgtgncacccaaactgccaagctccctacgcaaactttttctgagcaacacccagatcaaatacattagtgaagaagatttcaagggattgataaatttaacattactagatttaagcgggaactgtccgaggtgcttcaatgccccatttccatgcgtgccttgtgatggtggtgcttcaattaatatagatcgttttgcttttcaaaacttgacccaacttcgatacctaaacctctctagcacttccctcaggaagattaatgctgcctggtttaaaaatatgcctcatctgaaggtgctggatcttgaattcaactatttagtgggagaaatagcctctggggcatttttaacgatgctgccccgcttagaaatacttgacttgtcttttaactatataaaggggagttatccacagcatattaatatttccagaaacttctctaaacntttgtctctacgggcattgcatttaagaggttatgtgttccaggaactcagagaagatgatttccagcccctgatgcagcttccaaacttatcgactatcaacttgggtattaattttattaagcaaatcgatttcaaacttttccaaaatttctccaatctggaaattatttacttgtcagaaaacagaatatcaccgttggtaaaagatacccggcagagttatgcaaatagttcctcttttcaacgtcatatccggaaacgacgctcaacagattttgagtttgacccacattcgaacttttatcatttcacccgtcctttaataaagccacaatgtgctgcttatggaaaagccttagatttaagcctcaacagtattttcttcattgggccaaaccaatttgaaaatcttcctgacattgcctgtttaaatctgtctgcaaatagcaatgctcaagtgttaagtggaactgaattttcagccattcctcatgtcaaatatttggatttgacaaacaatagactagactttgataatgctagtgctcttactgaattgtccgacttggaagttctagatctcagctataattcacactatttcagaatagcaggcgtaacacatcatctagaatttattcaaaatttcacaaatctaaaagttttaaacttgagccacaacaacatttatactttaacagataagtataacctggaaagcaagtccctggtagaattagttttcagtggcaatcgccttgacattttgtggaatgatgatgacaacaggtatatctccattttcaaaggtctcaagaatctgacacgtctggatttatcccttaataggctgaagcacatcccaaatgaagcattccttaatttgccagcgagtctcactgaactacatataaatgataatatgttaaagttttttaactggacattactccagcagtttcctcgtctcgagttgcttgacttacgtggaaacaaactactctttttaactgatagcctatctgactttacatcttcccttcggacactgctgctgagtcataacaggatttcccacctaccctctggctttctttctgaagtcagtagtctgaagcacctcgatttaagttccaatctgctaaaaacaatcaacaaatccgcacttgaaactaagaccaccaccaaattatctatgttggaactacacggaaacccctttgaatgcacctgtgacattggagatttccgaagatggatggatgaacatctgaatgtcaaaattcccagactggtagatgtcatttgtgccagtcctggggatcaaagagggaagagtattgtgagtctggagctaacaacttgtgtttcagatgtcactgcagtgatattatttttcttcacgttctttatcaccaccatggttatgttggctgccctggctcaccatttgttttactgggatgtttggtttatatataatgtgtgtttagctaaggtaaaaggctacaggtctctttccacatcccaaactttctatgatgcttacatttcttatgacaccaaagatgcctctgttactgactgggtgataaatgagctgcgctaccaccttgaagagagccgagacaaaaacgttctcctttgtctagaggagagggattgggacccgggattggccatcatcgacaacctcatgcagagcatcaaccaaagcaagaaaacagtatttgttttaaccaaaaaatatgcaaaaagctggaactttaaaacagctttttacttggctttgcagaggctaatggatgagaacatggatgtgattatatttatcctgctggagccagtgttacagcattctcagtatttgaggctacggcagcggatctgtaagagctccatcctccagtggcctgacaacccgaaggcagaaggcttgttttggcaaactctgagaaatgtggtcttgactgaaaatgattcacggtataacaatatgtatgtcgattccattaagcaatactaactgacgttaagtcatgatttcgcgccataataaagatgcaaaggaatgacatttctgtattagttatctattgctatgtaacaaattatcccaaaacttagtggtttaaaacaacacatttgctggcccacagtttt

SEQ ID NO: 27297 - DNA, 450 bp, Homo sapiens
gatagcttgagcccagaaagtcaaggctgcagtgagcagtgatcgtgccactgtactccagcctggaaaacaaagtgagaccctttctcaacaacaacaacaaataaagaagagaggcaataatacctacctcatagcatcgttagaaaaattaaataatacatgtaatgcatttagcaaaatgttcagcacgtatcagttacttgaagaatgcttattttgtttccactctttctttcttcttttttttttttttgagatggagtttccctcttgttgcccaggctggagtgcaatggtctgatcgcagctcagtgcaacctctgcctgccaggttcaggtgattctcctgcctcggcctcccaagtagttgggattaaaggcatgcgccaccatgcctggctaattttgtatttttagtagagaatgttggtccatgttggtcaggct

SEQ ID NO: 27298 - DNA, 168 bp, Homo sapiens
  misc_feature (17)..(17): n is a, c, g, or t
ccaacgatcgaagattntatcccagcaagcacaactagcagctgctgagaaattcaaagttcaaggtgaagctgtctcaaacattcaagaaaacacacagactccaactgtacaagaggagagtgaagaggaagaggttgatgaaacaggtgtagaagttaaggacat

SEQ ID NO: 27299 - DNA, 487 bp, Homo sapiens
ctgtaatgacctgtttgaggccccttctgtcctacccggtttgatctcccatcacctccagatatttcaattcccaggtaaactcaaggcagttgaaattatattctggaacacagtcttctaaagttgattagaaatgttatcagagtacctaggattcagtaggaaaaggcaaggtagtggatgtaaacagaaggtggtttcttatacagaggttaatgtgagcagaacacaccaaagtaagagaaatcaacccaactactgtgagacacaaaaatctattgtttctctagaatagtgggtcaagattgcagatatggagggaaatggggacacagttgagcttatgggggcctgaatctgtcctgaatgtctaaaccacctaagttctgtataattttgtggtttggtcaagtaatgtaccatatttgctgttggttatggtcagcacctggagctgctgagaacggtttgggtgctagaaatg

SEQ ID NO: 27300 - DNA, 1594 bp, Homo sapiens
ctcctcgctgcagctggcaagattctttctagcagaacagaaacactggcccccaattccactctcccctcctgatgctaccgcagagggcagaaaggtgccctgtagcgtccaccatgtgtgtgtcctgagtttccagtgcaagtcatctggatttgcatttagctagggaaactcggccctcaaaccctctccctctctgcctgaatttgccaaaatgccaaccatccgggcaggtgtggatgccacagtccatccccattgcatttcacccccacatggacagaggcacacactcgcacacattcccagcacctttgactgctgggggatgcaggccagggtctgcctggagcctcagggttgggacttatctccaaaggagcccacaccccctcttccaggatgggcactggctggcagcacttttttccctcatcacatccctgacccctgcccagcccacatgcacatgctgtttcctgtctccagggccctagcctgtggatctcttcctcccatgcactcctagggtgaatgggctcagcaccaaacctggctgtgcccattccccacaaccccagcttggcctcctgtgggaaggagaaggcagacctgcccagaggagaggggcagtgttcccacccacctgctccagcacaggaaccagggaggaaagaagggagagggaggttccattcaccgtcttctgggttagcgcttgattggatgtttcaagcaagggacaaggtgatggtggctgtaataggctcctcgtgggcaccgtcaccccagaaggcctgggcacccatgagaacctgtggccagcccttttcattggctgagttccctgctgttgtgcgtggtgccattttttttttaaacaacatatataaaaacaaaacaactggttctgtgtgtatcaacttaatttgcatatgaatgagtgttgtgttgtgatttgcagtgttttgacaccgtgattggctttgtttgggtctctcttctttctgtgaaattaactgctgtgcgttttcactgttcttagagaagaccctgagctcctggggttttcttgtctcacttctaccctgacctgctgggagcccaccccaccccagtccagccatgagggtatttccagcctattccaatgactgaaacccttcttggaagaaaacgtctaatgtcggggacgtagggacgcttccagacttgccctggccggaaccctgcagcctggggccccagcccgcctgcagctcagctttccccaacaccctcaggacccagccccagccccggcagaccttccctgggagctgcttaggtggtctccacagcgccctctaggggccaagcagggttccagattctccagccttctgccagctttaaaacccttcactcaagcagcattactgtacatgcaatgaaaaatactatatatgacagtcaaaacctgtgtacatatttccatgtacatatttatacatacacacaccttcctattataaatatataaagcatgacatctctttggcattccaagtttgtgtttttttaaatccttggaaatacggctttggaaacc

SEQ ID NO: 27301 - DNA, 498 bp, Homo sapiens
aaaaaaaaaaaaaaaaaacctttcctctgagcccatcttcctttcgctccttgactttccttgacttgctgttggaaagtctaatatgaaaagggctgaaactaggcattaaatataactgatgctcaaaggtaagatttccatccaacagattccttctccctcccaagggtcttcccaggcagtgctgctacttatcccaaataaaatggtaaaagaataaagacagccgggcgcggtggctcacgcctgtaatcccagcactttgggaggccgaggcggacggatcacaaggtcaggagatcgagaccatcctggctaacacggtgaaaccccgtctctactaaaaatacaaaaaaaaaattggctgggcgcggtggcgggcgcggaggctgaggcgggagaatggcgtgaacccggggggcggagcttgcagcgagccgagatcgcgccactgcactccagcctgggcgacagagcgagactcatctcaaaaag

SEQ ID NO: 27302 - DNA, 469 bp, Homo sapiens
tctgtatcccattttcatcctccctaatcacataatttttctcttctttttttctgcattcttgaagtgcttcttcagtttgttgtcttagggacaattttctataatattgtcccagagatcttgctggtctccatattgtgagatttcttagcccttcatgaagatatatcaaataaataatttgtttgtaacttgatatcattacaatctttcctttttaaaaatctaccttcttttttatatttgcctgacccagtctgttccccttctatctaaatgttaaccttatattattttacagagtcgatgttttcttgaatttcattcaagttcctgtaaaaaaaaagaatctactagtttaccatttcctatagtagatctttttcaaaggtttgtttttcttatgcatctttagtacttaggttctctctctttttgaaagtgcagactattttcacaaatatcg

SEQ ID NO: 27303 - DNA, 471 bp, Homo sapiens
catggctggctgaaccctggatgccttttcttccgcgtccccatgaatgaaagctgtctgggccttcattctgcagacagggacaaacagctccatgctgtttgtcctcccagtgcagccgtgctgggagggtctgggggagcttcctacaaggagagactcctgctgctttggaaaactgagaaaaaataggggtctaaccctctcctcccattttacaagtggggaaatgaggcgtgaaaggagaggcgtctgggttactccgtgggtctggggtccagggaagggcctgtatgggggagggagctgggaggggacggtgtctggctctacccctgtggggtggggaggtggggctcccctgtatcacaggacatcccccctgagaggtccctcatatgtctgggtcctgtgggtgggggactaactgcgcaatgtagttaggtgctcaataaacggagttgccgctga

SEQ ID NO: 27304 - DNA, 283 bp, Homo sapiens
agcaagggagtgtgtggacactgagaagaggcaggcagatttggcaattgaggtggagccgtttggacaaacttgaaagcccgactacaggggattaataaatgtgagtggagaacggtgaggcagaggcggaaagcccagacagccccccccccccccccaacaccacaaaaccccccccaagagaagttaatttagggtcaccaggctgaggaacccgatgaccatcttcctgtgtaacgttcagtctttcattgtagtgaggaggcatttctccactctt

SEQ ID NO: 27305 - DNA, 975 bp, Homo sapiens
agactcaggcaagagccatctcattaaggtggaggtcacagttttaaaggaaaatttaaaattcaaattaattacaaaatgtcatagttaagaaaagtcttttaaagtagatgtggtttccaaggttcatgctgttttttttaaaaaatggagatacataaagtggctgaaatagaagttgaattagaaaaaatgtgtatatgcacacaatcacatgcatataccaccctccccacacccagcacgcatggttcccactgacaaattctcctcaaggttgagtgtgggatttagttcctggccaaatgcgacttggaacctattctgagtgggcagataggtgtctgctgtggccactggcatccatgccggggtggcccccacagctgcctcctgcatgtgcagtggcatgtaatgcatttctgaaccaggcagagaagatatttagaaagtccagcatgtagaagaattgagtatctggtgaagaatttattagatatagcctcataaattccttagatatataacatttccaaattctttgtccttgaaaaaagttgattttgaaaatttgactagtttattgaacatatatcagtttgttaattggattgaatcactattatattccaggtattttactaggacctttaatatacactgtcccatgtaaggtaataagtactgagtttaggtgaaagtatgaaaacaggagagatgttgaggatggaattattgaaaaggaattggccttgaattctaaccaagatagctaagtaaggtcaggctttgatttgtccttgccagcaaaaagacttaggcagtaacagaaaacatgtgaaggaaaataaaaaatacctctgagttaaaaagtgaggtaaacgtttcatgaaatggaaataaaatccagtatgaaacagttagctaggttcttggtccaaaaagttcaccagtgactaggattttagcatacta

SEQ ID NO: 27306 - DNA, 533 bp, Homo sapiens
cttcagcctcccgagtaactgggactacaggcatgtgccaccacacccagcttttttttgtattttttgtggagacggggttttgccatgttgcctaggctggtttcgaactcctgtgctcaagcgatctgcctgccttgtaaagtactgggattacaggcgtgagctactacacctggcctttatttttaaagatgattaaaacttaccctgaaagaccatcatgctgatgatctaccatactattatatgttcagtttttcctatgtcttcatagtgatctttctgattatttcatttccttaaactctgatattttggtcttaaatgcgggataaagtccaaattccctaatgtggcttacaaaatcttcaggattttgacccctactaacctttcatagcttttattgctccttcccccatccttgccccctggaaaacctctttctgtgaaaacaaacagaagcaaaaccaaagaaagcttctcaactccagccacaataaatgctttgtagtttactgtaaaccttt

SEQ ID NO: 27307 - DNA, 408 bp, Homo sapiens
aactctgtgaatatgccgaaaacttttggcataagaacactttaaatgagtgaactgtatagtacaataagtcctcaatgttgtcagtaggttcttggaaactatgactttaagcaaaaggacatataacagaaccaatatttttttctcatcattataataaaatgaagttgaactaaacagtcttattcaaggacctgatgtacattgtttcacttaaagttgcagtttccaaatacctggtaaggactttaagtgaggacttactgtatgtaaattaatttcaataaagctgttttttataaaagccaaaatggcagaaggacagagaaaaatgcagaccttggtgttattatattatttgactttctctgtacacaagccaataaatcctccttattgtttaaa

SEQ ID NO: 27308 - DNA, 316 bp, Homo sapiens
atatttagtcacattttaggttagaactttcaggaagtgagtttttacacagaaattagtgctataaacagcccttaaaatgggaatttaatcgtacttatttaaaatatatatgtatataatcttaccaacccagaaagacatgttctctggcattttataaactaagatgctactggaaggaaaaagctaaatctgaaatacacaaacaacatatttacactgtgatatggtttagatctgtatgccaaagctgaatctcatgtcagattgtaatctccaatgttggagatggggcctaggaggaggtgattgg

SEQ ID NO: 27309 - DNA, 386 bp, Homo sapiens
gatggtcttggagtgttggttcaatggggtgcactggctttggttctaggtggatgcagtagtgcagtgtccatgtagtttcttcagctgtaatccatgttagtgatgtttgcatgtgtctcagtggcataggctaagagagtttgtggcagtggtggtgcagctctgctggaagtgggctttcaggttatttcaggttatttctcaggtcagtgtgcctacatgcccatggtgggttggccaacttggggtctcactcatcagggttgggaccacagagcttttactttaactaagggcgtcagtgtgctgtttcatggctagcctgaaggccgatcatccaggggtggcccattgtgctgtttcttgagtccagtacactggtt

SEQ ID NO: 27310 - DNA, 458 bp, Homo sapiens
aagttatacaaatatctctaacaatgattgctccacagcctgctcgagttcctctcttgtaaaagctttttatttttctgccacatgactaggctgcaaagtttttaagcttttacgctatgcttcccttgcaagtaaaaataaattacaacttacttttttttgctccaacgtgtgagcataggttgttagaagcagccaggccacatcttgaacgctttggtgcttagacatttttccaacagaagccctaaatcatcgctttcaaatttaaacttttatatatccctagggcatgacaaaaattcagccaaccactttgctaagacaacatgaatgacctttgcttcggtcctaattttctaattttcatctgagacctcctcagctcagccttcactgtccaggtcactatcagcattttggtcacagccattcaaagttaagaaaatctcaac

SEQ ID NO: 27311 - DNA, 218 bp, Homo sapiens
aagttatacaaatatctctaacaatgattgctccacagcctgctcgagttcctctcttgtaaaagctttttatttttctgccacatgactaggctgcaaagtttttaagcttttacgctatgcttcccttgcaagtaaaaataaattacaacttacttttttttgctccaacgtgtgagcataggttgttagagatatttgtataacttaaaaaaaaa

SEQ ID NO: 27312 - DNA, 1082 bp, Homo sapiens
atttgtaactttctggattatttaggaagatatttcaaaaatattttagaggtcagaacttttactgagcaagtgcttatatgagagctagattcttaagctttgccacaaaaaatactatgtaattcatgatataaaatatatttctgaaagaactttagttaattcattgatttctaagtaaaagtgagtaatgaatggttcttttatcccatctttcagtatacaaatttattattcttggcatctaacttggtggaaaaatgtactgcgagttgaatagctctcagaaagtttattttccaaaagtaagcattactgtattatagaaggaatgcctaaggaagatgtcctctataatccttagtggactcatttataagattcataaattgttttgtttggtcattgtatattaactctttcaggtgagtctcctgaaacttaaacatcttaggacgtgtttaagattattagcacacatgttgggaattaagttgaaatcctggtctttttattcaagagcgtatgttcctccctgtgtttgtctatttatggaagtattcagaattagaaacatggaaagaagcaattcagtaattacattaaaatagatgggatcctttttgataatgagtccttttatttttttgagatggagtctcactctgttgcccaggctagagggcagtggcaggatttcggctcactgcaacttctgcctcctgggtttaagagattcttgtgcctcagcctcctgagtagctgggattacaggtgtgtgccaccatgccccctaatgtttgtatttttagtagagatagggtttcaccatgttggccaggctgatctcaaactcctgacttcaagtgatccacctgtctcagcctcccaaagtgctgggattacaggcgtgagccaccgtgcctggacagtaataagtcttaattgtgtatttttacccaaggttggtgtttggggagatgtttaccaagagctgtctgagagtttttgtaaacattgagaactgacacatgaatgatattttcaaaatttaatttctttaataatgctccccttaa

SEQ ID NO: 27313 - DNA, 441 bp, Homo sapiens
tctggtgatttccacgcggtctcatttaaacccggtggtggcactgcaggatggaaaccgaggctcagagaggagaagtaacttggaagtcaggctccagatccaacctttatcctgtgctgtacccagaaagggccatgcccattgcaagccgctttcctgctgtgagcctcagttttcatttctgtgaaatgttgcctagcaaagctggggcaggctgtggatctcaggctctcaattaatgctccatttatcttgcccggcccctgagtgtcctcagggcacagccagcccgaggttctcatccacggatcaccagcagcagagggcctcgggcattctggtggctgtttgggagctcgcctccgccctgggctggagtatccctagcttttgctttcagtcagtgctgtgaactttgccagggaacagggaagttgt

SEQ ID NO: 27314 - DNA, 476 bp, Homo sapiens
gagccgatttcaaaccaggcaagagtccaggacacaggggccaccacacacctcccccagcaacgtgcctccaggcaggagttggcttaaaccctctcgcaaccccttaggggcaaattatttgcattaattaatggattgattcattaattcaagatactgtgcttgggacctacagctggggttccataagctcaaactagagcgaaggtgatggagacctcagttcgctttcattggggtacgtctggcaggtaccccaggccctgtgtggtcatggaggacgaggtctggtgcccctcgaggccggctgctgtggggtgggggttgcatcgtgtctcttcatcttcagctcccagccctggcttggcgcagaacacacagacatttaatactcatgcctgaagtgaaaatgtaaagtgtctgggaattttgaagtcacagaaaaaaatgtttaaagaaaataaactacaggg

SEQ ID NO: 27315 - DNA, 518 bp, Homo sapiens
tggcttcatgcctgtcatcctagcacttttgggaggatgaggcggtaggatcactcaagcccaggagtttgagaccagcctgggcaacatagtgagaccccatctctacaaaaaactaggccaggagcagtggctaacacccgtaatcccaactactctcaaggccaaggtgggaggattgtttgagcccaggagataagactgcagtgagctgtgattgcaccactgtactctagcctaggttaaaaaaaaaaattagctggacgtgatggcatgtgcttgtagtctcagctactcaggaagctgaggcaggaggatcatttacacccaggagtttgagggtaccgtgcagtaaagtatgattgagccactgcactccagtctgagtgacagcaagactgtctaaaaaaaataagaaggaatttgtggcatcagcagttcggagattgcagtgagccgagatcacgccactgcactccagcctgggcgacagagcaagactccgtctcaaaaaaaaa

SEQ ID NO: 27316 - DNA, 490 bp, Homo sapiens
gattgacatttcaagacaatggaagtaattagcaaggataacacaagtgtccctatgctgccagtttctcttctgacacaaaaataaataattgatttcattgaagtattagtcagtcaacaatgcttagtgtgatgatattgttaacagtgaaatatatatgttgtgcattgcttctagggtgaaacttaagtatctttgccctggctcccgcagtattttcatggcagtgaggatacatactcttggaaatgagccaggaacactctaatgtattacacatgtggcttaataccaggtgaacaggtattttaaatattctaatcacatacccacaatgtatatcgctactgggaaaaggatatcatttttaaccactggtgtttgttctgagccatacctttttcacactctgaagattttcaagacgaactgtgatttggggagggatggccatctcagtcaactttaactgataggaggtacaaca

SEQ ID NO: 27317 - DNA, 3541 bp, Homo sapiens
aagatcgtctcagtctgggcaagtaattgatctgtctgcagctggtctcaaactcctgacctcaagtgatccgccagcctcggcctcccaaagtgctgggattacaggcacgagccaccatgccggacctattagtgtatttactggatatcaagatgactaagaaatagcacttgccttgaaggagcttttctatttgaggaaaaagacatgtatataaataactgcaaacagaatgaaacaagtgttatgtagatctacatacagtgacatgccatgggaatgctgaacactgagcaacagtttcaactagcgaattggcacaggaaacatgaaaaataagcgtattttcaatatgacaagaatggtcatttctggatataagaacaagagaaaagtcatgggtatatggaaaggcatggactcttcaaggaagagcaagtagtctaatgtagatgctgtataggaatctggggacaaagggacagataagtggtgtagacaaagaggctggaaatagggttatgggctagatcatgagtgacctgtaagcattaggagttttgatttattttggaataagaaacatttatggcttttgagaaggaaaattacacaagggaaaagaaaggatttttattttttatttttatttttggagagatgagatctcactatgttgcccaggctggtcttgaactcctgaactcaagcaatcctcccggctcggcctctgaaacttctaggattataggcgtgagccactacgcccagccaggattatgtttttttatgggagggatgagaatattggtaggtgggtagaggataaatgagagagaatatgtatatgtgagattgaatatataatagaaaaaattgataggacaagtcctgcgttattactacattttatgaggaaaatctatatattagaagcactttaaaggtatatttgctattctagctgtggaaaccatctgaaaacacatttgaaagtgctttgaaacaggggtcaacttctctgcaaagggccagagtatgtttagctttgcgggccacagatggcctctgttgcatatgctgctgggtctccaccttcctcctccttttcttcccttcctcttccttctttttcttcttctctttcttctttctctttaaaagcataaaatcattctcagctcttgggccatacagaaacaggccataggccagatttgacttctaggccatagtttgccgaccctccattttagaacttagctttcctgaaagagcatttgggtctctctctctctttccctttctctctctctgtctctctctctctctctttcagtaagtgaagtaagaaataggtctttcttgaggaacaaaaagctgaaataatttcatgcatttgaatatgacccttgacctgtttttgtccatcatcactcagatttgtggctgcaaccaccaaccaatttggtgccataggatatagcataatttttcagcaacagttcataagcttttctttttgttctttttccttcttccagttgtggtggtttaaaaacatgtctgcaaaatctttgacacttctcagtaaaaaatatagtcttgtgttcccttttcttgaacctaagtggcctttgtgctgcctcaacaaatagaatatgacagaaaagacactatgtgacttttgagacagggtcataagaggtgatacagcttccccatgcccctgcattttagagctctgggttgccatgtaagaatagctaccctgaagctaccatgctgaagagaccacagggaaatcacatagagttagaaagaggtgtctgaagaagcccagctgctcccaatcccagctatttaagtcctcccagaccaggtgccatatatatgagtgagcaagccttcagatggttccagcaccagccaccatctagctgtaagctcatgagaccccttcaacgaaaaccatctagattagcttagtcaagccccagaaccgtgaaagacaatagacttgctatggaggtcgccacatgcctcttttttctccctttgtgaatgggattatttataatggttaccccatacctactccactatgtatattgggtatgagggagagataatttgtctcactagctgacagatttttcagacctcaaggaatgccacgtgagctgtactcacaggaccacacacaagtatctttatccacacgtgacctgatttcactgataaagtcctggaccttgagcctgagcccaatgtcttaataaatgagaatttcagaaggtcttgggagggggtgagtatattttgcatgtgggaaggatgtaaataatatgtggcctgagagcagattatggtggtttgaaaatgtgtccaccaattctttaatactactctcaacaagaggtggaatctgtgtctcttcctttggaacatgagtggacctttgtgattaaatgcagcagaaggatgctgtgtgaactctgagacagggtaataaggggtgatacagctgccacctagttctttctcagaacatgtgcctttggagccctgagctgccatggaagaaaaccacctaccctgaagccacaacactggaaagaccatgtggaagaaccacagagagagagaagaggaccaaatgtgtgagccttcccagcccaggctccaaatatgcaagtagtaagccttcatttctttttggttttaatttttttttttaaataaatcgaaatgggttctcactatgttgcccaggctggtcttgaactcctaagctcaagtaatcctcctacctcagtctcccaaagtgctggaattgtaggcatgagccaccatgcctggctgcaattagtaagtcttcagatgcttccatcaccagccaccatccgatgacaaccccatgaatgaccctcagcaagaactacctagctgaatccagccaaactccagacccatgagagagaaataaaattgttgtttgagtcactaaatacggagtaatttatattatcaacagataactggaaccacaagtgtaattgttaaaggtaaaactttgaatacatttatatttgccttctgccacattccataattgacttttgttcatgaacctattggcaagtttgccttattgcttttccttcttccctcttttttttttttgtaacttaaaaaatcatataataaaacaacacaaaaatgtatttgaatgtaggttgagtgaccgtaaataagcacaaaacttctccttcctgtgactctcttgtctgtatatgccaagtatctaacacaaggcctgcctggcacataatttttttttttaaatgttagtctcttttatcattctttttccctgtcagtggtattatctttacccatggaatccagcaccctcatgctgacttatagttccccaaagtccctaacctctacagtcctctccaacccccaccccaggcctctctctatgttccagacattttctggctttttaccattatccaaactctgaact

SEQ ID NO: 27318 - DNA, 2434 bp, Homo sapiens
aagatcgtctcagtctgggcaagtaattgatctgtctgcagctggtctcaaactcctgacctcaagtgatccgccagcctcggcctcccaaagtgctgggattacaggcacgagccaccatgccggacctattagtgtatttactggatatcaagatgactaagaaatagcacttgccttgaaggagcttttctatttgaggaaaaagacatgtatataaataactgcaaacagaatgaaacaagtgttatgtagatctacatacagtgacatgccatgggaatgctgaacactgagcaacagtttcaactagcgaattggcacaggaaacatgaaaaataagcgtattttcaatatgacaagaatggtcatttctggatataagaacaagagaaaagtcatgggtatatggaaaggcatggactcttcaaggaagagcaagtagtctaatgtagatgctgtataggaatctggggacaaagggacagataagtggtgtagacaaagaggctggaaatagggttatgggctagatcatgagtgacctgtaagcattaggagttttgatttattttggaataagaaacatttatggcttttgagaaggaaaattacacaagggaaaagaaaggatttttattttttatttttatttttggagagatgagatctcactatgttgcccaggctggtcttgaactcctgaactcaagcaatcctcccggctcggcctctgaaacttctaggattataggcgtgagccactacgcccagccaggattatgtttttttatgggagggatgagaatattggtaggtgggtagaggataaatgagagagaatatgtatatgtgagattgaatatataatagaaaaaattgataggacaagtcctgcgttattactacattttatgaggaaaatctatatattagaagcactttaaaggtatatttgctattctagctgtggaaaccatctgaaaacacatttgaaagtgctttgaaacaggggtcaacttctctgcaaagggccagagtatgtttagctttgcgggccacagatggcctctgttgcatatgctgctgggtctccaccttcctcctccttttcttcccttcctcttccttctttttcttcttctctttcttctttctctttaaaagcataaaatcattctcagctcttgggccatacagaaacaggccataggccagatttgacttctaggccatagtttgccgaccctccattttagaacttagctttcctgaaagagcatttgggtctctctctctctttccctttctctctctctgtctctctctctctctctttcagtaagtgaagtaagaaataggtctttcttgaggaacaaaaagctgaaataatttcatgcatttgaatatgacccttgacctgtttttgtccatcatcactcagatttgtggctgcaaccaccaaccaatttggtgccataggatatagcataatttttcagcaacaactggaaagaccatgtggaagaaccacagagagagagaagaggaccaaatgtgtgagccttcccagcccaggctccaaatatgcaagtagtaagccttcatttctttttggttttaatttttttttttaaataaatcgaaatgggttctcactatgttgcccaggctggtcttgaactcctaagctcaagtaatcctcctacctcagtctcccaaagtgctggaattgtaggcatgagccaccatgcctggctgcaattagtaagtcttcagatgcttccatcaccagccaccatccgatgacaaccccatgaatgaccctcagcaagaactacctagctgaatccagccaaactccagacccatgagagagaaataaaattgttgtttgagtcactaaatacggagtaatttatattatcaacagataactggaaccacaagtgtaattgttaaaggtaaaactttgaatacatttatatttgccttctgccacattccataattgacttttgttcatgaacctattggcaagtttgccttattgcttttccttcttccctcttttttttttttgtaacttaaaaaatcatataataaaacaacacaaaaatgtatttgaatgtaggttgagtgaccgtaaataagcacaaaacttctccttcctgtgactctcttgtctgtatatgccaagtatctaacacaaggcctgcctggcacataatttttttttttaaatgttagtctcttttatcattctttttccctgtcagtggtattatctttacccatggaatccagcaccctcatgctgacttatagttccccaaagtccctaacctctacagtcctctccaacccccaccccaggcctctctctatgttccagacattttctggctttttaccattatccaaactctgaact

SEQ ID NO: 27319 - DNA, 936 bp, Homo sapiens
gcggcggcggcggctggaggaggagagcggcggcggcgggagcagcgaagggggcggcagggatcctccaggctgccggctgggaaggcgtgggcgacccggtgtgtggcgcgcccagagccccgcgtttcagccctagggaaggaagccagttgagggaagttctccatgaatgtacgtcacaatgatgatgaccgaccaaatccctctggaactgccaccattgctgaacggagaggtagccatgatgccccacttggtgaatggagatgcagctcagcaggttattctcgttcaagttaatccaggtgagactttcacaataagagcagaggatggaacacttcagtgcattcaagatgaagtggtgaagagagcctgcgattgaagattttttcatctcagctttttcccccttaccttgttctctctcatgtttcatgatctgtgtcatagatatttcttcattacgagcacttcgcggtgtggcttttcaatgtctgaagtggattaagtggcccacagtcagttctgtgacttgagtttcaaaagtaaaattaccatcaacaatgtgattcaattttattttctatactagctaaaagcaaggaactatattattaacaatcttggctttactgtagtttaaggcaggtgatgatgatgcttattagtccacctgaaagagtccttccaggtttttggaagctttattcctgcttattaccttgcccttgagaagtccttcatggaaagtggaaacactgggttgacttcttttccccatatcctagttgaaagggacagcttatatgtatgttagactgtccaaaagtgtttgtagaacctcattttaaaaaatcaactgtattgtactttttaaaaaatgggatcttaaactctttattaaaaataataaatggaaatgtgttaagc

SEQ ID NO: 27320 - DNA, 1245 bp, Homo sapiens
tgtttctcagctgccttgttctcactctacgcttgaattcaaagtccctcttcaaagtcctatccccagaggaagtagcgtaccatgagggtgtaaaaagggagaggtggtggtggtggtaggtaggtttggctatttgtggagtatgatttattcatagtggggactctctctactgttgaggtatgtcaaagttagtgtatgatgatgattgaccaaggaacgcaggaaccatcagctttaatcccctgaggggagagcacaggactatcatagacactgtatgtgagccaggtgggtaactcataagttttgtctgtgaacaactttctctaatctcatgttactattttttttaggcaccaattgacaacggttcaaaaatcaccaactaccttttagagtgggatgaggtaagcttattttcatattcacccatctaaaacaccatttcaaaaacaaaattaactgaacaaatgccatcttattcttttataagacatgctaaacacagaaaaaaggaatgctagtagagaaatttaaatcaatagttattgactatggaaaatgaagttagattgaagtagtattatgagttgtgtattgaaatatatgtacctggcttatttgcaagcactactgctgaaagaaaaaaagtggggtcttatctattttggatctccagtgtctagccagccaataatttgtattaaaaattgactgctttgtcatcttgactgctcagatgattttgataaggtaaaacacactgccgcttggaaagcataatttgcttttcctttttgaatgccatgtatgtactttggtgttacactgttgagtggcctctgtgagagcagagcagtacatagaagtcacattctacccatgtgcgagtgccctgtgggttagaatgtcctgtatcggatgccccccttgctgttcatgtcaccagaggcccttggaaggtatctacggtggagtgtccttattctcaaagccactgtgtgccaactggtggacccagtgcatttctggcctagctaactctacacacagaatctcaggcaggaaacacttgacctagaagcctttcatttctaaaaagcaactgtaggtcgggcgcgatgactcacgcctgtaatcccagcactttgggagccaaggcaggtggatcacgaggtcaggagatcaagaccatcctggctaacacgatgaaacaccgtctctactaaaaatacaaaa

SEQ ID NO: 27321 - DNA, 1453 bp, Homo sapiens
tttctctccagtctgtgacctcttattactgtttcttttgcctttttatccagctcttaactcttagcctttttccagataaagtcaaccagagagtagctcatggggttttagaacatatatttggagatcgttctggggttaaggtttattttcttacttagaataatctcttctagtcagtagatcctgcctatcttgaaatggagctgggtggcacacactgagacaaatacctgttgggatgactgtcccctgttaatgctaaccataggtcaggacaagaccaacagataagagcaagagcatgatactcactccgtaagaaattctgttcatctacagaaagccttagggtgaaacaaagataagaatcctggtcttctatgatgagtcactgccactgactgtgtctgttttgttttcagggtgtatgccatgtacaattccgtaaagggatcctgctccgagcctgttagcttcaccacccacagctgtgcacccgagtgtcctttcccccctaagctggcacataggagcaaaagttcactaaccctgcagtggaaggcaccaattgacaacggttcaaaaatcaccaactaccttttagagtgggatgaggtaagcttattttcatattcacccatctaaaacaccatttcaaaaacaaaattaactgaacaaatgccatcttattcttttataagacatgctaaacacagaaaaaaggaatgctagtagagaaatttaaatcaatagttattgactatggaaaatgaagttagattgaagtagtattatgagttgtgtattgaaatatatgtacctggcttatttgcaagcactactgctgaaagaaaaaaagtggggtcttatctattttggatctccagtgtctagccagccaataatttgtattaaaaattgactgctttgtcatcttgactgctcagatgattttgataaggtaaaacacactgccgcttggaaagcataatttgcttttcctttttgaatgccatgtatgtactttggtgttacactgttgagtggcctctgtgagagcagagcagtacatagaagtcacattctacccatgtgcgagtgccctgtgggttagaatgtcctgtatcggatgccccccttgctgttcatgtcaccagaggcccttggaaggtatctacggtggagtgtccttattctcaaagccactgtgtgccaactggtggacccagtgcatttctggcctagctaactctacacacagaatctcaggcaggaaacacttgacctagaagcctttcatttctaaaaagcaactgtaggtcgggcgcgatgactcacgcctgtaatcccagcactttgggagccaaggcaggtggatcacgaggtcaggagatcaagaccatcctggctaacacgatgaaacaccgtctctactaaaaatacaaaa

SEQ ID NO: 27322 - DNA, 681 bp, Homo sapiens
agcggagacactggaatgtgaatgctttgggaggtgagcccttaaggagagcccaaatgtttaccaaagagaaaatctggtcagcaggttattctcgttcaagttaatccaggtgagactttcacaataagagcagaggatggaacacttcagtgcattcaaggacctgctgaagttcccatgatgtcacccaatggatccattcctcccattcatgtgcctccaggttatatctcacaggtgattgaagatagtactggagtccgccgggtggtggtcacaccccagtctcctgagtgttatcccccaagctacccctcagccatgtctccaacccatcatctccctccctatctgactcaccatccacattttattcataactcacacacggcttactacccacctgttaccggacctggagatatgccgcctcagttttttccccagcatcatcttccccacacaatatatggtgagcaaaaattataccattttatggaatgtcaagctacatcacccgagaagaccagtacagcaagcctccgcacaaaaaactgaaagaccgccagatcgatcgccagaaccgactcaacagacctccttcttctatctacaaaagcagctgcacaacagtatacaatggctatgggaagggccatagtggtggaagtggcggaa

SEQ ID NO: 27323 - DNA, 504 bp, Homo sapiens
gcggccgcggccggacttggcgagccggcggctggaagctcgggcgggggagcggggcgcggcgggaaggagcgggcgacccggtgtgtgggccagcggagctccggtcagtcggtcaccccgaggggcgcctcggccggggatagggcgggcgggcggaatctgcgccccgaggcggccaggaggggccgcgcggaccgtctggtgcccgcggctgggctggggccggcaggcgtgggaagggcctgtcactctcggcagaaagtggggcctcgggctgtgcccgcgaactttcccagaggtccgggtcccggcgtcccgtgggaaccggaggacccgggcccgccgtctcgggagactgggctgcgccgcccggcggcgcctttggcggggaggcttccaggagtgcgcggtcggagttggagcttttggaatctcagctcccaccctgccatcccagacgaagggaagcaatggcattttatccagacagtgccgtttgca

SEQ ID NO: 27324 - DNA, 1992 bp, Homo sapiens
  misc_feature (21)..(21): n is a, c, g, or t
aaatacggaacccagtgagtnccagccgcagtgacccagtcaccctgaatctcctcccgaagctgcccaagccctacatcacccgagaagaccagtacagcaagcctccgcacaaaaaactgaaagaccgccagatcgatcgccagaaccgcctcaacagccctccttcttctatctacaaaagcagctgcacaacagtatacaatggctatgggaagggccatagtggtggaagtggcggaggcggcagcggtagtggtcccggaattaagaaaacagagcgacgagcaagaagcagcccaaagtcgaatgattcagacttgcaagaatatgagttggaagtaaagagggtgcaagacattctttcgggaatagagaaaccacaggtttctaatattcaggcaagagcagttgtgttgtcctgggctccccctgttggactttcctgtggaccccacagtggtctttccttcccctacagttacgaggtggccttatcagacaaaggacgagatggaaaatacaagataatttactacagtggagaagaattagaatgtaacctgaaagatcttagaccagcaacagattatcatgtgagggtgtatgccatgtacaattccgtaaagggatcctgctccgagcctgttagcttcaccacccacagctgtgcacccgagtgtcctttcccccctaagctggcacataggagcaaaagttcactaaccctgcagtggaaggcaccaattgacaacggttcaaaaatcaccaactaccttttagagtgggatgagggaaaaagaaatagtggtttcagacagtgcttcttcgggagccagaagcactgcaagttgacaaagctttgtccggcaatggggtacacattcaggctggccgctcgaaacgacattggtaccaggtatgacgtttccttgtcctcttgcccttcagcctttggatggtgatcctgagccttcttttacatagctggaaggcatgaggaagcctgctgcctccacactaaatcaactggaggttttccaagagggaatcctaatcagaggagagaaggcctcctttaagctggtgaatgtcactatggcctctgcagtcttgcaagctgtattgcgaaggccccactaggggtctctaagaaccaaggtgaaggtagcagtacagatcttgaaaggaattcctcttggagctttaattttttagatcacatgcctttttcttttatcactttagcaagctcttcattcacttgccttttttcaattatgtgagtgtttcctggtacaaagaaagagatgctgggccagccattgttgtcaagcccagggcagatacggaattggagaaaacctggactgtcttagaggcctctgcaggcctctaggctgtatgagaaaggcgagaacgggtgtactgtaaggtatcaattgattaaagaggctttgaaaaggccatgtttcagttgcacttggggggtaactcttcattaagggaaaaatctttttctttcatcactgcttgttgaaatcttcttaaaggttttgcacatcggtggtccccaaccctctttccaacctaaagaacctctttttaacatcacaaagttttacagacctgcctccaccaccatggtagccattacagcttcagagttcactggttgaaaaaataccgacacaaagccctttatggctcaagaatttttaaatgaattggaagcatccacaaacttttgaaaaacagcactgtatatattgtaaaacattatttcatcaacaaatatttgttgctcacattgatttgaaggctccttgacccgtaacttgataaacattgccttgtgctataccttctttccagtgcttttgaggggggaaaatgaattcttaagtacaattgtcctttggtttccacaggggattggtttcaggacttcccccacctccctgccatgaataccaaaatctatggatgccc

SEQ ID NO: 27325 - DNA, 1089 bp, Homo sapiens
  misc_feature (780)..(780): n is a, c, g, or t
  misc_feature (803)..(803): n is a, c, g, or t
  misc_feature (830)..(830): n is a, c, g, or t
  misc_feature (1002)..(1002): n is a, c, g, or t
gcggctgtatctagagtatccccttctgcgcacacgcacttgtggactttcctgtggaccccacagtggtctttccttcccctacagttacgaggtggccttatcagacaaaggacgagatggaaaatacaagataatttactacagtggagaagaattagaatgtaacctgaaagatcttagaccagcaacagattatcatgtgagggtgtatgccatgtacaattccgtaaagggatcctgctccgagcctgttagcttcaccacccacagctgtgcacccgagtgtcctttcccccctaagctggcacataggagcaaaagttcactaaccctgcagtggaaggcaccaattgacaacggttcaaaaatcaccaactaccttttagagtgggatgagggaaaaagaaatagtggtttcagacagtgcttcttcgggagccagaagcactgcaagttgacaaagctttgtccggcaatggggtacacattcaggctggccgctcgaaacgacattggtaccagtggttatagccaagaggtggtgtgctacacattaggaaatatccctcagatgccttctgcaccaaggctggttcgagctggcatcacatgggtcacgttgcagtggagtaagccagaaggctgttcacccgaggaagtgatcacctacaccttggaaattcaggaggatgaaaatgataaccttttccacccaaaatacactggagaggatttaacctgtactgtgaaaaatctcaaaagaagcacacagtatanattcaggctgactgcttctaatncggaaggaaaaagctgtccaagcgaanttcttgtttgtacgacgagtcctgacaggcctggacctcctaccagaccgcttgtcaaaggcccagttacatctcatggctttagtgtcaaatgggatccccctaaggacaatggtggttcagaaatcctcaagtacttgctagagattactgatggaaattctgaagcgantcatgggaagtggcctacagtgggtcggctaccgaatacaccttcacccacttgaaaccaggcactttgtacaactccgagcatgct

SEQ ID NO: 27326 - DNA, 898 bp, Homo sapiens
gcggccgcggccggacttggcgagccggcggctggaagctcgggcgggggagcggggcgcggcgggaaggagcgggcgacccggtgtgtgggccagcggagctccggaagccagttgagggaagttctccatgaatgtacgtcacaatgatgatgaccgaccaaatccctctggaactgccaccattgctgaacggagaggtagccatgatgccccacttggtgaatggagatgcagctcagcaggttattctcgttcaagttaatccaggtgagactttcacaataagagcagaggatggaacacttcagtgcattcaagatgaagtggtgaagagagcctgcgattgaagattttttcatctcagctttttcccccttaccttgttctctctcatgtttcatgatctgtgtcatagatatttcttcattacgagcacttcgcggtgtggcttttcaatgtctgaagtggattaagtggcccacagtcagttctgtgacttgagtttcaaaagtaaaattaccatcaacaatgtgattcaattttattttctatactagctaaaagcaaggaactatattattaacaatcttggctttactgtagtttaaggcaggtgatgatgatgcttattagtccacctgaaagagtccttccaggtttttggaagctttattcctgcttattaccttgcccttgagaagtccttcatggaaagtggaaacactgggttgacttcttttccccatatcctagttgaaagggacagcttatatgtatgttagactgtccaaaagtgtttgtagaacctcattttaaaaaatcaactgtattgtactttttaaaaaatgggatcttaaactctttattaaaaataataaatggaaatgtgttaagc

SEQ ID NO: 27327 - DNA, 768 bp, Homo sapiens
  misc_feature (21)..(21): n is a, c, g, or t
aaatacggaacccagtgagtnccagccgcagtgacccagtcaccctgaatctcctcccgaagctgcccaagccctacatcacccgagaagaccagtacagcaagcctccgcacaaaaaactgaaagaccgccagatcgatcgccagaaccgcctcaacagccctccttcttctatctacaaaagcagctgcacaacagtatacaatggctatgggaagggccatagtggtggaagtggcggaggcggcagcggtagtggtcccggaattaagaaaacagagcgacgagcaagaagcagcccaaagtcgaatgattcagacttgcaaggtgattgaagatagtactggagtccgccgggtggtggtcacaccccagtctcctgagtgttatcccccaagctacccctcagccatgtctccaacccatcatctccctccctatctgactcaccatccacattttattcataactcacacacggcttactacccacctgttaccggacctggagatatgccgcctcagttttttccccagcatcatcttccccacacaatatatggtgagcaaaaattataccattttatggaatgtcaagctacatcacccgagaagaccagtacagcaagcctccgcacaaaaaactgaaagaccgccagatcgatcgccagaaccgactcaacagacctccttcttctatctacaaaagcagctgcacaacagtatacaatggctatgggaagggccatagtggtggaagtggcggaa

SEQ ID NO: 27328 - DNA, 145 bp, Homo sapiens
tccattcctcccattcatgtgcctccaggttatatctcacaggtaatccatttgatggacttctctactcactatggacactgtcgttgctccaacagaatatatgttgaggcttcaaagccatattccaggagttaatttgggt

SEQ ID NO: 27329 - DNA, 1483 bp, Homo sapiens
  misc_feature (21)..(21): n is a, c, g, or t
  misc_feature (1174)..(1174): n is a, c, g, or t
  misc_feature (1197)..(1197): n is a, c, g, or t
  misc_feature (1224)..(1224): n is a, c, g, or t
  misc_feature (1396)..(1396): n is a, c, g, or t
aaatacggaacccagtgagtnccagccgcagtgacccagtcaccctgaatctcctcccgaagctgcccaagccctacatcacccgagaagaccagtacagcaagcctccgcacaaaaaactgaaagaccgccagatcgatcgccagaaccgcctcaacagccctccttcttctatctacaaaagcagctgcacaacagtatacaatggctatgggaagggccatagtggtggaagtggcggaggcggcagcggtagtggtcccggaattaagaaaacagagcgacgagcaagaagcagcccaaagtcgaatgattcagacttgcaagaatatgagttggaagtaaagagggtgcaagacattctttcgggaatagagaaaccacaggtttctaatattcaggcaagagcagttgtgttgtcctgggctccccctgttggactttcctgtggaccccacagtggtctttccttcccctacagttacgaggtggccttatcagacaaaggacgagatggaaaatacaagataatttactacagtggagaagaattagaatgtaacctgaaagatcttagaccagcaacagattatcatgtgagggtgtatgccatgtacaattccgtaaagggatcctgctccgagcctgttagcttcaccacccacagctgtgcacccgagtgtcctttcccccctaagctggcacataggagcaaaagttcactaaccctgcagtggaaggcaccaattgacaacggttcaaaaatcaccaactaccttttagagtgggatgagggaaaaagaaatagtggtttcagacagtgcttcttcgggagccagaagcactgcaagttgacaaagctttgtccggcaatggggtacacattcaggctggccgctcgaaacgacattggtaccagtggttatagccaagaggtggtgtgctacacattaggaaatatccctcagatgccttctgcaccaaggctggttcgagctggcatcacatgggtcacgttgcagtggagtaagccagaaggctgttcacccgaggaagtgatcacctacaccttggaaattcaggaggatgaaaatgataaccttttccacccaaaatacactggagaggatttaacctgtactgtgaaaaatctcaaaagaagcacacagtatanattcaggctgactgcttctaatncggaaggaaaaagctgtccaagcgaanttcttgtttgtacgacgagtcctgacaggcctggacctcctaccagaccgcttgtcaaaggcccagttacatctcatggctttagtgtcaaatgggatccccctaaggacaatggtggttcagaaatcctcaagtacttgctagagattactgatggaaattctgaagcgantcatgggaagtggcctacagtgggtcggctaccgaatacaccttcacccacttgaaaccaggcactttgtacaactccgagcatgct

SEQ ID NO: 27330 - DNA, 1626 bp, Homo sapiens
  misc_feature (21)..(21): n is a, c, g, or t
aaatacggaacccagtgagtnccagccgcagtgacccagtcaccctgaatctcctcccgaagctgcccaagccctacatcacccgagaagaccagtacagcaagcctccgcacaaaaaactgaaagaccgccagatcgatcgccagaaccgcctcaacagccctccttcttctatctacaaaagcagctgcacaacagtatacaatggctatgggaagggccatagtggtggaagtggcggaggcggcagcggtagtggtcccggaattaagaaaacagagcgacgagcaagaagcagcccaaagtcgaatgattcagacttgcaagaatatgagttggaagtaaagagggtgcaagacattctttcgggaatagagaaaccacaggtttctaatattcaggcaagagcagttgtgttgtcctgggctccccctgttggactttcctgtggaccccacagtggtctttccttcccctacagttacgaggtggccttatcagacaaaggacgagatggaaaatacaagataatttactacagtggagaagaattagaatgtaacctgaaagatcttagaccagcaacagattatcatgtgagggtgtatgccatgtacaattccgtaaagggatcctgctccgagcctgttagcttcaccacccacagctgtgcacccgagtgtcctttcccccctaagctggcacataggagcaaaagttcactaaccctgcagtggaaggcaccaattgacaacggttcaaaaatcaccaactaccttttagagtgggatgaggtaagcttattttcatattcacccatctaaaacaccatttcaaaaacaaaattaactgaacaaatgccatcttattcttttataagacatgctaaacacagaaaaaaggaatgctagtagagaaatttaaatcaatagttattgactatggaaaatgaagttagattgaagtagtattatgagttgtgtattgaaatatatgtacctggcttatttgcaagcactactgctgaaagaaaaaaagtggggtcttatctattttggatctccagtgtctagccagccaataatttgtattaaaaattgactgctttgtcatcttgactgctcagatgattttgataaggtaaaacacactgccgcttggaaagcataatttgcttttcctttttgaatgccatgtatgtactttggtgttacactgttgagtggcctctgtgagagcagagcagtacatagaagtcacattctacccatgtgcgagtgccctgtgggttagaatgtcctgtatcggatgccccccttgctgttcatgtcaccagaggcccttggaaggtatctacggtggagtgtccttattctcaaagccactgtgtgccaactggtggacccagtgcatttctggcctagctaactctacacacagaatctcaggcaggaaacacttgacctagaagcctttcatttctaaaaagcaactgtaggtcgggcgcgatgactcacgcctgtaatcccagcactttgggagccaaggcaggtggatcacgaggtcaggagatcaagaccatcctggctaacacgatgaaacaccgtctctactaaaaatacaaaa

SEQ ID NO: 27331 - DNA, 771 bp, Homo sapiens
  misc_feature (43)..(43): n is a, c, g, or t
  misc_feature (56)..(56): n is a, c, g, or t
agcggagtgtctagcagcaaactcctaaggctggatggtggangccagttgagggnttctccatgaatgtacgtcacaatgatgatgaccgaccaaatccctctggaactgccaccattgctgaacggagaggtagccatgatgccccacttggtgaatggagatgcagctcagcaggttattctcgttcaagttaatccaggtgagactttcacaataagagcagaggatggaacacttcagtgcattcaaggacctgctgaagttcccatgatgtcacccaatggatccattcctcccattcatgtgcctccaggttatatctcacaggtgattgaagatagtactggagtccgccgggtggtggtcacaccccagtctcctgagtgttatcccccaagctacccctcagccatgtctccaacccatcatctccctccctatctgactcaccatccacattttattcataactcacacacggcttactacccacctgttaccggacctggagatatgccgcctcagttttttccccagcatcatcttccccacacaatatatggtgagcaaaaattataccattttatggaatgtcaagctacatcacccgagaagaccagtacagcaagcctccgcacaaaaaactgaaagaccgccagatcgatcgccagaaccgactcaacagacctccttcttctatctacaaaagcagctgcacaacagtatacaatggctatgggaagggccatagtggtggaagtggcggaa

SEQ ID NO: 27332 - DNA, 513 bp, Homo sapiens
taaaaaaattaactctttaaccatcagtccctttccactcaaatcctaaagcaatgcagtttcatattttctgcttgtacaaggttaggatccatcactgactcaaacatgatcatttagacgaccatttagaaggcccaagagcaatgtaactggcatttctgggtcacagctaattgaatggaatgtgtgcctgtgaccgatcgtacaggtagcactttggcaaagaggtgtttgtgaaagtgcataagtatcgtttgtgtgttctgactattgtttgtatactactaaatgctctgaaaagtgttataatttgtacatagtatgaatgatttggtggagggaaactcccttgtgaattttgtataaagagtatactgcattcctgttgtcaccagaaaagtactgatatggcacattctgttaacagtaattggatatgtatgccttgttagaagagaagagggtaatttcccacttattataaataaaattattcttatttcatgtctt

SEQ ID NO: 27333 - DNA, 451 bp, Homo sapiens
tcctgacctcatgatctgcccacctcagcctcccaaagtgctgggattacaggcatgaaccactgtgcctgactgaaactcatactttttggctagcaccttcaccctctccatcccatttccccagccctagacaaccactgatctatagagagctgagttttgaagggttaacaaatgcctataggtgaaagcagtttggatgtgttggcttgaagatagagatggatgaccaaatgtgatcttgttgaggaatgtggaaaaatgaaggtggtgaggctgacagaccgaaggtgatttatgccaaagagtttgaatttcaatgaatcactcagtcatcaaacaggtattgagatcctatatgcagagcgcttcctaggcaaagtgaagtcaattcaatgaggagctgtcgtagattctggagcttgggagagacactctcaaagtgttg

SEQ ID NO: 27334 - DNA, 571 bp, Homo sapiens
gtttaaataaaccatttcccctctaaatatttggaactgagagatattacctcagattctgactcttactaagtcatcattctctttttaactgccagaggttacagtcttatcaccctgtcaaaacaattagactattcaatggaatattgtctttggtagaatttaaaacaatgtgtctttaataaaactgaaagtgaaaaatcttcttggctaattctgtggtgtactttaggaggcataatagtggagaaaatttggtctcttgaaatttgagcacatcccactgtattatttcactgtatggcaaaagtgaaggaggtaggcatgctctgtcatccttaattaagctttgggctgcttattgaagtatcattttttctatagattggaacatggtttatatagcagactatcttgtccactgacattgcccagtactgagttcctaatctaatttcattttctctgaaatctgccttcctagttctgactaagctaaataactcagggagatttatattctatttcagatggtccactcttgggactatgccgactgtatctcatg

SEQ ID NO: 27335 - DNA, 740 bp, Homo sapiens
agtccatggccaaatgcagattcgtagtttataatgatgagggaggcaaagtgaagagtcatctgaattgcccagatcaataatctccatgtctgatatggtgattgagaaatctacttcctggagctccgagtgctatccctgggctgctctcatcaacccattcagcagtgtggctgccaacagtttcttcctggagccagctatacagagctgaaggactggattccagagggaagtcaagcatttttccagtggccagagaggaaacctaatgtatatgagagtgctttgtaaatggtaaaaagccccagataaatgtgtgctctcatcatccctggagctgatgtcttagaggcttccccattaggtgacatcagcagtgctaagtgtactagctatatttggatgttttattctagtttttgttgttgttgttgttagtttgtttacaaaagggtatatattaaccaggcatgggttccagttgcaagttttcatgcttttaaagtaatatttattaagatatataaacttctttctacgtggtaatcattttttggagggagttcagatcattgattttcatactgaaacatttaaagggatttaaatcagtgtctttgtttaaagcatcctgattattagcatcgtgagaaacttttatttttctaataagttgctaacaataaaatcctcggcggtgtcattaatagaaatgaaatgactgcctaaagtca

SEQ ID NO: 27336 - DNA, 2711 bp, Homo sapiens
  misc_feature (920)..(920): n is a, c, g, or t
  misc_feature (980)..(980): n is a, c, g, or t
tccctttttaaaataaccatttaaaaattttctaccctgaattgcattttgaaagggatggttcctaggtaacacaaggtagaaaatttacatctcaaaggcagagaacttacatttcaggcctaaatattgttatttgccaagacagaaagttgatgctaagaagcccagttcagacaaaatggttgaaggtgagtttatttggactaatgctctcacctattgtaagaatttctactgattttcctttatagatacacgtttttacaaagagtttcaaaataactggctaaataccagaaacgcaaattttggagactgatttaattcaataggcggtcttttcaacttagcttctgtttcttaactagattactgagttcagggcagagcccattagcaaatagagcagacaaagggtttcctatttctggatgcagatggatagttctgaaaatgcaaatctgcttcacccaagggcctaatttttataaatattacctagctttctttttccctttggagtaaaacagtaactaagtgaaaagattggcagattcaattttcttataaactagttgcttaaacttttcatttgccttctacatgagctcttttaaagagacaaacatttttgaaatctttttagaagcttttgcacatcaataggtatccctaggagggcctgattcagaagccctcatttttaaactcaattcttagatgaacagtcttattcatctggaatgttccacataatggtcatcataattctaatttatctttagtaagatttcaccatttttgtaagtatttgcagcttctaggccctaacacatgtaaaaggtaaacatagccagaaggtgaaatacacagttctttaaaaatttaaggatgctggccaggcgaggtggctcacncctgtaatcccagcactttgggaggctgaggtcggaggccaggagtttgagaccagcctngccaacatggtgaaaccccgtctctactaaaaatacaaaaattagatgggtgtggcagtgtggcctttaatccagctacccaggaggctgaggtgcgagaattgtttgagcccaggaggtggaggttgcattgagctgagactgcgccactgcactccagcctggacaacagagtgagatgctgtcttaaaaataaaaaaaagaattaaggatgccatttttaagttgaatcttgagtctctcagagtcaagataaaagtctgagtgaaacgccatgaggttgggtcactgtgtttgctatctatctacctatctatctatctatctatctatcatcatctatcttatcatcatctatctttatctatctatctatctatctatctatctatctatctatctatttttgtccaggtttcctggcttgtaattcccatagcccttgttacaagcttttgttacaatgttgggtgttaggccttgcaggcaggcctcaggaaacagaatctctctgaccttctcttgccttcctttcacttccgcaaggcagaactgtgggtcatataaacccttattccagagagggtcctgctccatatgctgggggaaagaatgccaacttaatgaagcatccataaaaacccaagaggactgggttccaagagcttctggatagctgaacacatggagggtcctggagggtgacacaccccgggaggactggagagctctgtgccccttccccaatactgtgccctatgcatctcttcatatgttatcctttatgattttctttgcaataaactggtaaacgtgtttccctgagttctgtgagctgcaccagcaaattaatcaaaccccaagtggaggttgtgggaaccccaacttgaagccagttggtcagaatttccagacacccagagttacaactggtgtctgggaggtggggcagttttggggactgagcccctcgacctgtggcatctaacactatccacctggagacagtagatagtgggcaacatggtgagacccactatctccaagtagatagtgtcagaataaaactggaggacacctacttggtgtccactgcttagcgtgtgggaaaaactctcacacatttggtcacagaagtcttcttatgtgttgatgattgttgttatgttagtatgagagcagaggaaaaatggtttagagttttttcccaaaacagtcatgtaatgctatcatagtatacctcagtgcatagatgttttattttttctgccactcattctagagtgcagtggcatgctcatagctcactgcagccttgaattcctgggctcaaggtcttagctttccaagtctcagctttcctgggctcctgcctcagctttccaagtagctgggattacaggcacataccaccatgcctggctttgtttgttttttgtgtggacagggtctcgctttgttgcccaggctggtctcaaactcctggcttcacgcaatcctcccacctcagcctcccaaagtgctgggattataggtgtgagccaccatgcccagcctaaataattttttaaattccagtttttaattattctttgttaggatacagaaatgctttgtgtcctgcaatactgttaaatctccttattagttttagcagctttttttgtaaatcccttaggattttctatgtatgtgattgttatctgcaaataaaggcagttttatttcttc

SEQ ID NO: 27337 - DNA, 725 bp, Homo sapiens
ctattgactccctaccatgattggaaatctcagttttgttttgtttctaattttttttaattccaagcagggcctaggacagtgtgtgtcatagagcaggtgtttaggaatgattgtctggctcattacttgagacaaacactctcacactctgttggaataaagaatcccacagtcctggcgcttgttttgctgctgtgcatgcaggagaggcacgggccactggtcgtcttctgggctggcaaagccatctgacttcataggaatatagaggtagcaattacaactttattccctggcaacaaattatcaggatgactgttaagaagggcctgctcttcgaagttaaagtttactttcacaggacataatctctaaagcgcagttatctttatataaataacatgcccaaaggcagtgcctggtttaataacaaaataaaactgttttcccataagtctccacactgaataagtgagtaaaacagatacttttgaggttcccactttattatgctgacaaaggagcacttctctgcagcacagagatagaacatttttcccttgtcctgagaggcggcccaaaggctagagcagatgtgactcttctgaggcagtgcaccagaacccgagggatgggcagggcctgaaagctgcccgctctgaccgggtgcctctggctaggaattgtccatctccgagtctaggagtgcccccactaatccc

SEQ ID NO: 27338 - DNA, 273 bp, Homo sapiens
cgccttccatcctgacaaggagaatgcgaggcatgaggttggggtagctgtgggtagctgtgtcctctccccctctgccctcggtctctccccttttcacccttcaccttccccatctctgcccttcagtctccctctcctcggtccctctgtcccctcctccccctcagccctctgtcctcccggcacgagctgatagtggagaggcctgtccccccaccccccagtctctaggcaaagcttgtcccagcatcagggaggaggcggtggcag

SEQ ID NO: 27339 - DNA, 540 bp, Homo sapiens
aaatccctgcacctgtagagcctgcaccccctccaggacgggtgagtcccttggccacagccaggcctgacaccccgaatgcgctactccctgaccttccattaataccagcttttcgctagcttctggtcttatgcttcacctgaaccatgcagcaggtccctgtcctcatcaaactttgatgccgaacaaagcaaatgtccggcaggccacagtgcagcctcctccccctcaggaccccaggcccaccctgcacaccctcatgtggtccctccaggctcctgggcggggtggggggacagggatttctccgcaacataccacccctgcagtgggattcccagcgttaaggggagaaggtgtcactggcacgtggtgtgcacaattctgaatcctccagcctctccagcatttgccttcattcccacagaggccgagaggctcatggcttccagaaggctatgagatgtggcacaggcacccgacaggtaggactggctggaagcctcgggcctgggcaggagcggctggagcctgcct

SEQ ID NO: 27340 - DNA, 268 bp, Homo sapiens
ataatgaatggcactattaggccatattcaaggcctttttgataccatttagagtgacttgagttgaataataaaatgctggttaagccattattaaaactggtgtgctattttcaccctttaaataaagacacattgtgtacaaaaatttggaggattttgactaactacattaaatctatttaaagagtttccctagggcgtaaaattctaacactctttcagtgagttactagcaagctaaaaccattcctttagacattgtact

SEQ ID NO: 27341 - DNA, 428 bp, Homo sapiens
ggtgactgctggcaatgctaggtggggcttggaagcccagtgctgtccaagtgcacacagactctacaagaggccaaggaggacactggtatccctgcgccatggcagctgcaccccagggggtgagccatgggccagagggcacccaaatactcaccggggggtccagcactattagctgaaaatcaagcaaaggaaaaaatgttgagcattttgattatccaaaagggagttggacaattcatttatgaaccaaagaccaaaacctaacagagctagattcaaagaaaacccactgtggattaattttaattttaagtagttagatgaaataattgcaaaataaaatattaccaaatctaatctaaaagcatgtaacaaggaattgtcccacgatcaagtaaggttgtttggggaatgcaaggatc

SEQ ID NO: 27342 - DNA, 1228 bp, Homo sapiens
tgtaagacattcccagaaagtcagactcactcatattcaggtgtaagaaaatatattccaataccaaatatcaactttttgtgtaactttcacttgtctacccttccattattttgaatagtttagaatagaatgtatttcttttctattttagaactacttggaaattattaaactcatagttcaataaaatagtgttttgggctttttttctcttgactgtgtaaagtaaaatgaagaaaaagattgtccttagaagaatccctctctgttatttttgataattatatttctcccagggatagcatatttgaaaattcataactgttgggtcagccacagtggctcacacctgtaatcccagcactttgggaggccgaggcgggcagaccatctgaggtcaggagttagagaccagcctggccaacatggtgaaaccctgtctctactaaaaatacaaaaattagctgggcgtggtggcaggcacctgtaatcccagctactcgggaggctgaggcaagagaatcacttgaacctgggagacggaggttgcagtgagctgagattgtaccattgcactccagcctgggggacaagagtgagacttcgtctcaaaaaaaaaaaaaaaattcatattgttggccataccagtgtgatttacttttatatgataagtcttcttaagaatcagtcaccattttaatttttgatacttattttctcaatgccagagagttgaaagataaccttggcagtgatgacccagaaggtgacataccagtcttgttgcaggccgtcctggcaaggagtcctaatgttttcagggagaaaagcatgcagaacagatatgtacaaagtggtgagtttcttaataactgaattcccatatcaaacttgttttatacatatttaaatccaggtgtcttctttaacaagctggcctatcaggaatgcgatgtttatgccttcagtcaagccaagaacaagaaggaaactaaactgataagattcttgtagtttaatatgtaactaaattccttgagaattagacaaagctttaagtgtattttgttaaatatgttggaatatatcagtttactcagcttaaaaatttttttgttttggaaaatcagaattaatttgaaataagtctttcattttttaatactgattgtgattatattcatggttttctagtaattgatttaatactcctgttgccttagca

SEQ ID NO: 27343 - DNA, 429 bp, Homo sapiens
aattcaggatgaatggtgatatgccccatgtccccattactactcttgcggggattgctagtctcacagacctcctgaaccagctgcctcttccatctcctttacctgctacaactacaaagagccttctctttaatgcacgaacggcagaagaggtgaactgccttttggcttgtagggatgacaatttggtttcacagcttgtccatagcctcaaccaggtatcaacagatcacatagagttgaaagataaccttggcagtgatgacccagaaggtgacataccagtcttgttgcaggccgtcctggcaaggagtcctaatgttttcagggagaaaagcatgcagaacagatatgtacaaagtggaatgatgatgtctcagtataaactttctcagaattccatgcacagtagtcctgcatcttcca

SEQ ID NO: 27344 - DNA, 808 bp, Homo sapiens
gcaatccagagaccaaaaggagcccattgcgatctggctctgggggaccctgggatgatatccctacccccagggacaggacccaacccccggggacctggagagactctgtgccctgcaggaccgatgggggactcctccctgtatgtacgtgtgcgtggccctgccttgttcttgccccggacctggcctggtgaaggaggcacgaggaagattgcagtcagggacgctcagcctgggagctgaccctcaggtgaggccctaaggaagttcccagacctccctgaacctcagtatgctcatctgtccagcagcaaccctgggccttaagtgagaacatctatgcggaagaggcaggtgccaatcaagccctctgtaaagttacctccccttttcccttcttctcctctcacagagctgaagaatattttgcaaagttcattgtaaacattaaaataatcttgggtgtttatcattcgttaaacctgttgggctgactttaggtctaccgctctcaaaaaaccaagaataaatggcacagggagctgaaaaaaagacaccgagctcgatcaaagaagaaacgaaaaaatctccaggaggatttctatatcgggccgtggccgggcgcaaacagaggggtgtgattaaagaggcggaccatgtggtggaaaagacagttgtttcgtccaagcccaaggattttctagggacccgaaggggtgggaagatttcagggcggactcccactatagtagagcgcgtagtataaacttcgaaaaaagcagacagttgaactcgcggcatctag

SEQ ID NO: 27345 - DNA, 640 bp, Homo sapiens
gcaatccagagaccaaaaggagcccattgcgatctggctctgggggaccctgggatgatatccctacccccagggacaggacccaacccccggggacctggagagactctgtgccctgcaggaccgatgggggactcctccctgtatgtacgtgtgcgtggccctgccttgttcttgccccggacctggcctggtgaaggaggcacgaggaagattgcagtcagggacgctcagcctgggagctgaccctcagatccagggatcccagcagccttagaaagctgatgatgccaggagcggggacttgcctggggctcaagggaaccattatgcctgtgctgagatgaaacgtgtcccactattcctggatgtgtacagaacccgacaccatggctatgagtacctaccacgaagaaacagtaacaataactggactgtcaatactggatgtcttgggagcttaagagacactgttctgagtattttacatgtatttgtcagtggctgttcccatgcaggaggccctgggacatgcctgctactgtttctttctgctggtctgaatattttacatgtattatctaatttaatcctcacaacaactatcatacttatggtaattatattatacccattatgc

SEQ ID NO: 27346 - DNA, 364 bp, Homo sapiens
gagggtaggcatttttgtctccaggtattgggtaggtaaccctaagatactcagcaccagctcgtagtgagcccttgggagtgtacgtggagctgaactgaaccagagccgccctcaaggaagcgggtgtgtgttgagagagaatgctcccacacaggtgttgggcagggcgggttgcctgcttgcctgtgtggtggtttctgaggatgctccagaggtgcatctgctccaggaactccagaacagactcagcaggagtgtgggcctggcccaggatggacctgcttcctcctgaggcttcctagcctccaccatgcagtcctccccctctgtgttcctaaaaccggctccaccttgctgcccc

SEQ ID NO: 27347 - DNA, 428 bp, Homo sapiens
gggtaataaacacataagctatactgtcttgtcttcaactggaagggtgagaggtgaagctggcagatctagctcagagatgatgaggaagatgggaaggaaaagtggtcccgacaggctacagactgggaatatccgaggacccttggtcaaagacatggcaagggacaggggcactgttggaaacacttccaaagctctacaagtttgtttgtttgtttgttttgaagggaggaatagaggagaggtgatataaagaggctcaaaggggctgcagctggctgcagctgggctgggaggaggaagctgggggagacatgaggtcagtgtgggactgggaccaggccaagggctgagtctctttcttccctttctccccatcagcagggaagaacccaagagagcccagttcctagccttaaaaaaaa

SEQ ID NO: 27348 - DNA, 534 bp, Homo sapiens
catattatctgttatcttttttaaagggtcaaatgaaatattcagaaggctttactttatagatgggttcctgttgaaatggatcttatatctctaaccattgtacaggagaaattcattattgcctgatggcaaactcatgtctctggaccaagtgggccaagccctccccctgaggatgggtgtagtggttccatttaactgatggaatctcttgtatgcatgactaatgtgaacatttctcttctttctagaatctcttcattctaactctactttttttcctgaagttcaacataaaacctttaccacgaactcttgagcacttggtagattataagtgatgcttgcgtccttgtcctctagtgaacctttaccacaaactctcgagcacttagtgggattatagctgatgtttgtgtccttgtcctctagtgtgttcctcaagtgtttgcttccagtgtgcatcacacttttatcatcagaaaagacaaacaaaaaatcttttaactctgttttgaacatagaagaaag

SEQ ID NO: 27349 - DNA, 424 bp, Homo sapiens
gcatggaagtcaagccagggcctctggggaagatatggcctgagctgagatttggaaacaaatgaataaaaacctggaaacaagagcaatctggacagaggaactctcagctgacctccaggagactcagcctccaggcctcaggaagtagctggcagacagaggcaagcgagcaaacagagtcaccacaggggtagcctttggagccagactgcctgagttcaaatgctggttcagcccttttttagctcagtgacgttgggtgcatcacttaacctctctgattcttcacctgtaaaatgtggctaataagtactacttcccttatgggttgaaatagggattgaataagttcatgtattgagactgtttagaatagtgtctggcacatgccctgtgtgtgtattcctctacagaacctcca

SEQ ID NO: 27350 - DNA, 333 bp, Homo sapiens
aaaatatgtacaagatctatgagaaaaatatataaaatctaatgaaagaaatcaaataactgaataaatggagagagagttcatgttcgtaggtaagaagactcaatattgtcaagatgtcaatttttcacaacttgatctatacttttaaaaaatatctataaaaatctcagtctcccaaagtgctgtgattacaggtggtgagcaaccacacccggccaagcagaggatttttaggacagtgaaactattatgtataacactgtaatggtgggtcaatgtcattctttatacatttgtcaaaattcattgaatttacaacacaaagaagga

SEQ ID NO: 27351 - DNA, 486 bp, Homo sapiens
acattccttccgacctgtagattgggcttttcatatacgtatttatcatgtcttcttggattttcttcatttaattctatctgaactttcgaagtgggaagcaaaggattcgggggagagcactggtttcagtacacgaaaatatccctggggtttccttacctttatctttggatatccccatttttctcgacacacaatccaagtttctagccataatccttagattacaaaagaacaggacttttggtacacatcttttttttttttttttttttttttttgagacagattctctgtctctgttgcccagtctggagtgcagtggcgcaatctcggcttcactgcaacctctgcctcctgggttcaagcgattctagtgtctcagcctcccaagtagctaggaccataggcacgcgcccccatgcctggctaatttttgtatttttagtagagacagggtttcaccatgttggccaggctggt

SEQ ID NO: 27352 - DNA, 531 bp, Homo sapiens
ataaaggggaattcccttcagtgagtggcttccctgccaatcatggcaaattacacagctctctagtaaatatctgcacgatgccaaccgagaagaagcggaggtcagaaaagccaattttgagacaacacttcaatccttcctctaagtcactgtgattcagaaaacatttaggtgcatctcctatcctggaaataaaaactgatttttgcaaaggttaaatgagatgcgacacattaaagaggctattgtgtaactcttactatccaatagcttttatgctcatcatcatgtcattcgattctgctcattaacgctcatcctgcaaacattcgagcaagaccagccactttctagtacctcaggccatcctttgtcagctgattccctgtcacacagatgctatgtatttgcctgtattgcaaatatcgtatatattatatatagtatataaatgtgtgtacatacatgttttcaatgtatagatttgctgcaaatacttcaatataataaaaactgtattctactcta

SEQ ID NO: 27353 - DNA, 5168 bp, Homo sapiens
gccttggtcattggaccggctcccaaccaaaaccacaccatagggttttctgctcttggccaacccaacatgagaaaagaggaattaaatggtcctactaataagaaagcctcagcgtagcattaagggacgtagcaggtcttctggccacactcccctacaaatgtggaaagctcattggtgaaaacagttctcaggggtcaaagcaaaggaactgatctgggtaaagtagaggctgcctgatcccaatcagacatcctcacctctcaataacctttgccatttctctgccatagagtgaaagtgtccccaggccaaaagcccagggctccaggctgccatcaggatggtgggtgaaggaccctaccttatctcagatctggaccagcgaggccggcggagatcctttgcagaaagatatgaccccagcctgaagaccatgatcccagtgcgaccctgtgcaaggttagcacccaacccggtggatgatgccgggctactctccttcgccacattttcctggctcacgccggtgatggtgaaaggctaccggcaaaggctgaccgtagacaccctgcccccattgtcgacatatgactcatctgacaccaatgccaaaagatttcgagtcctttgggatgaagaggtagcaagggtgggtcctgagaaggcctctctgagccacgtggtgtggaaattccagaggacacgcgtgttgatggacatcgtggccaacatcctgtgcatcatcatggcagccatagggccggtgattctcattcaccaaatcctccagcagactgagaggacctctgggaaagtctgggttggcattggactgtgcatagccctttttgccaccgagtttaccaaagtcttcttttgggcccttgcctgggccatcaactaccgcacggccatccggttgaaggtggcgctctccaccttggtttttgaaaacctagtgtccttcaagacattgacccacatctctgttggcgaggtgctcaatatactgtcaagtgatagctattctttgtttgaagctgccttgttttgtcctttgccagccaccatcccgatcctaatggtcttttgtgcggcgtacgcctttttcattctggggcccacagctctcatcgggatatcagtgtatgtcatattcatacccgtccagatgtttatggccaagctcaattcagctttccgaaggtcagcaattttggtgacagacaagcgagttcagacaatgaatgagtttctgacctgcatcaggctgatcaaaatgtatgcctgggagaaatcttttaccaacactatccaagatataagaaggagggaaagaaaattactggaaaaagctggatttgtccaaagtggaaactctgccctggcccccatcgtgtccaccatagccatcgtgctgacattatcctgccacatcctcctgagacgcaaactcaccgcacccgtggcatttagtgtgattgccatgtttaatgtaatgaagttttccattgcaatcttgcccttctccatcaaagcaatggctgaagcgaatgtctctctaaggagaatgaagaaaattctcatagataaaagccccccatcttacatcacccaaccagaagacccagatactgtcttgcttttagcaaatgccaccttgacatgggagcatgaagccagcaggaaaagtaccccaaagaaattgcagaaccagaaaaggcatttatgcaagaaacagaggtcagaggcatacagtgagaggagtccaccagccaagggagccactggcccagaggagcaaagtgacagcctcaaatcggttctgcacagcataagctttgtggtgagaaaggggaagatcttgggaatatgtgggaatgtgggaagtggaaagagctccctccttgcagctctcctaggacagatgcagctgcagaaaggggtggtggcagtcaatggaactttggcctacgtttcacagcaggcatggatctttcatggaaatgtgagagaaaacatactctttggagaaaagtatgatcaccaaaggtatcagcacacagtccgcgtctgtggcctccagaaggacctgagcaacctcccctatggagacctgactgagattggggagcggggcctcaacctctctggggggcagaggcagaggattagcctggcccgcgctgtctactccgaccgtcagctctacctgctggacgaccccctgtcggccgtggacgcccacgtggggaagcacgtctttgaggagtgcattaagaagacgctcaggggaaagacagtcgtcctggtgacccaccagctacagttcttagagtcttgtgatgaagttattttattagaagatggagagatttgtgaaaagggaacccacaaggagttaatggaggagagagggcgctatgcaaaactgattcacaacctgcgaggattgcagttcaaggatcctgaacacctttacaatgcagcaatggtggaagccttcaaggagagccctgctgagagagaggaagatgctggtataatcgttttggctccaggaaatgagaaagatgaaggaaaagaatctgaaacaggctcagaatttgtagacacaaaagttcctgagcaccagctcatccagactgaatccccccaggaaggaaccgtgacctggaaaacatatcacacgtacattaaggcttctggagggtacctcctttctctcttcactgtgttcctcttcctcctgatgattggcagcgctgccttcagcaactggtggctgggtctctggttggacaagggctcacggatgacctgtgggccccagggcaacaggaccatgtgtgaggtcggcgcggtgctggcagacatcggtcagcatgtgtaccagtgggtgtacactgcaagcatggtgttcatgctggtgtttggcgtcaccaaaggcttcgtcttcaccaagaccacactgatggcatcctcctctctgcatgacacggtgtttgataagatcttaaagagcccaatgagtttctttgacacgactcccactggcaggctaatgaaccgtttttccaaggatatggacgagctggatgtgaggctgccgtttcacgcagagaactttctgcagcagttttttatggtggtgtttattctcgtgatcttggctgctgtgtttcctgctgtccttttagtcgtggccagccttgctgtaggcttcttcattctgttacgcattttccacagaggagtccaggagctcaagaaggtggagaatgtcagccggtcaccctggttcacccacatcacctcctccatgcagggcctgggcatcattcacgcctatggcaagaaggagagctgcatcacctatcacctcctctactttaactgtgctctcaggtggtttgcgctgagaatggatgtcctcatgaacatccttaccttcactgtggccttgttggtgaccctgagtttctcctccatcagtacttcatccaaaggcctgtcattgtcatacatcatccagctgagcggactgctccaagtgtgtgtgcgaacgggaacagagacgcaagccaaattcacctccgtggagctgctcagggaatacatttcgacctgtgttcctgaatgcactcatcccctcaaagtggggacctgtcccaaggactggcccagctgtggggagatcaccttcagagactatcagatgagatacagagacaacaccccccttgttctcgacagcctgaacttgaacatacaaagtgggcagacagtcgggattgttggaagaacaggttccggaaagtcatcgttaggaatggctttgtttcgtctggtggagccagccagtggcacaatctttattgatgaggtggatatctgcattctcagcttggaagacctcagaaccaagctgactgtgatcccacaggatcctgtcctgtttgtaggtacagtaaggtacaacttggatccctttgagagtcacaccgatgagatgctctggcaggttctggagagaacattcatgagagacacaataatgaaactcccagaaaaattacaggcagaagtcacagaaaatggagaaaacttctcagtaggggaacgtcagctgctttgtgtggcccgagctcttctccgtaattcaaagatcattctccttgatgaagccaccgcctctatggactccaagactgacaccctggttcagaacaccatcaaagatgccttcaagggctgcactgtgctgaccatcgcccaccgcctcaacacagttctcaactgcgatcacgtcctggttatggaaaatgggaaggtgattgagtttgacaagcctgaagtccttgcagagaagccagattctgcatttgcgatgttactagcagcagaagtcagattgtagaggtcctggcggctgattctagaggaggaagaggctctgtgagatgaataggaggagtcttcaggaggaggggctgtcctctccgcaggcagccctggtcttcagcccctcccatccacggagtgagctggggctgaagttgtccccactgccatactcagtccatgtcaccccacttggtgggcttggggttggttctgggtggtgaaccggggcagacccagctaatggattaaaaaactgcccttcacctcccaaatccccaagggttcctcatgtgttttcaccaaaaccaccccagtgcctgagattgaaaatattgtaactttcagttagaaatcagccacaataaacaacatgggaaaatgccttaggatggagtttgcaaggtttccttgcccattatcagaaggaaaaagagcagaattttcttctcgtttaaccccactcacttccatcttgactgggtgacaagtggtaatgacacagatttgtagcgtgaaagactgaatacagtgtttggccaaaaatttttttaaaaatcatattatatgtttcaattgatctgttagaataaccaagaaaacaaaatgctggagtttctctataaatgacacttttatatcttctttattcgtcgttaaaacgcggtaggaaattaccctgaaatgtcgccttgcaattatttcactgaagatattccaatttccatactatttcctccaatagacccttgttgcct

SEQ ID NO: 27354 - DNA, 5325 bp, Homo sapiens
aggtgtggtgggagtggcagttgaatggggcagttggagaggaggacttcaggcgggtgggacaagagaaactgaatctgaggtccttggggagaagcaggccctggagtcctgggcagcagatgccaggctctgagccccatgactgctgaccctcctcccctccctctcatcctcagcccagggctgccaaatttagcaaagtgccattccagctgcaatgcttccaagccgcctcagatcatcaaaacttcacatgccctggggagcactcaaggaaattaccttctagcaccaatttcctatgcgcgctgattactcaaacctggccagggaggcctggcctccagtgtttggcatctgggactcaggagcccttaagacaagctgatgacatcttgctgccagggtcccttaccattagaaaagggaaccaaaaaatagaagttatagagtgaaagtgtccccaggccaaaagcccagggctccaggctgccatcaggatggtgggtgaaggaccctaccttatctcagatctggaccagcgaggccggcggagatcctttgcagaaagatatgaccccagcctgaagaccatgatcccagtgcgaccctgtgcaaggttagcacccaacccggtggatgatgccgggctactctccttcgccacattttcctggctcacgccggtgatggtgaaaggctaccggcaaaggctgaccgtagacaccctgcccccattgtcgacatatgactcatctgacaccaatgccaaaagatttcgagtcctttgggatgaagaggtagcaagggtgggtcctgagaaggcctctctgagccacgtggtgtggaaattccagaggacacgcgtgttgatggacatcgtggccaacatcctgtgcatcatcatggcagccatagggccggtgattctcattcaccaaatcctccagcagactgagaggacctctgggaaagtctgggttggcattggactgtgcatagccctttttgccaccgagtttaccaaagtcttcttttgggcccttgcctgggccatcaactaccgcacggccatccggttgaaggtggcgctctccaccttggtttttgaaaacctagtgtccttcaagacattgacccacatctctgttggcgaggtgctcaatatactgtcaagtgatagctattctttgtttgaagctgccttgttttgtcctttgccagccaccatcccgatcctaatggtcttttgtgcggcgtacgcctttttcattctggggcccacagctctcatcgggatatcagtgtatgtcatattcatacccgtccagatgtttatggccaagctcaattcagctttccgaaggtcagcaattttggtgacagacaagcgagttcagacaatgaatgagtttctgacctgcatcaggctgatcaaaatgtatgcctgggagaaatcttttaccaacactatccaagatataagaaggagggaaagaaaattactggaaaaagctggatttgtccaaagtggaaactctgccctggcccccatcgtgtccaccatagccatcgtgctgacattatcctgccacatcctcctgagacgcaaactcaccgcacccgtggcatttagtgtgattgccatgtttaatgtaatgaagttttccattgcaatcttgcccttctccatcaaagcaatggctgaagcgaatgtctctctaaggagaatgaagaaaattctcatagataaaagccccccatcttacatcacccaaccagaagacccagatactgtcttgcttttagcaaatgccaccttgacatgggagcatgaagccagcaggaaaagtaccccaaagaaattgcagaaccagaaaaggcatttatgcaagaaacagaggtcagaggcatacagtgagaggagtccaccagccaagggagccactggcccagaggagcaaagtgacagcctcaaatcggttctgcacagcataagctttgtggtgagaaaggggaagatcttgggaatatgtgggaatgtgggaagtggaaagagctccctccttgcagctctcctaggacagatgcagctgcagaaaggggtggtggcagtcaatggaactttggcctacgtttcacagcaggcatggatctttcatggaaatgtgagagaaaacatactctttggagaaaagtatgatcaccaaaggtatcagcacacagtccgcgtctgtggcctccagaaggacctgagcaacctcccctatggagacctgactgagattggggagcggggcctcaacctctctggggggcagaggcagaggattagcctggcccgcgctgtctactccgaccgtcagctctacctgctggacgaccccctgtcggccgtggacgcccacgtggggaagcacgtctttgaggagtgcattaagaagacgctcaggggaaagacagtcgtcctggtgacccaccagctacagttcttagagtcttgtgatgaagttattttattagaagatggagagatttgtgaaaagggaacccacaaggagttaatggaggagagagggcgctatgcaaaactgattcacaacctgcgaggattgcagttcaaggatcctgaacacctttacaatgcagcaatggtggaagccttcaaggagagccctgctgagagagaggaagatgctggtataatcgttttggctccaggaaatgagaaagatgaaggaaaagaatctgaaacaggctcagaatttgtagacacaaaagttcctgagcaccagctcatccagactgaatccccccaggaaggaaccgtgacctggaaaacatatcacacgtacattaaggcttctggagggtacctcctttctctcttcactgtgttcctcttcctcctgatgattggcagcgctgccttcagcaactggtggctgggtctctggttggacaagggctcacggatgacctgtgggccccagggcaacaggaccatgtgtgaggtcggcgcggtgctggcagacatcggtcagcatgtgtaccagtgggtgtacactgcaagcatggtgttcatgctggtgtttggcgtcaccaaaggcttcgtcttcaccaagaccacactgatggcatcctcctctctgcatgacacggtgtttgataagatcttaaagagcccaatgagtttctttgacacgactcccactggcaggctaatgaaccgtttttccaaggatatggacgagctggatgtgaggctgccgtttcacgcagagaactttctgcagcagttttttatggtggtgtttattctcgtgatcttggctgctgtgtttcctgctgtccttttagtcgtggccagccttgctgtaggcttcttcattctgttacgcattttccacagaggagtccaggagctcaagaaggtggagaatgtcagccggtcaccctggttcacccacatcacctcctccatgcagggcctgggcatcattcacgcctatggcaagaaggagagctgcatcacctatcacctcctctactttaactgtgctctcaggtggtttgcgctgagaatggatgtcctcatgaacatccttaccttcactgtggccttgttggtgaccctgagtttctcctccatcagtacttcatccaaaggcctgtcattgtcatacatcatccagctgagcggactgctccaagtgtgtgtgcgaacgggaacagagacgcaagccaaattcacctccgtggagctgctcagggaatacatttcgacctgtgttcctgaatgcactcatcccctcaaagtggggacctgtcccaaggactggcccagctgtggggagatcaccttcagagactatcagatgagatacagagacaacaccccccttgttctcgacagcctgaacttgaacatacaaagtgggcagacagtcgggattgttggaagaacaggttccggaaagtcatcgttaggaatggctttgtttcgtctggtggagccagccagtggcacaatctttattgatgaggtggatatctgcattctcagcttggaagacctcagaaccaagctgactgtgatcccacaggatcctgtcctgtttgtaggtacagtaaggtacaacttggatccctttgagagtcacaccgatgagatgctctggcaggttctggagagaacattcatgagagacacaataatgaaactcccagaaaaattacaggcagaagtcacagaaaatggagaaaacttctcagtaggggaacgtcagctgctttgtgtggcccgagctcttctccgtaattcaaagatcattctccttgatgaagccaccgcctctatggactccaagactgacaccctggttcagaacaccatcaaagatgccttcaagggctgcactgtgctgaccatcgcccaccgcctcaacacagttctcaactgcgatcacgtcctggttatggaaaatgggaaggtgattgagtttgacaagcctgaagtccttgcagagaagccagattctgcatttgcgatgttactagcagcagaagtcagattgtagaggtcctggcggctgattctagaggaggaagaggctctgtgagatgaataggaggagtcttcaggaggaggggctgtcctctccgcaggcagccctggtcttcagcccctcccatccacggagtgagctggggctgaagttgtccccactgccatactcagtccatgtcaccccacttggtgggcttggggttggttctgggtggtgaaccggggcagacccagctaatggattaaaaaactgcccttcacctcccaaatccccaagggttcctcatgtgttttcaccaaaaccaccccagtgcctgagattgaaaatattgtaactttcagttagaaatcagccacaataaacaacatgggaaaatgccttaggatggagtttgcaaggtttccttgcccattatcagaaggaaaaagagcagaattttcttctcgtttaaccccactcacttccatcttgactgggtgacaagtggtaatgacacagatttgtagcgtgaaagactgaatacagtgtttggccaaaaatttttttaaaaatcatattatatgtttcaattgatctgttagaataaccaagaaaacaaaatgctggagtttctctataaatgacacttttatatcttctttattcgtcgttaaaacgcggtaggaaattaccctgaaatgtcgccttgcaattatttcactgaagatattccaatttccatactatttcctccaatagacccttgttgcct

SEQ ID NO: 27355 - DNA, 1661 bp, Homo sapiens
gctctaactgcggctgctcgctccttttcaacagctgagcggactgctccaagtgtgtgtgcgaacgggaacagagacgcaagccaaattcacctccgtggagctgctcagggaatacatttcgacctgtgttcctgaatgcactcatcccctcaaagtggggacctgtcccaaggactggcccagctgtggggagatcaccttcagagactatcagatgagatacagagacaacaccccccttgttctcgacagcctgaacttgaacatacaaagtgggcagacagtcgggattgttggaagaacaggttccggaaagtcatcgttaggaatggctttgtttcgtctggtggagccagccagtggcacaatctttattgatgaggtggatatctgcattctcagcttggaagacctcagaaccaagctgactgtgatcccacaggatcctgtcctgtttgtaggtacagtaaggtacaacttggatccctttgagagtcacaccgatgagatgctctggcaggttctggagagaacattcatgagagacacaataatgaaactcccagaaaaattacaggcagaagtcacagaaaatggagaaaacttctcagtaggggaacgtcagctgctttgtgtggcccgagctcttctccgtaattcaaagatcattctccttgatgaagccaccgcctctatggactccaagactgacaccctggttcagaacaccatcaaagatgccttcaagggctgcactgtgctgaccatcgcccaccgcctcaacacagttctcaactgcgatcacgtcctggttatggaaaatgggaaggtgattgagtttgacaagcctgaagtccttgcagagaagccagattctgcatttgcgatgttactagcagcagaagtcagattgtagaggtcctggcggctgattctagaggaggaagaggctctgtgagatgaataggaggagtcttcaggaggaggggctgtcctctccgcaggcagccctggtcttcagcccctcccatccacggagtgagctggggctgaagttgtccccactgccatactcagtccatgtcaccccacttggtgggcttggggttggttctgggtggtgaaccggggcagacccagctaatggattaaaaaactgcccttcacctcccaaatccccaagggttcctcatgtgttttcaccaaaaccaccccagtgcctgagattgaaaatattgtaactttcagttagaaatcagccacaataaacaacatgggaaaatgccttaggatggagtttgcaaggtttccttgcccattatcagaaggaaaaagagcagaattttcttctcgtttaaccccactcacttccatcttgactgggtgacaagtggtaatgacacagatttgtagcgtgaaagactgaatacagtgtttggccaaaaatttttttaaaaatcatattatatgtttcaattgatctgttagaataaccaagaaaacaaaatgctggagtttctctataaatgacacttttatatcttctttattcgtcgttaaaacgcggtaggaaattaccctgaaatgtcgccttgcaattatttcactgaagatattccaatttccatactatttcctccaatagacccttgttgcct

SEQ ID NO: 27356 - DNA, 455 bp, Homo sapiens
gcctctaaggcttacctgcatgatgaatttccgttttccttactctcacacccagctttcaatttagcaagaaacagattcgcccaggccagtctcaagaattaaactctgaaaatcctgagccttgtggagctctccttctgataagagagttctgtatcaaaaatcctaaccctaaacctgggaagggcatgggtaactgtgtttgatgtgcctagtcccccaactccctttctcccttcttcttctttttaagaaggagtctcactctgttggccaggctggagtgcagtcgcacgatctcagctcactgcaagctccacctcccaggttcaagtgattctcctgcctcagctactcgggaggctgagacaggagaattgcttgaaccctggaggtggaggttgcagtgagccgagattgcaccattgcactccaccctaggcaacaagatg

SEQ ID NO: 27357 - DNA, 437 bp, Homo sapiens
gatcctctatcttttcccactttccaccctccaatgggccccagtgtctattgttcccctctatgtccatgtgttctcatcatttagctcccacttacaagtgagaacacacaatatgtggttttctgttcctgcctcagtttgctaaggatagtggcctccagctccatccatgttcctgcaaaagacataatcttgttcttttttatggatgcatggtattccatagtgtatatgtatcacgttttctttttccagtctaccaacattgctatatttaaagtagacaagaagagttaaaataaaaaaaccacttacttggtgggaaaatgtggtctaaaggccaataacttagaacagtgctattcaatagtaatataaagagagccacaaatgtgagccacatatacaattttaaattttctagtaggcacatt

SEQ ID NO: 27358 - DNA, 360 bp, Homo sapiens
aatgctcagtggccattcaaattaaacacacacaaagcaaaatccttcaatcctttagatgttgtttagaaacttttaggaatagtttcaggcttatttgccaggccttacccacaggtaggaattgtctaagggtgtggtagagtggtctggagtcttggagcctcaggggccagacttaattgggagggatgtttcccatggtgtgacccaagaagaaaatttgaagctgtggtcagggtaaggagagataggcagatgtatcaagcgtataactcaagaacacacattggaggacagaagaatttctgagaaggtaaatgggcagtgaagtagagagaatgggtcagttggtttaga

SEQ ID NO: 27359 - DNA, 416 bp, Homo sapiens
aaattgcaagcatttggactttaagagtttcctttgattcacaaggtagcaagggaaaaactgtttctaaacaaaactttgtattgtcttggtgctttccagcagttagaaaaacagtagctgtaatacttcacagcaccttaacttcctagctatcccagttatttgatactctgcagttctgcaaatggtgcattgatgatagaatatttactgtttatatacagatcctttttagtctatatgaatcctaggaataagaaagcaaatattctatatactttggatcttttgtgaatatattggtaattgatttgcatgattgcttaattttttcttctttttaatccaaaatatgtcaactcctgactgttgcagaaaatgaagggtcaaaaataaagacagtctcctctcta

SEQ ID NO: 27360 - DNA, 246 bp, Homo sapiens
acacacagacacacacaaacatacatagacatagacatacacatagacccagacagacacacacacacacacaaacatacatagacacatatgcatagacacacacatggacacatacacagacacacacttgtatacacacagatatacacatagacatacacagacacacacagagacacatgcccacacacacacagagacacacacacgtgcacatcctggggaggagaagcagttgtagga

SEQ ID NO: 27361 - DNA, 338 bp, Homo sapiens
cacttgtaatcgtacaggaagcactagactacatttggcattggaattaggtatttttacttatttattttttatttcactaagctttttggaactgaggtactgcaaactggatagcagcttgtactgatttccaaaaccagtggaacagccttgagagtttcttccttacagagtgatgtcatcagttagtaagtttccatagtgccccataccctaccaaagaagttcctctctgtgttagttctacctcacctgccaagaaatgaaaacacacagcttcctttattctacagtgaaacaaagtggtttggacacaatttggaggggaactgcca

SEQ ID NO: 27362 - DNA, 252 bp, Homo sapiens
tttttacaaatctctttaatgtctgtcttaacaaaggacagctgaattctcagataggcttctgcattcagtctgctgctatgttgttagggatgtgttctatgaagaaaaccagtcacagacacacatggagtcagaaaaagaaagcatctcaggaacacccaaggttcctccaatcctactttgagaacccatactttgaaaaccactgttctaaagttttcctgccagctgtaaacattacattaaggg

SEQ ID NO: 27363 - DNA, 181 bp, Homo sapiens
cactctttttcctctgtcaaaaccacccattactgcctcacaggttgcccctcagaccctggcttggactctgttctggcgctctctggcttcacttgtccccatgcccccccttctagaccatggttcatgtacccgggactccaggatcctctacctaggcagaccctggctctcttct

SEQ ID NO: 27364 - DNA, 453 bp, Homo sapiens
aagatagcacacccttgctgtttccctctcttggatcactcacttagggggaagacagtagctatactcagacagtcccgggagagatccatgtggaaagaaactgaggcctctcaccaataaccagccccaacttactagtgagacaccttgacagcagaccctcaagtctaggcatgactgcgaccttctgagaaattccaagccagaaaacgcatggctaagccgctcctaaattcttgacctgtagtaactgataataggaaaatgaatgcatattgttttaaccactaagttttggggttgtttccattgtaattgataccttaaaaagcatgaaaatatagggtctacctaaaaacttgaaactgtttcatttgtatatggttagggattactgagaaataaggttaataaggcagatgtggtcagatcatggatggccttgaatgt

SEQ ID NO: 27365 - DNA, 298 bp, Homo sapiens
gccactccttgagctgggtgcttactatgtgtttattattttaaccctcacaacaacctcaacaccctcatgaagtaggtcctattaggatccctgttttgaagatgaactgaggctcatgtttagcccaagttcactgagctagtaactggcaaagttagaatctgaaatgaaatctgcctgatgtcagaatgatgttgttcattcataggctgatattcttaaggctctaccccaagacaatagtcacggcgtcatggcacaggcagcctgtggagctagctcatttgctccaatc

SEQ ID NO: 27366 - DNA, 541 bp, Homo sapiens
ttgatagagatggggtatcactgtgttgaccaggctgatctaaaactcctggccttgagtaatcattgtgcctcaaccttctaaagtactgagattataggcatgagccactgtgcctggtcatactgttttctgcaatagaacttacctcctctctctcatgcttctgtagcaccaagtatcagaaaacataatctagtcatttctagataagcttacatcattctgattttcctcagtaatttctgcatatgctcatcttaagaattcatgacttctcatccttctcttccctaaggtgagggttacgtggtgagggaagttcacacagcagccgcatggtatcggtgagaggcattggacctgtagcactctgatttggcacctgtcaagtctctagtcacagcatttgtgtgatcgggttttcagtgaactatctgtagtcttagtagactctaatcatgtattccatactaccattcctggcttcttctcaacattactgtgaggtcctttaaagcactggtcttgcatccagctc

SEQ ID NO: 27367 - DNA, 315 bp, Homo sapiens
attcaagtcaaagcagggcccaaaagaaattctaactactttagagtttttatttctaaactaactctcaaatcccttgctgtttctgggaaatgagaagctaagaccttctcagctgtccagtgcatattctgccttcagatcatggagccggctgtagttcaccagttctttaactctccccatccccatcctgcagaaggaaagagctacactctgagcccaagccccactctctcaaacccatcctacatgaacatggtggacatagtaactatgaaaacagctgtgggcttgaaattgtccctgcacaga

SEQ ID NO: 27368 - DNA, 418 bp, Homo sapiens
gctcgacgtggagagggaagttggagagttactgtttaacgagtacagggttttagttgcagaagatgaaaaagttatggaaaatgcgtagttatgaaattgcagatgttcttaatgccacaggactgtacccttaaaaatggttaaaatgtccaggtgtgggtcaccacgcctgtaatcccaggactttgggaggccaaggcaggaggattgcttgaagacaggagtttgaggctgcagtgagctatggttatgctattgctcttcagcctgggcaagtgagcgagactcctttctctccacagccaattcttaacttagctccttgtctgaaggcgcacatcaccataaaagtttcaaaaacagctggaacaaaagtacaactcagtcccatggtgaacacttcacccaagggaac

SEQ ID NO: 27369 - DNA, 432 bp, Homo sapiens
ttgacttacagttccacaagcttaacaggcagcatgactgggaggcctcaggaaacttacaatcatggcagaaggcaaagcagaaccaagtaccttcttcaaaggtggcaggagagagagagagcaaggagggggggatgtgccacacacttttagcatcaaatctcatgagaactcattcactatcacaagaatagcatggggaaaatccgcctccatgatccagtcacttcccaccaggtccctcccccaatattgggaattaaaattcagcatgagatttgggtgggtacacagaggcaaaccacatcactagccaagggaaaacttgcacctaaacctttctgaagataacagcctcaggcctgctgtgttaaattacttctgcacaggcagttgaaagtgagagatcttatgttggttttcccaatt

SEQ ID NO: 27370 - DNA, 1999 bp, Homo sapiens
gagtgtgtgacccacccttcccccgtgccaacagagagagtgccttgagaagccatagcagcaggaccagcatggcctctgctgcctctgtgaccagcctggcagatgaagtcaactgccccatctgtcagggtaccctgagggagccggtcactatcgactgcggccacaacttctgccgggcctgccttacccgctactgtgagataccaggcccagacctggaggagtcccctacttgcccactctgcaaagaacccttccgtcctgggagcttccggcccaactggcagctggctaacgtggtggagaacattgagcgcctccagctggtgtccacactgggtttgggagaggaggatgtctgccaagagcacggagggaagatctacttcttctgtgaggatgatgagatgcagttgtgcgtggtgtgccgggaggctggggagcacgctacccacaccatgcgcttcctggaggatgcagcggctccctatagggaacaaatccataagtgtcttaaatgtctaagaaaagagagagaggagattcaagaaatccagtcaagagaaaataaaaggatgcaagtcctcctgactcaggtgtccaccaagagacaacaggtgatttctgagttcgcacacctgaggaagtttctagaggaacagcagagcatcctcttagcacaattggagagccaggatggggacatcttgaggcaacgggatgaatttgatttgctggttgctggggagatctgccggtttagtgctcttattgaagaactggaggagaagaatgagaggccagcaagggagctcctgacggacatcagaagcactctaataagatgtgaaaccagaaagtgccggaaaccggtggctgtgtcgccagagctgggccagaggattcgggactttccccagcaggccctcccgctgcagagggagatgaagatgtttctggaaaaactatgctttgagttggactatgagccagctcacatttctctagaccctcagacttcccaccccaagctcctcttgtccgaggaccaccagcgagctcagttctcctcaaaatggcagaactcaccagacaacccccagcgttttgaccgggccacctgtgttctggcccacactggcatcacaggggggagacacacgtgggtggtgagtatagacctggcccatggggcgagctgcaccgtgggcgtggtgagcgaggatgtgcagcggaagggggagcttcggctgcggccagaggagggggtgtgggctgtgaggctggcttggggcttcgtctcggctctgggctccttccccacacggctgaccctgaaggagcagccccggcaggtgagggtgtctcttgactatgaggtgggctgggtgaccttcaccaacgctgtcacccgagagcccatctacaccttcactgcctccttcactaggaaggtcattcccttctttgggctctggggccgagggtccagtttctccctgagctcctgagaaggagcagttacctactctcctctaagtacaggactcattcaacccagtaccatgtggcttgatccctggctgaatcacctggatgactcgggatagaaatgactgctttagaagatgggatggggtcgggtggtaagggatagaagagaggactctcaatctactgatcaagtcctttccccaatgcccagtggatggccagggtacctggggactcaggctgctgccagttctgctcaccaccatccgtgcttggcacagaagtagctgcatagaaagagcactggatttgaagtcagaagacctggttcttgaaccagcctgtcaaccagttgtatgactttaaacaaggcatctcacctcttttcatcttgttttcttccaataatgttagagttcatgtaatcacattctctagaaccatttagtttgtgttaactatgaaccaagcagtgtggtgggccactggtggacttgga

SEQ ID NO: 27371 - DNA, 2562 bp, Homo sapiens
agaagaaagctggtaggggctgggagagggtaccacaggggagtatgatctacttgggggccagagaaggttccctgaggaaatagtacctgaacttagacttgaaggataacagatgttaactgggaggagagaatgttccaggcagaggaaaaggcatatgcaaaagtccagcgccttgaaggagcacagctggggtgcctggagtgagatggagctggaaagatccaggtggagcttgacctgaagtaccagcccccagagggcgctactggagcctggtcagaggaggactttggggcacccatccaggacagcttcgagttaatcatccccaatgtgggcttccaggaactggagcctggggaggcccagctggagcggcgggcagtggctctaggccgcaggctagctcgaagtctaggccagcaggacgatgaagagaatgagctggagcttgagctggagcaggacctggatgatgagcctgacgtggaactttctggtgttatgttcagccccctcaagagccgcgccagggccctggcccatggggatcccttccaggtgtccagagctcaagacttccaggtgggagtcactgtgctggaagcccagaaactggtgggagtcaacattaacccctatgtggccgtgcaagtgggggggcagcgccgtgtgaccgccacacagcgtgggaccagttgccccttctacaatgagtacttcttgttcgaatttcatgacacgcggcttcgtctccaagacttgctgctggagatcacggtgagtggggtaggggtgaccagtgtccttcagagaaggggggatgagaaagctgcaggactaacaccaccttcccccaaggctttccattcgcagaccctcccctttatggccacccggataggcaccttcaggatggacctgggcatcatcttggaccagccaggtatggaatcgtccccttattgagactctgcacggacaagggccctagagattgaccctgcagtgactccgcatggacccctatacactcacttcggagagggccatctctggcggaggctgaactcttggcacttccgcccctccctgctgagccagagaagccctggccattgtccgtcactccgatagcctcacggccaccctgtgcgtcccgccggtcgccccttacccctggctcgccccttcgcccttagatggccagttctaccaaagatgggttccgctgcatgatccccgagacacccgcgccgggaccaagggtttcattaaggtcaccttgtccgtgagggcgcgcggggacctgccccctccaatgctacccccggccccagggcactgttcggacatcgagaagtgagccgggatgaggtggggaggaggacatggatccgggggtggccgtggggcgcggataaggggaggggccgagatcccagtttctccccccccgctcggtgccccctcccctaggaacctgctcctgccgcgcggggtgcccgccgagaggccatgggcgcggctccgcgtgcgcctgtaccgcgccgaggggcttcccgcgctgcgcctggggctgctgggcagcctggtccgcgccctgcacgaccagcgcgtcctggtggagccctatgtgcgggtgtctttcctggggcaggagggcgagacgtcggtgagcgccgaggcggcggcgcccgaatggaacgagcagctgagcttcgtggagctcttcccgccgctgacgcgcagcctccgcctgcagctgcgggacgacgcgcccctggtcgacgcggcactcgctacgcacgtgccggacctgaggcggatctcccatccgggccgcgcggcggggtttaaccctaccttcggcccggcctgggtgcccctctatggctcgccccccggcgcggggctccgggatagtcttcaaggtctcaacgaaggcgttggccaaggcatttggttccgcggccgccttctgctggctgtgtccatgcaggtgttggaagggagagctgaacctgagcctccccaggcccagcaggggtccacgttgtcccggctcacccgaaagaagaaaaagaaagccagaagggatcagaccccaaaggcggttccgcagcacttggacgccagccccggtgccgaggggcctgagatcccccgtgccatggaggtggaggtggaggagctgctgccgctgccagagaatgtcctggcgccctgtgaagatttcctgcttttcggtgtgctcttcgaggccaccatgatcgaccccaccgtggcctcccagcccatcagcttcgagatctccattggtcgcgcaggccgtctggaggagcaattgggccgagggtccagggctggggagggaactgagggtgcagccgtggaggctcagcctctgctgggagccaggccagaggaggagaaagaggaggaagaactggggacccatgctcagcggcctgagcccatggacggcagtgggtgagtgctgccggtggctggaagggggggtttgggaggtctccaggaacccagaatgcccgc

SEQ ID NO: 27372 - DNA, 2730 bp, Homo sapiens
agaagaaagctggtaggggctgggagagggtaccacaggggagtatgatctacttgggggccagagaaggttccctgaggaaatagtacctgaacttagacttgaaggataacagatgttaactgggaggagagaatgttccaggcagaggaaaaggcatatgcaaaagtccagcgccttgaaggagcacagctggggtgcctggagtgagatggagctggaaagatccaggtggagcttgacctgaagtaccagcccccagagggcgctactggagcctggtcagaggaggactttggggcacccatccaggacagcttcgagttaatcatccccaatgtgggcttccaggaactggagcctggggaggcccagctggagcggcgggcagtggctctaggccgcaggctagctcgaagtctaggccagcaggacgatgaagagaatgagctggagcttgagctggagcaggacctggatgatgagcctgacgtggaactttctggtgttatgttcagccccctcaagagccgcgccagggccctggcccatggggatcccttccaggtgtccagagctcaagacttccaggtgggagtcactgtgctggaagcccagaaactggtgggagtcaacattaacccctatgtggccgtgcaagtgggggggcagcgccgtgtgaccgccacacagcgtgggaccagttgccccttctacaatgagtacttcttgttcgaatttcatgacacgcggcttcgtctccaagacttgctgctggagatcacggtgagtggggtaggggtgaccagtgtccttcagagaaggggggatgagaaagctgcaggactaacaccaccttcccccaaggctttccattcgcagaccctcccctttatggccacccggataggcaccttcaggatggacctgggcatcatcttggaccagccaggtatggaatcgtccccttattgagactctgcacggacaagggccctagagattgaccctgcagtgactccgcatggacccctatacactcacttcggagagggccatctctggcggaggctgaactcttggcacttccgcccctccctgctgagccagagaagccctggccattgtccgtcactccgatagcctcacggccaccctgtgcgtcccgccggtcgccccttacccctggctcgccccttcgcccttagatggccagttctaccaaagatgggttccgctgcatgatccccgagacacccgcgccgggaccaagggtttcattaaggtcaccttgtccgtgagggcgcgcggggacctgccccctccaatgctacccccggccccagggcactgttcggacatcgagaagtgagccgggatgaggtggggaggaggacatggatccgggggtggccgtggggcgcggataaggggaggggccgagatcccagtttctccccccccgctcggtgccccctcccctaggaacctgctcctgccgcgcggggtgcccgccgagaggccatgggcgcggctccgcgtgcgcctgtaccgcgccgaggggcttcccgcgctgcgcctggggctgctgggcagcctggtccgcgccctgcacgaccagcgcgtcctggtggagccctatgtgcgggtgtctttcctggggcaggagggcgagacgtcggtgagcgccgaggcggcggcgcccgaatggaacgagcagctgagcttcgtggagctcttcccgccgctgacgcgcagcctccgcctgcagctgcgggacgacgcgcccctggtcgacgcggcactcgctacgcacgtgccggacctgaggcggatctcccatccgggccgcgcggcggggtttaaccctaccttcggcccggcctgggtgcccctctatggctcgccccccggcgcggggctccgggatagtcttcaaggtctcaacgaaggcgttggccaaggcatttggttccgcggccgccttctgctggctgtgtccatgcaggtgttggaagggagagctgaacctgagcctccccaggcccagcaggggtccacgttgtcccggctcacccgaaagaagaaaaagaaagccagaagggatcagaccccaaaggcggttccgcagcacttggacgccagccccggtgccgaggggcctgagatcccccgtgccatggaggtggaggtggaggagctgctgccgctgccagagaatgtcctggcgccctgtgaagatttcctgcttttcggtgtgctcttcgaggccaccatgatcgaccccaccgtggcctcccagcccatcagcttcgagatctccattggtgtgtggcctagccgaacccctgagtgccatttcagaccttagaaccctggaaggggtgttgactttcagtaaggggcaggttctgacttctgttgaggcagaggtggttgagggggggttccagccctcagcctggcgcccactgacccttgctgctctggggcaggtcgcgcaggccgtctggaggagcaattgggccgagggtccagggctggggagggaactgagggtgcagccgtggaggctcagcctctgctgggagccaggccagaggaggagaaagaggaggaagaactggggacccatgctcagcggcctgagcccatggacggcagtgggtgagtgctgccggtggctggaagggggggtttgggaggtctccaggaacccagaatgcccgc

SEQ ID NO: 27373 - DNA, 2691 bp, Homo sapiens
gcagaggaagtgccagtgccactgggaccatggctctgacggtaacgcgtgcaacgactaacagggctgaccggcacccacgaccgacaagtgaagctcacctttcgaggctttacccagaaaacaagaaaaattcactgtggtccagaagcagatatcggtgagctgttccgatggccccactatggggctccactggctggggagtgtctgtctgtgcaggtggtcaactgcagccgtgtattcagccttaggcctctagggaccctggtgatctccctgcagcagctacagaatgctgggcatttggtgctacgggaagccctagtggatgagaatcttcaagtgtccccgatccaggtggagcttgacctgaagtaccagcccccagagggcgctactggagcctggtcagaggaggactttggggcacccatccaggacagcttcgagttaatcatccccaatgtgggcttccaggaactggagcctggggaggcccagctggagcggcgggcagtggctctaggccgcaggctagctcgaagtctaggccagcaggacgatgaagagaatgagctggagcttgagctggagcaggacctggatgatgagcctgacgtggaactttctggtgttatgttcagccccctcaagagccgcgccagggccctggcccatggggatcccttccaggtgtccagagctcaagacttccaggtgggagtcactgtgctggaagcccagaaactggtgggagtcaacattaacccctatgtggccgtgcaagtgggggggcagcgccgtgtgaccgccacacagcgtgggaccagttgccccttctacaatgagtacttcttgttcgaatttcatgacacgcggcttcgtctccaagacttgctgctggagatcacggtgagtggggtaggggtgaccagtgtccttcagagaaggggggatgagaaagctgcaggactaacaccaccttcccccaaggctttccattcgcagaccctcccctttatggccacccggataggcaccttcaggatggacctgggcatcatcttggaccagccaggtatggaatcgtccccttattgagactctgcacggacaagggccctagagattgaccctgcagtgactccgcatggacccctatacactcacttcggagagggccatctctggcggaggctgaactcttggcacttccgcccctccctgctgagccagagaagccctggccattgtccgtcactccgatagcctcacggccaccctgtgcgtcccgccggtcgccccttacccctggctcgccccttcgcccttagatggccagttctaccaaagatgggttccgctgcatgatccccgagacacccgcgccgggaccaagggtttcattaaggtcaccttgtccgtgagggcgcgcggggacctgccccctccaatgctacccccggccccagggcactgttcggacatcgagaagtgagccgggatgaggtggggaggaggacatggatccgggggtggccgtggggcgcggataaggggaggggccgagatcccagtttctccccccccgctcggtgccccctcccctaggaacctgctcctgccgcgcggggtgcccgccgagaggccatgggcgcggctccgcgtgcgcctgtaccgcgccgaggggcttcccgcgctgcgcctggggctgctgggcagcctggtccgcgccctgcacgaccagcgcgtcctggtggagccctatgtgcgggtgtctttcctggggcaggagggcgagacgtcggtgagcgccgaggcggcggcgcccgaatggaacgagcagctgagcttcgtggagctcttcccgccgctgacgcgcagcctccgcctgcagctgcgggacgacgcgcccctggtcgacgcggcactcgctacgcacgtgccggacctgaggcggatctcccatccgggccgcgcggcggggtttaaccctaccttcggcccggcctgggtgcccctctatggctcgccccccggcgcggggctccgggatagtcttcaaggtctcaacgaaggcgttggccaaggcatttggttccgcggccgccttctgctggctgtgtccatgcaggtgttggaagggagagctgaacctgagcctccccaggcccagcaggggtccacgttgtcccggctcacccgaaagaagaaaaagaaagccagaagggatcagaccccaaaggcggttccgcagcacttggacgccagccccggtgccgaggggcctgagatcccccgtgccatggaggtggaggtggaggagctgctgccgctgccagagaatgtcctggcgccctgtgaagatttcctgcttttcggtgtgctcttcgaggccaccatgatcgaccccaccgtggcctcccagcccatcagcttcgagatctccattggtcgcgcaggccgtctggaggagcaattgggccgagggtccagggctggggagggaactgagggtgcagccgtggaggctcagcctctgctgggagccaggccagaggaggagaaagaggaggaagaactggggacccatgctcagcggcctgagcccatggacggcagtgggtgagtgctgccggtggctggaagggggggtttgggaggtctccaggaacccagaatgcccgc

SEQ ID NO: 27374 - DNA, 2610 bp, Homo sapiens
tcttagtcctttcatttattattccccagcttcgagttaatcatccccaatgtgggcttccaggaactggagtaagtatgtggggatgacctggagtcactgagtcagtcttggagttaggagccagtgatatgggggcagccccagggtcttgggtcagaactgaatcagttccagggtcagaggtcagtcctagaatcagaggtcagttctggaattagaaatgtcccagggttaagagtctgtcctgggatcagtgaagtcagccacaaggtcaataactggtcctaggatcagtgggatcagttcaagggtcaggggtcagtccaaggctccaggaagtcaagggattgcctggagatgggtgatgggttccaggcatgtcccttgagggtctttcctatcaggcctggggaggcccagctggagcggcgggcagtggctctaggccgcaggctagctcgaagtctaggccagcaggacgatgaagagaatgagctggagcttgagctggagcaggacctggatgatgagcctgacgtggaactttctggtgttatgttcagccccctcaagagccgcgccagggccctggcccatggggatcccttccaggtgtccagagctcaagacttccaggtgggagtcactgtgctggaagcccagaaactggtgggagtcaacattaacccctatgtggccgtgcaagtgggggggcagcgccgtgtgaccgccacacagcgtgggaccagttgccccttctacaatgagtacttcttgttcgaatttcatgacacgcggcttcgtctccaagacttgctgctggagatcacggtgagtggggtaggggtgaccagtgtccttcagagaaggggggatgagaaagctgcaggactaacaccaccttcccccaaggctttccattcgcagaccctcccctttatggccacccggataggcaccttcaggatggacctgggcatcatcttggaccagccaggtatggaatcgtccccttattgagactctgcacggacaagggccctagagattgaccctgcagtgactccgcatggacccctatacactcacttcggagagggccatctctggcggaggctgaactcttggcacttccgcccctccctgctgagccagagaagccctggccattgtccgtcactccgatagcctcacggccaccctgtgcgtcccgccggtcgccccttacccctggctcgccccttcgcccttagatggccagttctaccaaagatgggttccgctgcatgatccccgagacacccgcgccgggaccaagggtttcattaaggtcaccttgtccgtgagggcgcgcggggacctgccccctccaatgctacccccggccccagggcactgttcggacatcgagaagtgagccgggatgaggtggggaggaggacatggatccgggggtggccgtggggcgcggataaggggaggggccgagatcccagtttctccccccccgctcggtgccccctcccctaggaacctgctcctgccgcgcggggtgcccgccgagaggccatgggcgcggctccgcgtgcgcctgtaccgcgccgaggggcttcccgcgctgcgcctggggctgctgggcagcctggtccgcgccctgcacgaccagcgcgtcctggtggagccctatgtgcgggtgtctttcctggggcaggagggcgagacgtcggtgagcgccgaggcggcggcgcccgaatggaacgagcagctgagcttcgtggagctcttcccgccgctgacgcgcagcctccgcctgcagctgcgggacgacgcgcccctggtcgacgcggcactcgctacgcacgtgccggacctgaggcggatctcccatccgggccgcgcggcggggtttaaccctaccttcggcccggcctgggtgcccctctatggctcgccccccggcgcggggctccgggatagtcttcaaggtctcaacgaaggcgttggccaaggcatttggttccgcggccgccttctgctggctgtgtccatgcaggtgttggaagggagagctgaacctgagcctccccaggcccagcaggggtccacgttgtcccggctcacccgaaagaagaaaaagaaagccagaagggatcagaccccaaaggcggttccgcagcacttggacgccagccccggtgccgaggggcctgagatcccccgtgccatggaggtggaggtggaggagctgctgccgctgccagagaatgtcctggcgccctgtgaagatttcctgcttttcggtgtgctcttcgaggccaccatgatcgaccccaccgtggcctcccagcccatcagcttcgagatctccattggtcgcgcaggccgtctggaggagcaattgggccgagggtccagggctggggagggaactgagggtgcagccgtggaggctcagcctctgctgggagccaggccagaggaggagaaagaggaggaagaactggggacccatgctcagcggcctgagcccatggacggcagtgggtgagtgctgccggtggctggaagggggggtttgggaggtctccaggaacccagaatgcccgc

SEQ ID NO: 27375 - DNA, 1630 bp, Homo sapiens
tcttagtcctttcatttattattccccagcttcgagttaatcatccccaatgtgggcttccaggaactggagtaagtatgtggggatgacctggagtcactgagtcagtcttggagttaggagccagtgatatgggggcagccccagggtcttgggtcagaactgaatcagttccagggtcagaggtcagtcctagaatcagaggtcagttctggaattagaaatgtcccagggttaagagtctgtcctgggatcagtgaagtcagccacaaggtcaataactggtcctaggatcagtgggatcagttcaagggtcaggggtcagtccaaggctccaggaagtcaagggattgcctggagatgggtgatgggttccaggcatgtcccttgagggtctttcctatcaggcctggggaggcccagctggagcggcgggcagtggctctaggccgcaggctagctcgaagtctaggccagcaggacgatgaagagaatgagctggagcttgagctggagcaggacctggatgatgagcctgacgtggaactttctggtgttatgttcagccccctcaagaggtaacttgtacccacggcacacctgctcccacacccatctgccctcacaaacacacagtcccagggggtgtgggaagggtggattctccgtcacttgctcataggcatagacactgccatgttcatacacatagttacagtggctcacacacatgcaggggatgaaagcttgatgagggcaagatttgtctcttcactacagcgtcccagtgcttgggacagtgttagctcatagtaggtactcaataaacctctgttgcatgaatgaatggtttcgggctccaggaatgagtcaaattgtgggtgcagggttgagatggaggcagcaagacatgacctgaaggaccggggtttaaccctaccttcggcccggcctgggtgcccctctatggctcgccccccggcgcggggctccgggatagtcttcaaggtctcaacgaaggcgttggccaaggcatttggttccgcggccgccttctgctggctgtgtccatgcaggtgttggaagggagagctgaacctgagcctccccaggcccagcaggggtccacgttgtcccggctcacccgaaagaagaaaaagaaagccagaagggatcagaccccaaaggcggttccgcagcacttggacgccagccccggtgccgaggggcctgagatcccccgtgccatggaggtggaggtggaggagctgctgccgctgccagagaatgtcctggcgccctgtgaagatttcctgcttttcggtgtgctcttcgaggccaccatgatcgaccccaccgtggcctcccagcccatcagcttcgagatctccattggtcgcgcaggccgtctggaggagcaattgggccgagggtccagggctggggagggaactgagggtgcagccgtggaggctcagcctctgctgggagccaggccagaggaggagaaagaggaggaagaactggggacccatgctcagcggcctgagcccatggacggcagtgggtgagtgctgccggtggctggaagggggggtttgggaggtctccaggaacccagaatgcccgc

SEQ ID NO: 27376 - DNA, 408 bp, Homo sapiens
ccgcccccagggctcaggctgcgtcccccgaggccgggctcccgcgatttccagctccttggggcgctgagctgttttggaggcgccccaggtcgtgttccacagcggcgcgtccgcagctgctggccaacttcttccgtttcagagcggcttagcccccctcccctgccctcacccccgaatacttggaggagatcagggtgaggtgcagagatttaccagcactcgccctccccacgctcccctccaacacgcttctcttgttccccacagcggggtttcggggtttaaccctaccttcggcccggcctgggtgcccctctatggctcgccccccggcgcggggctccgggatagtcttcaaggtctcaacgaaggcgttggccaaggcatttggttccgcggccg

SEQ ID NO: 27377 - DNA, 449 bp, Homo sapiens
taggggctgggagagggtaccacaggggagtatgatctacttgggggccagagaaggttccctgaggaaatagtacctgaacttagacttgaaggataacagatgttaactgggaggagagaatgttccaggcagaggaaaaggcatatgcaaaagtccagcgccttgaaggagcacagctggggtgcctggagtgagatggagctggaaaggttggtggggccagaccaggcagagtagtgaaggccaccgtaagggatttccaacaaaaatgagacaattttggaatcctgttgggcctcaagaggtaacttgcggctgggcacaatggctcatgcctgtaatcccagcactttgggaagctaaagcagaaggatcatttgagctcaggagctcaagaccaacctgggcaaggtacataataagacctcatcaatactaaaaaaaaa

SEQ ID NO: 27378 - DNA, 421 bp, Homo sapiens
gccgccttctgctggctgtgtccatgcaggtgttggaagggagagctgaacctgagcctccccaggcccagcaggggtccacgttgtcccggctcacccgaaagaagaaaaagaaagccagaagggatcagaccccaaaggcggttccgcagcacttggacgccagccccggtgccgaggggcctgagatcccccgtgccatggaggtggaggtggaggagctgctgccgctgccagaggtgggggctggggggtagcaaagggggcggggtcacctcagctctggaaggtggaatccactctcaggcattaaacaccacgacaggggtctcaatttgggggcctgggcgaagagtgaggtgtgtgcccacatgggctctggtatatgcacacatgttgtgggagagaggacccataccca

SEQ ID NO: 27379 - DNA, 291 bp, Homo sapiens
tctgtgatttagtgaccttttagtgcagatacctacttgataaatccttttggctggcacttcccagacttcattttcatataccagtaaaaatattctgttttttaattcagcagtgaaaaagtgtagggagtggagggagaaaatagagaaaaaggcaataaaacatagttctgccacatttttatttttcaaataataaaatgttttataaacctgccatttaccattaacattaaaaaatagaacacttaacaaaaaaaagtaggaaaaagaacatcatgttaaaat

SEQ ID NO: 27380 - DNA, 472 bp, Homo sapiens
ttgagacggagtctctgtcgcctaggctggagtggagtggcccaatcttggctcactgcaacctccgcctcccaggttgcagccattctcctgcctcagcctcccggagtagctgggactacagacatgtgccaccatgcctggctaattttttgtgtgtttttagtagagatggggtttcaccatgttggccaggccggtctcgaactcctgacctcaggtgatctgcccatctctgcctcccaaagtgctgggattacaggagtgagccaccgtgcccagctggtgttaacagataattcatcttagtctacccatgccttgtcctgaactctaagttttacttttcaggttttatggctaggaatttaatgtcatgtcttctgtttttctttgtttgtttgagacagggtctggctctgtcacccaggctggagtgcggtggcacggtcatggctcactgcaacctcca

SEQ ID NO: 27381 - DNA, 408 bp, Homo sapiens
caaaccatacatgctttcttgctgcctgtagactgttccctcaggttatacctaactgtgtctctgttcacaaatttagtctagtcacttttgccacaacatataagagatagaggagagtgtaggtcccctcagtcctcctggtctctggaattgcagaggagtagttaatcaaaatgaaataatgcctccaaaaagttaaatcatcagaaccaaaacttactttggggctagataattcatcttagtctacccatgccttgtcctgaactctaagttttacttttcaggttttatggctaggaatttaatgtcatgtcttctgtttttctttgtttgtttgagacagggtctggctctgtcacccactgcactccatcctgggcgacagagcaagactccatctca

SEQ ID NO: 27382 - DNA, 626 bp, Homo sapiens
ggcatggtggtgcacactgtaataccagctactcgggaggctgaggagggagaatcgcttgaacctgagaggcggaggttgcagtaagccaagatcgcaccactgcactccagcctgggtgacagagctagactccgtctcaaaaaaacaacaaaaaaatcctgtttttgctggttttaaatattgcttttgccacactcatcaaaagtcttattgataaatcaatatattcagtcctcttatttgatctctctgcagcatctgactaccacctagcagtcattctctattcctttttgcaggtagtctttcctcctcttttttcctgtaccttgcatgcatcttatctactattcaaatcttacccattacatttgtgaaatatctctggagtctttccattcctcctctctaccttcactgtctcagttcagaccctcaatatctctcacctaaacaactctggttgcctcctgactggcctttctgcctttggtttcactctgctcaaatccatgctccccattacttagagttatcttttgaagaatgcaaaccagatcaattcacattcatgttcaaatcttaaataagcatttcttcaaaccttctacttcgcataataa

SEQ ID NO: 27383 - DNA, 367 bp, Homo sapiens
caataaaagatatttatgcagataaaatatataatccaaaggaaaatgcaagtcacaaatctttatcaaaataggtttgaaatacatatgacaaaaactatttgtctctaatatagactatggatttgccaaattttccttttatttaactaattctccatagaaattaacagaccaagtgaaccaaaaaactctgtaaagaaaggaggatttgaataacaatgctaagcataattgtatagacataaaatgtacccaatatatgaaaacacatattctttataaatactgactttaagaagactgactaaaatctactacaaaattggccatgttcaaggcctcaaagactacttggtaacctcca

SEQ ID NO: 27384 - DNA, 689 bp, Homo sapiens
aatctttttttatgtctttattaaagtaaactactttggctcacctggctagttcagtcagtaaagcatgagacactgaaagtaaactacttggatttgtataattcagaattaaagggacagtagaaatgttgtgttgttctgtgttaattgtgtaattgtggagctactttgttaaagtagaggtgggaggctcagagtattgtcttctgatccgtttctgttgtgtgtttcttagaacttgataagcacagggttaagaatagccaaggcaatctaggaagaagggacaaggtaggcttgctttataggaaagaaagccctgtcaaaaaactgtagtaattaagacattgtggtgttgaatatagcgatagacaattagacgaatggcacaaaacagaggaaatagagctacccgtatcagaaacttaacatatatgacaaaggtgctattgaaagcatgggccagaataaatcattattaacatgaaaaaaaatactagatccttataaaaaccacacaaaacacatctccagatggattaaatacctaaatttaaaaggcaatttgtttgtttttagaaaaaattctaaaacaattttatgacctttagctagggaagaatgaggcaccaaaagttgagttcagtagttttgtagtttaaaattttgagattctaaagaaaaca

SEQ ID NO: 27385 - DNA, 1407 bp, Homo sapiens
ggagatttcaggggagttacgggtggagggaggacatcagatctaccctggaagttaaacgtgtttcgagtgcattaaatactatgggccacagacgccttgtctccatatctactcttttataaatgaagtaaagttcttgggaaatacttttctcactctaaagctcacaatctatcttgcaaaaaatattttaaattccatctcaaataagccagggtgaaaagggagcctgtgcaccagacactgccagccttgcctggctctcgccttcttgctcttccttccccacctgctggggattttcttaacgatggagatgggtttgggtttgtcctgctgtgctctgctccccattcccggatccaaggtcctgcctctgtcctgtcccctgagccacctcagggatgcagggtcccccacctggtcaagtgcccagtgctgtgttgtcatttgcaagttcttcctgtgactgaactccaaatggcactgggactgctgactccacccactggacaacccgtgttcttgcttttggggtttctgaaacagccccaagactctgggcatcttgattttgctcccattgcttctcaggacaccctgctcctgtggtttgcagccccggccttctcttcgaggacgcctctgctcttctgcctcacactcggattggaccttcttcagcacagccagtggccgaggcttcctccctggggctcagtggagcaggacagatgctgcatccaaactcttccattgggttccagtctgttccagtcatgcccttgagcctctaaagctcctaggtgagagacgtagcagctgacagcacttcccacttgatttgggtggactccagcctccccagcaacaataagagatcaaaagcatcgttgaggaagcagcttgctgaaacgctgagtgcccgccactctcaggtcaggtgggaccggcaggccagcatgagttcctgaacacttggttctcaatactggccacagccacactgtaaggggaaacaagagggcgctgtatgcaaacatctcttgaactctggagtctgctcaccttcctgcctcaagcccctctcccacgtggtccagtcaccattctccacagagactaccctaaaacccagcgactctcgtgtgcctgcagaatggcacagcccgttctcatagcagcactcctgtttaatcagagggatgttaacgaccaagtcatatttgctcgatttgtgttcaatatatttcatttgtaccgataaaacttaaaaatatccccacacatgcattgcctattaaagagtatcttccaggtacacctcccttacacatcagttaacttgataatttcttcccattcttgtgcaataaatttccttcctgatcagaaaatgtccag

SEQ ID NO: 27386 - DNA, 1512 bp, Homo sapiens
tatttatttatttatttatttttgcactccagcctgggcaacggagtgagactccatctcacaaaaaagagaaaagaaaagaaaactttgcttcactaagtttctcttgccattatctcattaattcagatctgtacctcattgctgctcacacatatatgtttcttaccttagcctgaaccttctcaggccttgaagtcattattctactctttttttttcttttccttttttatggcactagagaatgaaaacctaaggtcttagaaaatcttaacttgaaaaagtctctaactggcatgatttgattacttttttcccctgtggacaaataattttctttcctatataatagatttttagtaagtgaaacctttgctgctgctttcctgggtttacattagttttttcctgcccttaagaataatttatctgtgcttctctgatgactgttaatttctaatagtgcaggaagggatgagcttttgatttcttctcactcccctcctcaccctacttccaaattacacactaacttctaactcttacagcctgttggcacatacacaagatccacgagaccatgctcctcagaagctacccatgtcctttctcaccatggtgtggctcttggagccctgagtatctgtgactacccactccaaaggttgactgtaagaggagagcggccttcttaattttgcatttcttaattttgtttttctccattcctgttttatgacttggccttcagatgcttcctactctggcctcctccttttttctcctaggaattgtttccaggtaacctaccatgtgcacttctcagctgctctgctcacctttgcccaccttcccgtgaccctgagagtacagatccgaataatgtggcctgtgcagagctcagagaactgtgaggactacccatgcctgtcagactctgctcagggacagagatggatgggtaaatggtgctgttggagacatttttatcttcataccaggctctgtttcatccctgcaccccgcacccccactcactcccctgagggggtaaaatgcagaggtggttgacctgaagggtctgattccctccttcccaagccttagggcctaccctggagtgctgcagtgtgtgagagctgctgcttgcttgtttctccactaggcctgctccaaatgcttagccaatctctggagccgacacagttgcctacggggtgacttagcaccaggttccattagctctccaagtgactgtttccacccagtacttttggcgcttgaggatggggggagggggattatttaaaataaataaaatccgaggtggcagtagaggattccttttgctttaaaaatctttggactaaaaaaaaaaaaaaaaagttttttatatataaatatataaagtaaattgttatgtaactattattgtttcttgtatgttctaattttgttttatgatgtaattaaagaaagtaagctgtgaagacttttcattttcctgtg

SEQ ID NO: 27387 - DNA, 444 bp, Homo sapiens
aggccgaggcgggcggatcacaaagtgtcaggagtttgagaacagcctggccaacatggtgaaaccccatctctactgaaaatacaaaatcccagctacttgggaggctgaggcaagagaatcgcttgaacctgggaggcggatgttgcagtgagccgagatcacgccactgcactccagcctgggcaacggagtgagactccatctcacaaaaaagagaaaagaaaagaaaactttgcttcactaagtttctcttgccattatctcattaattcagatctgtacctcattgctgctcacacatatatgtttcttaccttagcctgaaccttctcaggccttgaagtcattattctactctttttttttcttttcccatttctatctctgcctgactttgtctgttcgtctgtctctctgtctgcctgcctctatgtcattttc

SEQ ID NO: 27388 - DNA, 1660 bp, Homo sapiens
aggccgaggcgggcggatcacaaagtgtcaggagtttgagaacagcctggccaacatggtgaaaccccatctctactgaaaatacaaaatcccagctacttgggaggctgaggcaagagaatcgcttgaacctgggaggcggatgttgcagtgagccgagatcacgccactgcactccagcctgggcaacggagtgagactccatctcacaaaaaagagaaaagaaaagaaaactttgcttcactaagtttctcttgccattatctcattaattcagatctgtacctcattgctgctcacacatatatgtttcttaccttagcctgaaccttctcaggccttgaagtcattattctactctttttttttcttttccttttttatggcactagagaatgaaaacctaaggtcttagaaaatcttaacttgaaaaagtctctaactggcatgatttgattacttttttcccctgtggacaaataattttctttcctatataatagatttttagtaagtgaaacctttgctgctgctttcctgggtttacattagttttttcctgcccttaagaataatttatctgtgcttctctgatgactgttaatttctaatagtgcaggaagggatgagcttttgatttcttctcactcccctcctcaccctacttccaaattacacactaacttctaactcttacagcctgttggcacatacacaagatccacgagaccatgctcctcagaagctacccatgtcctttctcaccatggtgtggctcttggagccctgagtatctgtgactacccactccaaaggttgactgtaagaggagagcggccttcttaattttgcatttcttaattttgtttttctccattcctgttttatgacttggccttcagatgcttcctactctggcctcctccttttttctcctaggaattgtttccaggtaacctaccatgtgcacttctcagctgctctgctcacctttgcccaccttcccgtgaccctgagagtacagatccgaataatgtggcctgtgcagagctcagagaactgtgaggactacccatgcctgtcagactctgctcagggacagagatggatgggtaaatggtgctgttggagacatttttatcttcataccaggctctgtttcatccctgcaccccgcacccccactcactcccctgagggggtaaaatgcagaggtggttgacctgaagggtctgattccctccttcccaagccttagggcctaccctggagtgctgcagtgtgtgagagctgctgcttgcttgtttctccactaggcctgctccaaatgcttagccaatctctggagccgacacagttgcctacggggtgacttagcaccaggttccattagctctccaagtgactgtttccacccagtacttttggcgcttgaggatggggggagggggattatttaaaataaataaaatccgaggtggcagtagaggattccttttgctttaaaaatctttggactaaaaaaaaaaaaaaaaagttttttatatataaatatataaagtaaattgttatgtaactattattgtttcttgtatgttctaattttgttttatgatgtaattaaagaaagtaagctgtgaagacttttcattttcctgtg

SEQ ID NO: 27389 - DNA, 1606 bp, Homo sapiens
aggccgaggcgggcggatcacaaagtgtcaggagtttgagaacagcctggccaacatggtgaaaccccatctctactgaaaatacaaaatcccagctacttgggaggctgaggcaagagaatcgcttgaacctgggaggcggatgttgcagtgagccgagatcacgccactgcactccagcctgggcaacggagtgagactccatctcacaaaaaagagaaaagaaaagaaaactttgcttcactaagtttctcttgccattatctcattaattcagatctgtacctcattgctgctcacacatatatgtttcttaccttagcctgaaccttctcaggccttgaagtcattattctactctttttttttcttttccttttttatggcactagagaatgaaaacctaaggtcttagaaaatcttaacttgaaaaagtctctaactggcatgatttgattacttttttcccctgtggacaaataattttctttcctatataatagatttttagtaagtgaaacctttgctgctgctttcctgggtttacattagttttttcctgcccttaagaataatttatctgtgcttctctgatgactgttaatttctaatagtgcaggaagggatgagcttttgatttcttctcactcccctcctcaccctacttccaaattacacactaacttctaactcttacagcctgttggcacatacacaagatccacgagaccatgctcctcagaagctacccatgtcctttctcaccatggtgtggctcttggagccctgagtatctgtgactacccactccaaaggttgactgtaagaggagagcggccttcttaattttgcatttcttaattttgtttttctccattcctgttttatgacttggccttcagatgcttcctactctggcctcctccttttttctcctaggaattgtttccaggtaacctaccatgtgcacttctcagctgctctgctcacctttgcccaccttcccgtgaccctgagagtacagatccgaataatgtggcctgtgcagagctcagagaactgtgaggactacccatgcctgtcagactctgctcagggacagagatggatgggtaaatggtgctgttggagacatttttatcttcataccaggctctgtttcatccctgcaccccgcacccccactcactcccctgagggggtaggcctaccctggagtgctgcagtgtgtgagagctgctgcttgcttgtttctccactaggcctgctccaaatgcttagccaatctctggagccgacacagttgcctacggggtgacttagcaccaggttccattagctctccaagtgactgtttccacccagtacttttggcgcttgaggatggggggagggggattatttaaaataaataaaatccgaggtggcagtagaggattccttttgctttaaaaatctttggactaaaaaaaaaaaaaaaaagttttttatatataaatatataaagtaaattgttatgtaactattattgtttcttgtatgttctaattttgttttatgatgtaattaaagaaagtaagctgtgaagacttttcattttcctgtg

SEQ ID NO: 27390 - DNA, 704 bp, Homo sapiens
gacagcccagctgtgctgtggaaagacaaagtggagttttgcacttgagcacaaatgttcccctacaatctctccagtttcggtcagcccaaccctgtggcaccatgggtacagcctagagcatcacccccacagaggcttcgggacggtcctgctggactgctggacgctgctgtggggtcttggggcaggaggggcttccagaagcctggcagttgctgtctggaggccaggaagccaagcccaggaagcccacctgcggctgagttcagaggtggggcctgtgcgttgtgaatgaattgctgtctctctcctcctcatcttgcactaaatctacataacttaaaatttaccattttagccatttttaagtgcacggttctgtggcattaggtacattcgcattgtgcagccaccgccaccctccgccttcagaactttctcatcttcccaaaccgaagctctgtgctcattaaaggctagctcccccgttgctctcccccagccccggcaaccccattccactttgtgtctcgaccataagtgtggctgctctgggaccagtgccagtgggcgcacgctgggtttgcctacgtctggcttacttcactcagcagagtgtccttcggttttatcagttttgtcacaagtgtcagcatttttctcatttttaaggctgaataaaatattgtgtggataagcca

SEQ ID NO: 27391 - DNA, 471 bp, Homo sapiens
tcatacctagcttggcccttctcatatccttgggaggcagtttgctccaagagatgcatcttgctttcagaacacattcccattgacttttttttttaaacacaaaacaatcatttattgttgactgagctcaggaggtggttctcactgggggtctcttgtgaggatgcaataagacattgatgggaggtgcagtcatctcaaaggctgtctgttgatgctgtctgtttgccaggacctccactggggctgaggactagaatgaatatactcagcctctccattgttgcctgggtttcttcacaacatggcagcagggattgaagagcaagcgtcccaagagagagccaggctaaagtacctttcatagtctagccttggaacacatgcagtgtcacttgtgctgttttctgttgtcttccttagaaatgtgtccctaagtccaggccatattcaagactaggggaatag

SEQ ID NO: 27392 - DNA, 1624 bp, Homo sapiens
aacaggcactcctcctcactgtccagtcacctgacgtgctttttctgcgcactcaggtcgtgacaccccaggaggtgcctatcgcgccccaagctcctcacgtgcctcctccccacagtccaggacgcgtcttactaacgcctcaccagagcgcatgcgccctcctcaggagcagcctcaaagcgcgcagcctcagcccattggcctgcgggaagtggagttcccgaacagaagcccctcagtctccggaagccccgcccggcagactgttcccaggatgcaacacgggctcgcgtctaaaagagctgtgctttgttggggctatctgggagtttccgccttccatgaagtgcgcaggcgcacttaggcgaggcggggcgactctaggaagtggagacatcaagagtggtactggaagtggcggaagctctcctcttgccctcttcagcttccggtgtggtgggtcccggatatcgcgtggctgtggcaggtagacagcccgtgctccagaggccttcatcttgtgatggcagatgtacttgagtagacacgacagacggggaaggaccctgatggtccgagggaccttccacagcaagtagaaggcactgctgtgaatatgatggcgtcagaggtgactgcaaaaaaggacagggcagctgggcgaggaagagataccagtgatgtcctaactgagctccctgggtctggtagtgaggagctcagtcttagaatatgagccgtgtcaggggctacagcatcatcactcttgtcctgtcgcagactcaggctccctgttctcaggttcttatgtagacagtgagggctcagggaggctcccaccaccgccaccaccagcaccaccactccatcaaaacggctgaaggaccttcctttagggttcgggggatctcctccttccacaagggatggatgtgaagacaactcattctttgatgttcagatggttgtggccctctgatgagatttttgcacaccttgccaaatgcatatgtctgttgagcctggacattaagtatttcttgatgttcttctgtgtaacaggtgatgtcctaggtgctgcagtgaacagaagagacaaaatatccttgttcccttgaagctaatgtcgtaggggcccaaaacaaagcaaacaaacaaaaaaaaggaatgcaagtcaagtacactttgtatggacagtggtaattcctaagaaggaaaacaaagatgggcttaaggggtgcagagggcctggactatgtgtgtctgtgggatagtctgttactacctctgggactctcatctcgtgagtgtgcttgggtgtgtccaaccgtttttcctagtgacaaagtctgggtaattctgtggggacatatattggtgtatctgggaggtcccatgtgtctcagtggtggtccctgttttcaggaaagagtgtctgtgaatgtccatgtgtctcactgcacagctgtgatttttctgtgtctctgtgttttccagtctttgtgtgatgaaatataaaggcctagcaggctcagagttattaatgaattgtacttaagcgttgagaggcatatatttattgcactattaaattcttccaaaatatagttaaaaaaaaaag

SEQ ID NO: 27393 - DNA, 1344 bp, Homo sapiens
  misc_feature (1069)..(1069): n is a, c, g, or t
  misc_feature (1077)..(1078): n is a, c, g, or t
  misc_feature (1173)..(1173): n is a, c, g, or t
atggaccaccaggacccctactccgtgcaggccacagcggccatagcggcggccatcaccttcctcattctctttaccatcttcggcaacgctctggtcatcctggctgtgttgaccagccgctcgctgcgcgcccctcagaacctgttcctggtgtcgctggccgccgccgacatcctggtggccacgctcatcatccctttctcgctggccaacgagctgctgggctactggtacttccggcgcacgtggtgcgaggtgtacctggcgctcgacgtgctcttctgcacctcgtccatcgtgcacctgtgcgccatcagcctggaccgctactgggccgtgagccgcgcgctggagtacaactccaagcgcaccccgcgccgcatcaagtgcatcatcctcactgtgtggctcatcgccgccgtcatctcgctgccgcccctcatctacaagggcgaccagggcccccagccgcgcgggcgcccccagtgcaagctcaaccaggaggcctggtacatcctggcctccagcatcggatctttctttgctccttgcctcatcatgatccttgtctacctgcgcatctacctgatcgccaaacgcagcaaccgcagaggtcccagggccaagggggggcctgggcagggtgagtccaagcagccccgacccgaccatggtggggctttggcctcagccaaactgccagccctggcctctgtggcttctgccagagaggtcaacggacactcgaagtccactggggagaaggaggagggggagacccctgaagatactgggacccgggccttgccacccagttgggctgcccttcccaactcaggccagggccagaaggagggtgtttgtggggcatctccagaggatgaagctgaagaggaggaggaggaggaggaagagtgtgaaccccaggcagtgccagtgtctccggcctcagcttgcagccccccgctgcagcagccacagggctcccgggtgctggccaccctacgtggccaggtgctcctgggcaggggcgtgggtgctataggtgggcagtggtggcgtcgangggcgcanntgacccgggagaagcgcttcaccttcgtgctggctgtggtcattggcgtttttgtgctctgctggttccccttcttcttcagctacagcctgggngccatctgcccgaagcactgcaaggtgccccatggcctcttccagttcttcttctggatcggctactgcaacagctcactgaaccctgttatctacaccatcttcaaccaggacttccgccgtgccttccggaggatcctgtgccgcccgtggacccagacggcctggtga

SEQ ID NO: 27394 - DNA, 202 bp, Homo sapiens
tacaaatgaggtggtgttcatctctaaaatggtcatcaccagcatataagaaagctactgatttatacatgctcacctctcaacacatactttattgcattcttatttgtcaaatagtttttcagttgattttcttggattttttaggtgaacaattttactattctttgtgaatttatattcagcaaatgttaacagaata

SEQ ID NO: 27395 - DNA, 388 bp, Homo sapiens
agtgagtgtgtttaacaatagatgacccagagattatgctgtgaagaagccaagggcacacgaggaggctgcaagtagatgtccctgctgacagtcccttctgaaatcccagccaacagccagcagcaagcaccagttacatgagtgtggaagctccgggtgactccagcccagccaccaactaactgcaactccatgagaggtcctgcctaagaaccgcccagctgagcccagaaccagatgagattataataataaatgagtgttgatggtttatactaccaagtatgacatggcttgctatacagcaatacaaaaccagaggctcaccttaaaaataagtaactgtggctcaaggttatgaaatgacctgtccaaaggtgaaagg

SEQ ID NO: 27396 - DNA, 1025 bp, Homo sapiens
tcctcagatcgcgaccctgggagtggagtgggggcagcgtggttatgtggctggaccgccgcggatggctcagggttcttggacattggcgctacgaccttaggcgccctagctttaccaggacttggagtggcgataagggcccaatggcagaaacagtgtctacccaggttgggacagagggcgggctgagggcttcgcatcagcaaaacggtgacgctggtggcgacgcgaaggttgagctgtcccccgggcccccgaagccggctggccgggaagtggagccggccccagtaggcggggagcatccctcggctgcagccccaggcccgggcaagcataagaagcggcggggcgcaaccagggagcgtgtcgtgccgcccccgaagaagcggcggaccggggtgagcttcggagatgagcactttgcagaaaccagttattacttcgagggcggcctgcgtaaggtgcggccctattactttgacttccggacctactgcaaaggtcgctgggtgggccacagcttgctgcacgtcttcagtaccgagttccgagctcagcccctggcctactatgaggccgcggtccgggcgggccgcctgcaactcaacgagaagccggtgcaggacctcaacatcgtgctcaaggacaatgatttcttgcggaacacagtgcacaggcatgagccaccagtcacagcagagcccattcgcctgctagctgagaacgaagatgtggtggttgtagacaagccttcctccattcccgttcacccctgtggccgcttccgacacaacacagttatcttcatcctaggcaaggagcaccaactcaaggagctacaccccttgcatcggcttgaccgccttacctcaggggtgcttatgtttgccaagacagctgcagtctctgagagaattcacgagcaggttcgggaccggcaggtgagtcaggcttttgtctcctacaggccacttcttgggctcacgaatgctctgtgtcaaaagggcatcatggagttc

SEQ ID NO: 27397 - DNA, 773 bp, Homo sapiens
tcctcagatcgcgaccctgggagtggagtgggggcagcgtggttatgtggctggaccgccgcggatggctcagggttcttggacattggcgctacgaccttaggcgccctagctttaccaggacttggagtggcgataagggcccaatggcagaaacagtgtctacccaggttgggacagagggcgggctgagggcttcgcatcagcaaaacggtgacgctggtggcgacgcgaaggttgagctgtcccccgggcccccgaagccggctggccgggaagtggagccggccccagtaggcggggagcatccctcggctgcagccccaggcccgggcaagcataagaagcggcggggcgcaaccagggagcgtgtcgtgccgcccccgaagaagcggcggaccggggtgagcttcggagatgagcactttgcagaaaccagttattacttcgagggcggcctgcgtaaggtgcggccctattactttgacttccggacctactgcaaaggtcgctgggtgggccacagcttgctgcacgtcttcagtaccgagttccgagctcagcccctggcctactatgaggccgcggtccgggcgggccgcctgcaactcaacgagaagccggtgcaggacctcaacatcgtgctcaaggtggagtcctgatggggctggccagaagcgggcgaggaaaaggggccgggttttgttttgttttgttttgttttttagtcttagtaaagcataggtactggattaaaatcatggcaattctaa

SEQ ID NO: 27398 - DNA, 1623 bp, Homo sapiens
tcctcagatcgcgaccctgggagtggagtgggggcagcgtggttatgtggctggaccgccgcggatggctcagggttcttggacattggcgctacgaccttaggcgccctagctttaccaggacttggagtggcgataagggcccaatggcagaaacagtgtctacccaggttgggacagagggcgggctgagggcttcgcatcagcaaaacggtgacgctggtggcgacgcgaaggttgagctgtcccccgggcccccgaagccggctggccgggaagtggagccggccccagtaggcggggagcatccctcggctgcagccccaggcccgggcaagcataagaagcggcggggcgcaaccagggagcgtgtcgtgccgcccccgaagaagcggcggaccggggtgagcttcggagatgagcactttgcagaaaccagttattacttcgagggcggcctgcgtaaggtgcggccctattactttgacttccggacctactgcaaaggtcgctgggtgggccacagcttgctgcacgtcttcagtaccgagttccgagctcagcccctggcctactatgaggccgcggtccgggcgggccgcctgcaactcaacgagaagccggtgcaggacctcaacatcgtgctcaaggacaatgatttcttgcggaacacagtgcacaggcatgagccaccagtcacagcagagcccattcgcctgctagctgagaacgaagatgtggtggttgtagacaagccttcctccattcccgttcacccctgtggccgcttccgacacaacacagttatcttcatcctaggcaaggagcaccaactcaaggagctacaccccttgcatcggcttgaccgccttacctcaggggtgcttatgtttgccaagacagctgcagtctctgagagaattcacgagcaggttcgggaccggcagctggagaaggagtacgtgtgccgggtggaaggggagttccccactgaggaagtgacctgtaaagaacccatcttagtggtgtcttacaaagtaggggtgtgccgtgtagatccccggggcaagccctgtgagacagtgttccagaggctaagctacaatggccagtccagtgtggtacggtgccggccactcacaggccgcacacaccagattcgagtccaccttcagttcttgggccatcccattctcaacgaccccatctacaactcagttgcctggggtccttctcgaggccggggcggctacattcccaagacaaacgaggagttgctacgggacctggtagcagagcaccaggccaaacagagcctggatgtgctagatctctgtgagggtgacctgtccccaggactcacagactctacggccccctcctcagagttgggcaaggacgacctggaagagttggctgcagctgcccagaagatggagggattgcttcttgggttgtgacaaggatgggctatagggcaagggctgaccccatgggctagtacttggggtttctataggaatgaggacgggcttctaaagagacctgctcatacttgctacctccttccagtgggaatttggagactttttggtttgtaaatatatccctttttctaacatc

SEQ ID NO: 27399 - DNA, 1883 bp, Homo sapiens
tcctcagatcgcgaccctgggagtggagtgggggcagcgtggttatgtggctggaccgccgcggatggctcagggttcttggacattggcgctacgaccttaggcgccctagctttaccaggacttggagtggcgataagggcccaatggcagaaacagtgtctacccaggttgggacagagggcgggctgagggcttcgcatcagcaaaacggtgacgctggtggcgacgcgaaggttgagctgtcccccgggcccccgaagccggctggccgggaagtggagccggccccagtaggcggggagcatccctcggctgcagccccaggcccgggcaagcataagaagcggcggggcgcaaccagggagcgtgtcgtgccgcccccgaagaagcggcggaccggggtgagcttcggagatgagcactttgcagaaaccagttattacttcgagggcggcctgcgtaaggtgcggccctattactttgacttccggacctactgcaaaggtcgctgggtgggccacagcttgctgcacgtcttcagtaccgagttccgagctcagcccctggcctactatgaggccgcggtccgggcgggccgcctgcaactcaacgagaagccggtgcaggacctcaacatcgtgctcaaggacaatgatttcttgcggaacacagtgcacaggcatgagccaccagtcacagcagagcccattcgcctgctagctgagaacgaagatgtggtggttgtagacaagccttcctccattcccgttcacccctgtggccgcttccgacacaacacagttatcttcatcctaggcaaggagcaccaactcaaggagctacaccccttgcatcggcttgaccgccttacctcaggggtgcttatgtttgccaagacagctgcagtctctgagagaattcacgagcaggttcgggaccggcagctggagaaggagtacgtgtgccgggtggaaggggagttccccactgaggaagtgacctgtaaagaacccatcttagtggtgtcttacaaagtaggggtgtgccgtgtagatccccggggcaagccctgtgagacagtgttccagaggctaagctacaatggccagtccagtgtggtacggtgccggccactcacaggccgcacacaccagattcgagtccaccttcagttcttgggccatcccattctcaacgaccccatctacaactcagttgcctggggtccttctcgaggccggggcggctacattcccaagacaaacgaggagttgctacgggacctggtagcagagcaccaggccaaacagagcctggatgtgctagatctctgtgagggtgacctgtccccaggactcacagactctacggccccctcctcagagttgggcaaggacgacctggaagagttggctgcagctgcccagaagatggaggaagtagctgaggcagcccctcaggagttggacacaatagccttggcatcagagaaggcagttgaaacagatgtcatgaatcaagagacagacccactctgtgcagagtgccggctggtgcgacaggatcccttgccccaagaccttgtgatgttcctacatgccctacgctataaagggccaggctttgagtacttttcaccaatgcctgcctgggcacaggatgactggcaaaaggactgagggtgtggccaatggagggattgcttcttgggttgtgacaaggatgggctatagggcaagggctgaccccatgggctagtacttggggtttctataggaatgaggacgggcttctaaagagacctgctcatacttgctacctccttccagtgggaatttggagactttttggtttgtaaatatatccctttttctaacatc

SEQ ID NO: 27400 - DNA, 2562 bp, Homo sapiens
tcctcagatcgcgaccctgggagtggagtgggggcagcgtggttatgtggctggaccgccgcggatggctcagggttcttggacattggcgctacgaccttaggcgccctagctttaccaggacttggagtggcgataagggcccaatggcagaaacagtgtctacccaggttgggacagagggcgggctgagggcttcgcatcagcaaaacggtgacgctggtggcgacgcgaaggttgagctgtcccccgggcccccgaagccggctggccgggaagtggagccggccccagtaggcggggagcatccctcggctgcagccccaggcccgggcaagcataagaagcggcggggcgcaaccagggagcgtgtcgtgccgcccccgaagaagcggcggaccggggtgagcttcggagatgagcactttgcagaaaccagttattacttcgagggcggcctgcgtaaggtgcggccctattactttgacttccggacctactgcaaaggtcgctgggtgggccacagcttgctgcacgtcttcagtaccgagttccgagctcagcccctggcctactatgaggccgcggtccgggcgggccgcctgcaactcaacgagaagccggtgcaggacctcaacatcgtgctcaaggacaatgatttcttgcggaacacagtgcacaggcatgagccaccagtcacagcagagcccattcgcctgctagctgagaacgaagatgtggtggttgtagacaagccttcctccattcccgttcacccctgtggccgcttccgacacaacacagttatcttcatcctaggcaaggagcaccaactcaaggagctacaccccttgcatcggcttgaccgccttacctcaggggtgcttatgtttgccaagacagctgcagtctctgagagaattcacgagcaggttcgggaccggcagctggagaaggagtacgtgtgccgggtggaaggggagttccccactgaggaagtgacctgtaaagaacccatcttagtggtgtcttacaaagtaggggtgtgccgtgtagatccccggggcaagccctgtgagacagtgttccagaggctaagctacaatggccagtccagtgtggtacggtgccggccactcacaggccgcacacaccagattcgagtccaccttcagttcttgggccatcccattctcaacgaccccatctacaactcagttgcctggggtccttctcgaggccggggcggctacattcccaagacaaacgaggagttgctacgggacctggtagcagagcaccaggccaaacagagcctggatgtgctagatctctgtgagggtgacctgtccccaggactcacagactctacggccccctcctcagagttgggcaaggacgacctggaagagttggctgcagctgcccagaagatggaggaagtagctgaggcagcccctcaggagttggacacaatagccttggcatcagagaaggcagttgaaacagatgtcatgaatcaagagacagacccactctgtgcagagtgccggctggtgcgacaggatcccttgccccaagaccttgtgatgttcctacatgccctacgctataaagggccaggctttgagtacttttcaccaatgcctgcctgggcacaggatgactggcaaaaggactgagggtgtggccaatggagggattgcttcttgggttgtgacaaggatgggctatagggcaagggctgaccccatgggctagtacttggggtttctataggaatgaggacgggcttctaaagagacctgctcatacttgctacctccttccagtgggaatttggagactttttggtttgtaaatatatccctttttctaacatctttgatgtctggttttcttccggcttcttttttattactgatgtaaaattcacataacataaaattaaccactttaactagccaggcacagtggctcatggctataatcctagtactttgggaggtagaagtgaaaggatcactggaggccaagagttcaaggttaaagtgaactgtgattgtgctgctgcactccagagcctaggtgacagagtgagaccctgtctcttaaaaaaaaaaaaaattaaccaatttaagatgtacagcgtagtcacatttagtacattcacagtgttgtacaaccataacctcatatatttccaaaacattttcatcaccccaaaaggaaacctgtacccattaagtaagtggtcactttccactccccttccaccagcctctggcaaccactaatctactttctgtctgtttggatttgcctgtttattctggacattttatataaatggaatgataaaacatgtgacctatgtctctgtttcccttggcataatgttttcaaggtttattcaacttgtagcatgtatcggtacttcattctttttttatggcagaataagctgttgtatggatataccacgatttgtctatctgttcatcagttaatggacatttgggttgtttccaccatttcattattgtggatagtgctgctgtg

SEQ ID NO: 27401 - DNA, 715 bp, Homo sapiens
attctgtcgtctgggaacggctggtttcgcggtcagacgccgagggccctcgaagtccctagcaacggctgcggagggagattccacctaggtccgtgcaggttacaaatggcaaccagaacagggactccaagcacgcccaactagcagcatccaaacatgggacttcaaggacgtgaatgaagaaggtctgctggagcagaggaactgaaattgacaaggcgaaaggggaccctgggaagagtctgccggcagcagatataagtctgtaaaatcggatggaccaccaattggagaatgagagcctcccagcccagccttacattctttcaattaatacataaacagaaagggggatatgcagggagccaaaggcctgtgggacgtgaccaactcagcattctgctggaggctatatgatcaaacagcaaactgtttatcatgaatacaggatgtgagcaaactcaggactgctcctgccaacataaggtttgctggaggcaatcactccctggcaccgaggttatctactgcgacatctagagaatgcagtcttgcaagcctactctgaactgagcagccgaccccttcttccacccccccccaccctcctatctcttttgcctaataaatacggagggctgtgtaaagctcagggcccttgtccactagaggtaaggtgctccctgaccccttctcccaaatataaactttt

SEQ ID NO: 27402 - DNA, 748 bp, Homo sapiens
gggctgtgtaaagctcagggcccttgtcccctagaggcaaagcgcccccgatcccttcttccaaatacactcttttgtctcatctttattcccgtgttcaccccactttgtttagtccacctaggtccgtgcaggttacaaatggcaaccagaacagggactccaagcacgcccaactagcagcatccaaacatgggacttcaaggacgtgaatgaagaaggtctgctggagcagaggaactgaaattgacaaggcgaaaggggaccctgggaagagtctgccggcagcagatataagtctgtaaaatcggatggaccaccaattggagaatgagagcctcccagcccagccttacattctttcaattaatacataaacagaaagggggatatgcagggagccaaaggcctgtgggacgtgaccaactcagcattctgctggaggctatatgatcaaacagcaaactgtttatcatgaatacaggatgtgagcaaactcaggactgctcctgccaacataaggtttgctggaggcaatcactccctggcaccgaggttatctactgcgacatctagagaatgcagtcttgcaagcctactctgaactgagcagccgaccccttcttccacccccccccaccctcctatctcttttgcctaataaatacggagggctgtgtaaagctcagggcccttgtccactagaggtaaggtgctccctgaccccttctcccaaatataaactttt

SEQ ID NO: 27403 - DNA, 571 bp, Homo sapiens
caaacatccaaaccatttcagaactcattctataaaatatataaacagctttctattttttttctagctgcataatattccattgtgtggatgagccataatttatcaatttcctattatttctaatcttttacaatagatagtgtttcagtccttaatcttatacatataggtggccataaatttttaaggttctttggctatttggccaacatgtgggaagaaagccttgaattttataataaggcaaatatagggagttttaacagtggaaggatgcctgggacattttaaaacaagatttccttatcctgagaatgttcatattgtctaaattgtcatcccacagggagatatagacagaatagatgctgaagctaaccaatttaatttttgaatcaatttgatcataaaatatataagtgctaagttttccttattgttgccagtggatataataattatttttatgtcagaaaacgtaattttcttcatttgctttatttcaagtagcagaactttgcggtgtgtagtgaatacgaagactatactttgtaccgtttatgtttac

SEQ ID NO: 27404 - DNA, 352 bp, Homo sapiens
gtaattacttaggaagaccaaatggcaccagagataagactcccttagatccccacttagatcaccaccctttctcagggggtaataaagtcatcttccttggaatgtagcaatctataaccaatcaaagcactgtaacatacgcactggtcttgtatggaaaatgttgtaatcctgctaaaattcctctctctttgcctgtggaagtgaaaccttaacttctccagtttggaatgctcaccccatgcctttggagtcaatgcttactgggtggctattctcaaactttgcactcaaagaaactctatacttagtcttattttctgaatctcattatttaaggttgacataa

SEQ ID NO: 27405 - DNA, 400 bp, Homo sapiens
cctccgggttcaagtgattctcctgcctcagcctcccgagtagctgggattacaggcgtaagccaccacgcctggctaatttttgtatttttagtagagatggggtttcaccaaattggccaggctggtctcgacctgctgaccttgtgatccgcctgccttggcctcccaaagtgctgggattacagacgtgagccaccgcgccggcctgtataagtatcttataatcatattgtatcccactttttcccacaaatgatacacacgttacctacatcgttcagtgttatgttttcagatcttggaagctgtttcgtttcagtacatttgagcttcctgggatcttttctgtggctacataattttccgttgtagaactgtatgtgatttaattaaacag

SEQ ID NO: 27406 - DNA, 200 bp, Homo sapiens
ggaggttgcagtgagctgagatcacaccactgcactccagcctgggagacacagtgagactccagctcaaaaaaaaaaaaaaaaaaaaaaaaaaagagaaagcaagacagtcatcatacttgatggatggagggtatttaagcaaagtatagtgaccatgcttgaggggatggataccccattttccacgatatgattat

SEQ ID NO: 27407 - DNA, 843 bp, Homo sapiens
ttgagatggagtcttgctcttgtcacccaggcaggagtgcagtggcgcaatcttggctcactgcaacctctgcctcctgggttcaagctgttctccttactcagcctcccatgtagctgggattacaggcgtccgcaaccacgcccggctgatattagtagttttagtagaggcgggtttcaccatgtggccaggctgatctcgaactcctgacctcaggcagttcacccgtctcagcctcccaaagtgctgggattagaggcgtgagccactgcgcccggccaaccacattttcaaaacaggtcatgtggtgtcaggttggagtgtacttccagggataaccgtgggacattcttgaaatctgaactatcctgggaagtcttgaagtaatggatgcctatagtggacactcaggactcctgtccttggagcgagattggaggggcatctagcacttaacatatgccacaatgctttctgtggccattatttaacctctggttaaacaagcttaggaggctgacttactagtagtaaaaggagtgtgctttgagtcacagatcctggttgaactccagcatgttacaaacctcagccctgttctatgaaaggtcataactacgaggattattgtaaaacattaatttagaaatgtaaagtggtccccaatctctggatctggtcaggatttattggagctgccactgaggggattaaataagtggggtcaaagccccacagcctagtcaaccaagttgctcctcttttgtctatcctgtggttcccaagcaagactgcaattgaaaaaaaggctgctgttattaaagtcagaacaccaaataa

SEQ ID NO: 27408 - DNA, 1723 bp, Homo sapiens
attctagattgggttgaaataacccccttggtatactttcactcccttcatcacctgctccaattggctggatgtttgtggcctctcaaacacaacaaaatgaaatcttttcttgaatgaaatcatagccataaaacaacgcaaaggaaaaaaatgacaaaactgcctgccatcactatgccccctacacactcatgtagtaaagttctgagttctatcagggagctcgtgtcccagggcattcccactgcccagtgatcttgccacactccagcaacttgatcatggccattatcatcactaatagtagcatcttcctcctcattattacagcatctatatcaggagggaagaggggcttctgagtgaggccttggaatatatccaagacaccacctttttgcttgagaaaagagcttgtctcaactttgcctctgtccagggctcacaccttccatgtcatcaggagagagtcagtttccaaattgacccagaagggatctcacctaaagagaatctggaataagtaggctctagagggcagaaatgtaacagagaataaggctcaaggtggcaggtagagaaaaaaaaaagtgaaagttgtagggtcaaaatgccagctagaagctgggagtgcccgtttacagtggctgaaaccacagcagttcttgaacttggaagggaaatcccatgtgacatgcagagagaagagctaaagggtgtgaaaacctatgtgtctgtgggtaggaggagggaagatgctgcagcctgtgtgggtgttggagtgagcatgtgtgtgtgcatacacacacacagggaagagatgacagatgcaagtggcatggagatgatgttagggacagtttaatcttgcaaggctatatgcaggatcagggagaagggtgaaggagaaaaggagaaaatctggaaagaatgatgctgtcctcatcattacatacatgatccacctcagaactcctggcttggatttgtcagtgatccaagtcctggtgtgaaggtgtgctttttgttttatctgcctgatatccccatccagaagtcctggtttggaggagggttccatcctcattccccacccatcacccttttaaggctggcctgcttctgctcacccactgactcattttagcaatgaccttccatctggaatctgagtggccgagtggccagccgcagctaattcccttcacccactgcatttcccaccttactcactgcctcttggtattccaggcgactttccttttatagtgtacacacacacacacacacacacacacacacacgacctgacagctcagtcaagtcaggccctccaagcagaatactgcattttacctaaatccaagcagggcgtggcagggagccggttgccctccttttgggctctctataacaagagcagaaaatccactcctttcacctcttcttttcctgcaggcctttagatacgcagcctctccaagaattgcagaaagcatccagtcctacccaaacagcctaggggagtagaacagagcccccccccacccgccccccacaatttcactgaagcactttcatcatccttcctctccttttctgtcttctctgacatttaagatatccacctaaaccccaaagtggggcctgaagaaggagataagtgttccattcggcaacataagagaagttaaaggtaccaggacagggaaaaaaaaaa

SEQ ID NO: 27409 - DNA, 395 bp, Homo sapiens
tcggtaccaccaattccattgccagcgtacactaaatccaagcagggcgtggcagggagccggttgccctccttttgggctctctataacaagagcagaaaatccactcctttcacctcttcttttcctgcaggcctttagatacgcagcctctccaagaattgcagaaagcatccagtcctacccaaacagcctaggggagtagaacagagcccccccccacccgccccccacaatttcactgaagcactttcatcatccttcctctccttttctgtcttctctgacatttaagatatccacctaaaccccaaagtggggcctgaagaaggagataagtgttccattcggcaacataagagaagttaaaggtaccaggacagggaaaaaaaaaa

SEQ ID NO: 27410 - DNA, 467 bp, Homo sapiens
atacagatgtgaataattctgaaaagtagaaacaaatataatgaatttagccctgttcctatccttcatgtgcacatgaaacttataaataatacaataacatattattggctctgtttcttctctctttctggatcttggttgtcgatgacagaattaggagaaagactaagggaggggtcagtggaaaaaattcttggagatcatatttgaggattttgagatataggttttatgtgggaatgtcacttatgagatgttggagagaatagttaatatacacatatcccttagaatatgtctttttatccaggataggttttataagttttagagtaaaatgctgtgatagagaaaaagaggtatcagtcaggcagatatatgtgtgttaccaacatgggtgataaacatgggaatgtattttatcacatatttctacattatattaataattttaccatggagaa

SEQ ID NO: 27411 - DNA, 802 bp, Homo sapiens
caaattaaaaattaaaaaattaaccacacacctgtggtcttagctacttgcaggctgaggtgggaggattgcttgagtccagaaggttgaggctacagtgagctacgattgtacccctgcactccagcctgggtgacagagcgagaccctatctctacaaaaaaacaaacaaaacagattgcccatcaggggaactatccataaggcccagaaaaatctctgttggcctcatgtgcaagtcccccacagtaacacaccatttcccacctcccagctttacctgtgctgtgccctctgtctggcacagtcttttcacattttagggacaaattcctaattgttctttgagactcgtcttgggagtcacctcctctaggaagcctttgggtccccagcctgggccaggtaggcctgggtaccctgatggttccctctctgtgacacattgggaacttgacgccccctgcctgccgctgtctccctgagggccaggactgcacccaacccctctctttgtccctagcacccaggacagagtcaggctcatagcagatgtcagcccaccgcactctggaaagaaaacacaagtggtaggcgctgtggctcatgcctgtcatcccagcactttgggaggccgaggcaggtgaatcacttgagctcgagagttcgagaccagcctggccaacatggtgaaaccccgtctctacaaaaatacaaaaattaactgggcgtggcatggtggcatgcacctgtaatcttagctactttgggaggctgaggcagaagaatcacttgaacccgg

SEQ ID NO: 27412 - DNA, 546 bp, Homo sapiens
cacagagaaggacagaaggctgatgccgggagaaattcttgatagggtcacccatgtgggcgactggagacctcctgaggagtcttcaaggagcgtcttcagaatgttcctctacagggaggagagagggaggcctgtaaccactgctcctgtcccccatggccttgccccagtggacattaattatctgtatttccatgcatagaatatagaactgctgggcgcctcagctggagcccagagcaggggcaagagatacagaatgcacaaaatcaccccagaacctctcctaagtcactcgtaaagtgcacccagggcctacttagtccttttttatgtagcatcctgcagaacacttgcctcagtccctgtaactctccatcaaccaaggcttccctgaccttcagttgattcatctatttcttcctgaagaagtcaacagagcaacggccaccgacttgcctaacgccagaacattgtgtttcatttgtctgtcaattgttcatcaattcctggataattcccattcttttcatacatttcact

SEQ ID NO: 27413 - DNA, 455 bp, Homo sapiens
ggttgggttgttctgatctgttttgatacaataagcaatgacatagtatacaactttgtccatatttatttatttatttattttttgagatggagtttcactcttgttgcccaggctggagtgcaatggcacgatctcagctcactgcaacctcggcctcctaggttcaagcgattctcctgcctcagcctctcgagtagccgggactacaggcgcatgccaccacgtgcagctaatttttttgcatttttagtagagatggagttttgccatgttggccaggttgctctcgaactcctgacctcagaagatcttcccaccttggcctcctaaagtgccgagattacaggtgtgagccactgtgcccagccactaaagcttctaaaaagtatatataatttttgtgtgtgtgtttagccatcaacaattatatctcattacaatttaaagttcta

SEQ ID NO: 27414 - DNA, 804 bp, Homo sapiens
cggaaagagaagagagaagagtgagcagagagattgagagattgagagagagagagagagatagacggagatctctggagcagacctcaaggtgacttctatttctatctggttctcgtctgggggggccctggccgggcagccccccaacacttctcctgccctgaaacacggctctagccaacctgctccgctgcttcacctgcgaccgtctctgcgggggctgcacggcgccagcccctccagcccaccagggcattgtcctccagcccgtcatgcccagctgtgaccccggtccgggccctgcctgcctccccaccaagactttccgcagctatctgccccgctgtcaccgcacttacagctgtgtccactgccgtgcacacctggccaaacacgatgagcttatttccaagtccttccaagggagccatggccgagcctacctgtttaactccgtgtgagtctacctctttccttgtgcgtgtgcttgtgcttgtgtgtgagtgagtaattttcctctgtggagaaaggggggaatccatcaggtgatcttgtgccttcagtctttgcctccccttttgcaaagagggtctcaatctgaagttctcacatggggagccgggggagaattgaaatcataacggtggaaaaagaaggcccaggctctagtcttaaaggggtggattatcaaaggcaggggctgtccagttctctccagatggaagttcccttgggctgtctggggactggactgacagtgcaaccccactgggtgctgggtccttcctgtttcctgagaca

SEQ ID NO: 27415 - DNA, 2100 bp, Homo sapiens
tataagattattagtataaaagggaagacaggcaggtgcttattctgggccagaatgagtgaaccaaggtgcgagaatgggcggccacacgtgagggctttggtactgttggaaacatctataaagttctagtgaagagtcccagagcacaggaccctgacctcaggagagaaccgaatcagggtttgtatacctgcctgcatgctctccctcccctcaccttacacctcctgcccccctccccaaaatgtataaaggaccaattgtattgcaaacaaagaccatgtaaaagaaagaccttcaggcatccccaactcttaaaaggctctgatcccctgagacacagtgcctgtgcgatgcagagcctcacgaagaactgaaaaccaaggagagggcacttgcagatgacgttgctcccatggcagcgtctgtgcccgtgggcttctctctgtggaaaatggtggaggctgcttctgccccaggagggagaaacaccgactccctggctttggcgccagaagcctggatcggctgccaggtttgccagagcagaatggggatccaggggacagggcgacaatgcaactggatgctgtgggggggtcgatggtgatggggaaagtagaggtgacttctatttctatctggttctcgtctgggggggccctggccgggcagccccccaacacttctcctgccctgaaacacggctctagccaacctgctccgctgcttcacctgcgaccgtctctgcgggggctgcacggcgccagcccctccagcccaccagggcattgtcctccagcccgtcatgcccagctgtgaccccggtccgggccctgcctgcctccccaccaagactttccgcagctatctgccccgctgtcaccgcacttacagctgtgtccactgccgtgcacacctggccaaacacgatgagcttatttccaagtccttccaagggagccatggccgagcctacctgtttaactccgtggtcaacgtgggttgcgggccagctgaacagcgcctcttgctcacggggctccactcggtagctgacattttctgtgagagctgcaaaaccacactgggctggaaatatgagcaagcttttgagacgagccagaagtacaaggaagggaaatacatcattgaaatgtcacacatggtgaaggacaacggctgggactgaggggctcaggcagggtgtgcccttcctccgcatgcccctccctccccacggccctgccaagcagtctataccagcatgagtactgccccacccctgggggaaacctggctccaaccaacccctcccctgcctccaccatatccactaccaggcaccctttagaacaggggtctgggggtaccccaggggtgttaaggctcaggagtgggcagcagtcagggagagacagaactgggggaaagggatggttgtgggtctttctgttcccaagatcctgaacatggaagcgatggcagggcatagactcaggcagagaggattgtgggaggaatccgtttttgctccacctctttttgagtgaacagaggacaaaccttgggtcacagggcaagtagatcatggaccacagaacagcagatgagaaaagacttgggttggagtgaaattctggtctcagacaccaggagaccagagtctctgaggatgaagtttcctacccctatttgtagggaaaaggacttgagtgcagggaaaactcaaatcccaggccctgggaaatagtaaaataatcaaagggttttccatttcactccacttgttagtttatcttggcactgaagaggcactttcgagtatctaacttttgccattgggtggggtggggacagctgctcgcggaacagcccctagtcggctgcttccagagtaagcagtctttatgggctttctctgaggcccagtcactgctcctgggacccagtcccctggaggggaggtggaaaatcagtgctacggggccagtctttcccgtggctgccaccagcgaatgaaacttttgtatgatacataaagtgcttgagtctatttttaataaaaagggaaaaagcaacttgaggcaacctgtc

SEQ ID NO: 27416 - DNA, 1564 bp, Homo sapiens
cggaaagagaagagagaagagtgagcagagagattgagagattgagagagagagagagagatagacggagatctctggagcagacctcaaggtgacttctatttctatctggttctcgtctgggggggccctggccgggcagccccccaacacttctcctgccctgaaacacggctctagccaacctgctccgctgcttcacctgcgaccgtctctgcgggggctgcacggcgccagcccctccagcccaccagggcattgtcctccagcccgtcatgcccagctgtgaccccggtccgggccctgcctgcctccccaccaagactttccgcagctatctgccccgctgtcaccgcacttacagctgtgtccactgccgtgcacacctggccaaacacgatgagcttatttccaagtccttccaagggagccatggccgagcctacctgtttaactccgtggtcaacgtgggttgcgggccagctgaacagcgcctcttgctcacggggctccactcggtagctgacattttctgtgagagctgcaaaaccacactgggctggaaatatgagcaagcttttgagacgagccagaagtacaaggaagggaaatacatcattgaaatgtcacacatggtgaaggacaacggctgggactgaggggctcaggcagggtgtgcccttcctccgcatgcccctccctccccacggccctgccaagcagtctataccagcatgagtactgccccacccctgggggaaacctggctccaaccaacccctcccctgcctccaccatatccactaccaggcaccctttagaacaggggtctgggggtaccccaggggtgttaaggctcaggagtgggcagcagtcagggagagacagaactgggggaaagggatggttgtgggtctttctgttcccaagatcctgaacatggaagcgatggcagggcatagactcaggcagagaggattgtgggaggaatccgtttttgctccacctctttttgagtgaacagaggacaaaccttgggtcacagggcaagtagatcatggaccacagaacagcagatgagaaaagacttgggttggagtgaaattctggtctcagacaccaggagaccagagtctctgaggatgaagtttcctacccctatttgtagggaaaaggacttgagtgcagggaaaactcaaatcccaggccctgggaaatagtaaaataatcaaagggttttccatttcactccacttgttagtttatcttggcactgaagaggcactttcgagtatctaacttttgccattgggtggggtggggacagctgctcgcggaacagcccctagtcggctgcttccagagtaagcagtctttatgggctttctctgaggcccagtcactgctcctgggacccagtcccctggaggggaggtggaaaatcagtgctacggggccagtctttcccgtggctgccaccagcgaatgaaacttttgtatgatacataaagtgcttgagtctatttttaataaaaagggaaaaagcaacttgaggcaacctgtc

SEQ ID NO: 27417 - DNA, 2011 bp, Homo sapiens
tataagattattagtataaaagggaagacaggcaggtgcttattctgggccagaatgagtgaaccaaggtgcgagaatgggcggccacacgtgagggctttggtactgttggaaacatctataaagttctagtgaagagtcccagagcacaggaccctgacctcaggagagaaccgaatcagggtttgtatacctgcctgcatgctctccctcccctcaccttacacctcctgcccccctccccaaaatgtataaaggaccaattgtattgcaaacaaagaccatgtaaaagaaagaccttcaggcatccccaactcttaaaaggctctgatcccctgagacacagtgcctgtgcgatgcagagcctcacgaagaactgaaaaccaaggagagggcacttgcagatgacgttgctcccatggcagcgtctgtgcccgtgggcttctctctgtggaaaatggtggaggctgcttctgccccaggagggagaaacaccgactccctggctttggcgccagaagcctggatcggctgccaggtgacttctatttctatctggttctcgtctgggggggccctggccgggcagccccccaacacttctcctgccctgaaacacggctctagccaacctgctccgctgcttcacctgcgaccgtctctgcgggggctgcacggcgccagcccctccagcccaccagggcattgtcctccagcccgtcatgcccagctgtgaccccggtccgggccctgcctgcctccccaccaagactttccgcagctatctgccccgctgtcaccgcacttacagctgtgtccactgccgtgcacacctggccaaacacgatgagcttatttccaagtccttccaagggagccatggccgagcctacctgtttaactccgtggtcaacgtgggttgcgggccagctgaacagcgcctcttgctcacggggctccactcggtagctgacattttctgtgagagctgcaaaaccacactgggctggaaatatgagcaagcttttgagacgagccagaagtacaaggaagggaaatacatcattgaaatgtcacacatggtgaaggacaacggctgggactgaggggctcaggcagggtgtgcccttcctccgcatgcccctccctccccacggccctgccaagcagtctataccagcatgagtactgccccacccctgggggaaacctggctccaaccaacccctcccctgcctccaccatatccactaccaggcaccctttagaacaggggtctgggggtaccccaggggtgttaaggctcaggagtgggcagcagtcagggagagacagaactgggggaaagggatggttgtgggtctttctgttcccaagatcctgaacatggaagcgatggcagggcatagactcaggcagagaggattgtgggaggaatccgtttttgctccacctctttttgagtgaacagaggacaaaccttgggtcacagggcaagtagatcatggaccacagaacagcagatgagaaaagacttgggttggagtgaaattctggtctcagacaccaggagaccagagtctctgaggatgaagtttcctacccctatttgtagggaaaaggacttgagtgcagggaaaactcaaatcccaggccctgggaaatagtaaaataatcaaagggttttccatttcactccacttgttagtttatcttggcactgaagaggcactttcgagtatctaacttttgccattgggtggggtggggacagctgctcgcggaacagcccctagtcggctgcttccagagtaagcagtctttatgggctttctctgaggcccagtcactgctcctgggacccagtcccctggaggggaggtggaaaatcagtgctacggggccagtctttcccgtggctgccaccagcgaatgaaacttttgtatgatacataaagtgcttgagtctatttttaataaaaagggaaaaagcaacttgaggcaacctgtc

SEQ ID NO: 27418 - DNA, 1556 bp, Homo sapiens
tataagattattagtataaaagggaagacaggcaggtgcttattctgggccagaatgagtgaaccaaggtgcgagaatgggcggccacacgtgagggctttggtactgttggaaacatctataaagttctagtgaagagtcccagagcacaggaccctgacctcaggagagaaccgaatcagggtttgtatacctgcctgcatgctctccctcccctcaccttacacctcctgcccccctccccaaaatgtataaaggaccaattgtattgcaaacaaagaccatgtaaaagaaagaccttcaggcatccccaactcttaaaaggctctgatcccctgagacacagtgcctgtgcgatgcagagcctcacgaagaactgaaaaccaaggagagggcacttgcagatgacgttgctcccatggcagcgtctgtgcccgtgggcttctctctgtggaaaatggtggaggctgcttctgccccaggagggagaaacaccgactccctggctttggcgccagaagcctggatcggctgccaggtttgccagagcagaatggggatccaggggacagggcgacaatgcaactggatgctgtgggggggtcgatggtgatggggaaagtagaggtgacttctatttctatctggttctcgtctgggggggccctggccgggcagccccccaacacttctcctgccctgaaacacggctctagccaacctgctccgctgcttcacctgcgaccgtctctgcgggggctgcacggcgccagcccctccagcccaccagggcattgtcctccagcccgtcatgcccagctgtgaccccggtccgggccctgcctgcctccccaccaagactttccgcagctatctgccccgctgtcaccgcacttacagctgtgtccactgccgtgcacacctggccaaacacgatgagcttatttccaagtccttccaagggagccatggccgagcctacctgtttaactccgtggtcaacgtgggttgcgggccagctgaacagcgcctcttgctcacggggctccactcggtagctgacattttctgtgagagctgcaaaaccacactgggctggaaatatgagcaagcttttgagacgagccagaagtacaaggaagggaaatacatcattgaaatgtcacacatggtgaaggacaacggctgggactgaggggctcaggcagggtgtgcccttcctccgcatgcccctccctccccacggccctgccaagcagtctataccagcatgagtactgccccacccctgggggaaacctggctccaaccaacccctcccctgcctccaccatatccactaccaggcaccctttagaacaggggtctgggggtaccccaggggtgttaaggctcaggagtgggcagcaagtcccctggaggggaggtggaaaatcagtgctacggggccagtctttcccgtggctgccaccagcgaatgaaacttttgtatgatacataaagtgcttgagtctatttttaataaaaagggaaaaagcaacttgaggcaacctgtc

SEQ ID NO: 27419 - DNA, 241 bp, Homo sapiens
tagaccaaaaagacaaaagagacagtaagaaaataaggtaacaggatcattcctgtgggtctaacatccaaatagtagatgttccagaaaagaatagaaaaaatataagaaaggaagtcatcaattaatataagaaaatttccttacgaaggacacagctgccatactgtaaagggctggcaagtaccctgcacaaggaatgactgtggaccgacactaggttacatcatagataaatacc

SEQ ID NO: 27420 - DNA, 581 bp, Homo sapiens
gcagcacccgccttggagcccctttcccgcctgcgagggagacctggcgtctgcccgctgctcgcagagtcacgttgccggcgattcaaagggcgaggaaaggatgaggaagcgctttgtggtctgaggcagcccctctgtcatgtggtgctccctattcctcctcctcgtcttcctcgtcttccccctcctcctcgcgcccggcagcaccctcgctactcaggagttctgtccatcctcgttttgtgtggctgactcagttctcgagcccccttcctcccatgcagaaaggggacagtgtggcaacccgcccccaacctctattcttggtgaatttaaaatgggggttcccagagtgggtgctggcaccccaggggacaccacacagaccaccaggctgcaggagggagacacaggccgtgctgtctgtgttatggagtgcaccctttaaaagttccgaggtggtctagccaggggcggtggctcacacctgtaatcccagcactttgggaggccgaggcgagttcaggagatcgagactattctggcttggctaacgtggtgaaaccccgtctctacta

SEQ ID NO: 27421 - DNA, 707 bp, Homo sapiens
gttgccaggactggtctcaaattctcccgtattggattaatttcagtgatgtaagttgaggccactgacccacatgactccttcagaaccgagagcaggaaggacagcatgacatagataaagtcccaagccatgctgattattgtttaaaaacttcaggctttccccaaattgcatgatatcttaatctttgatttcttcttattttaagtgtaaaaatccatccctttattttataaatcctgattttgccatgaagcggtctctgaactcctcagctgttactgcccagtttatcccttaattccaattccacctaccatgtggttcatctcttgtttatctccccagctagatattaagcccattgagagcagggatgtaacatatgccacttttgatttctctaaaggaccaggtcagtgctaggcacacggtcgatgtttaattaatccttcattaatataacaagtcacctgatgatttagatctttccttcaaaacccacctacagacacacacacacacacacacacacacacacacacttacacactctgatcatttagtctttccctgaatgactccggtggtgaagagctcacttcctcccaaaacagcccttccatcttcagtcaactgctaatgtaatgagctaagatttactgagtgcctactatgttccaggcatggtgctaagcccttta

SEQ ID NO: 27422 - DNA, 601 bp, Homo sapiens
aagtgattttaggttgtttcttttgtgaaagtgtttagcttcaagactagagagggaatatgagtgtacacctactatatataaagttaagatgtacatttacaggaataaccctggtttgagtaactgatctgaaattagtagttccctgtaaatggcagatctttcaggaaaaaaagagaaaggtaagggctctattgaataaactgtggttttatttgtggtataactgatcttggaaataagtatttttaataagaaatgaatgatcatttcttgccagaatttgctaccataaggtgatatggataattctgttacaagaacattaacatttagtatgacttttttactgtattcttgcagttaataactgcagctattatgttaataacaagttgtttacattttatttttgtttatactagtcttaaaacaaagatccaggttctgaataaaaaaaattaattcatacaattgatacatgctggggcttggaactaagaagtagtttcaaaagtacttgggttatggcatttcttatgtttccttatttatgtggttacttagtagttaattttaagatgtcccaatgatcatt

SEQ ID NO: 27423 - DNA, 553 bp, Homo sapiens
aggctgcagtgagctatgatcacaccactgtactccagcctgggcaatagaatgaaaccctgtctcaaaaaagaaaagaaaaaaaaaaagaaagaataaaaaatggctttgtccagtctcttaattatagtatgtgaaatatgtaaaatgtatgaacacaacatacatgattatccaatcactctttaacagcggtactacttttcagttatcataaattccacacttatgtaatatttgtggttgttttaaaagttgacccttaaaaataaatgcccaaatgatcgctgacggagccagactccagcacatacccaattaagtgaagtgtttccctaggtgctggggtaggagcaaacatatttctctagcccctgagagagacaaaggtttatagagtaggtccagatgctgaacataaatgaacgctcaatgcaccatggcatgattaggacaattcatagaccaaaccagcagccaggagtggggcaaaagctcaagtttgcacagataacaaataattgacaaaaatctcattaaacattattgcttg

SEQ ID NO: 27424 - DNA, 530 bp, Homo sapiens
taaaaaaaaggcttttgcaggagatatttcttctctgttaaaacccagaaaaatatcccagcaaagtacaaaataatgagagcagagaaaacaaaagtaagagaatgggaatgaaagagagaaactacattttgcaaggctgtaaactatagggtttgtactggaagcattgctttatagcaatatgtttgataatggttttccttagaaacaatattaactgacttgtagatgactcactcattttgaagaatgaatatgcagtttaaatttaaaagtctcttattcaaaaacagaattactgaggagaaacttaactagcacctaacatctaattagttcaatagctccagtaatatggtatatctgtttcctctcttaaagaaatcccaaatgacaaataatctgacaataaatctttctttaacattttaccacaatttagcaactctgttttgaaattttactatttattttttcaaaaagtttcttattagtaaagaagttcaaaattaagtcactattttgat

SEQ ID NO: 27425 - DNA, 1017 bp, Homo sapiens
acggggagtcatagatgggtctaagactccctgaccaggaagcttgtgatgtggttgacttgatgaaaggaacaagggagcaaaagtagatttgggtgggaaaagaaggagctcagagtaaaacatgttatattttaggtccctgtgggaaaatcaagtgtaagttcttagtaggcagatcaaaaggcagaactggaactcaagagaggacagggtgagaaatttagcattagaatcatctcaaaacgagatataacaggcaccaactgagtcatcattcaaaggtatttcttaacctagagtccactgacccccaaagagtctgtggatagaaatgtactttgatatcatcagcttcttttataatcctgttttgtattttacatactgaaaaccatgattctgagaagagatccatagagttcaccagactgcagaaggggctgtggcacaaacaaaattagaaacccctcagttggagggaagtgagactgggaagggaggtcagtaaaatgattgccacggggcacccagatccttgctgaggttggaaaccgcaaaggtgcagcagcaacaagccacatgggtgggtgttgtctcctgtgagagcaagatgtgataggtaatctttgaagagggctttcctttcctagaattcgtgctgccacaggagtgtttagaaaacggttctacaagttcttgtttcttttctgaggttgtggcctctccattgtttggtcagatttgtagtgcactctatatcctggtggtttgaaaacattgtcagcacaataacttttctttcttcacatgagatttcatacaaaatcccagtgtatggacatggtaggctttgattaaaataggggtgaagggccctgccagctcggccttccgagaggctgtcccacctctccttacttccctatcaggagctgctggaggtcttttgaatgcttctgcctacacaaaatgatgtgaaaatcactgctttaatttaaacacccttctttaaaa

SEQ ID NO: 27426 - DNA, 848 bp, Homo sapiens
aatcctcaagtcccaagatccaatcatattttctgtagggtggaggaggtttcagaccatcctgctctattatatcgaagaccacaatggaagacaaaggcttctaaagtatacgccacagcatatccattgtggagccgccttttgggcctgattttcagatagctgccacaggagttgtccttgatctggataaatccataaaaattgtgaagaaattaaagctaactggttttccatataaaattttcaagaacacttcatttattaagggaatgtttaattctgccttggaagtggccaaatttgaagatgctgtgattcgaactgtcagtgggataagggggcagatcaagagagcactctgagctccagaaggagctttccaggatagctttgaggataagctgcggatgagcgatattgtcttcatgcgaacttggtatcctgtttccatcccagccttctataacccagtaacatctttgttgaaaccagtgggtgagaaagacacctggtcaggaatgtggaccacgggccaactcaggctcgcccatggtgtcagactaaagacaaacaaggactctctgtataaggtactggtcgtgtgtgtgttagtggagatgaagcctgtgctctacagacagggagtcacacagacacttttctataatttcttacatactttgaatgttcaagtataaagtctaatgttaaatttgattgaacaattgtatatttgtgggatattttggaatggaacaccaaaaaatggtaatagtggttctttctggattgaaggaaaacttttcttttttaaaataaattttattttatataaatgaggt

SEQ ID NO: 27427 - DNA, 806 bp, Homo sapiens
aatcctcaagtcccaagatccaatcatattttctgtagggtggaggaggtttcagaccatcctgctctattatatcgaagaccacaatggaagacaaaggcttctaaagtatacgccacagcatatccattgtggagccgccttttgggcctgattttcagatagctgccacaggagttgtccttgatctggataaatccataaaaattgtgaagaaattaaagctaactggttttccatataaaattttcaagaacacttcatttattaagggaatgtttaattctgccttggaagtggccaaatttgaagatgctgtgattcgaactgtcagtgggataagggggcagatcaagagagcactctgagctccagaaggagctttccaggatagctttgaggataagctgcggatgagcgatattgtcttcatgcgaacttggtatcctgtttccatcccagccttctataacccagtaacatctttgttgaaaccagtgggtgagaaagacacctggtcaggaatgtggaccacgggccaactcaggctcgcccatggtgtcagactaaagacaaacaaggactctctgtataagaacatacatatgatagttgagaaagacacatattctgatcatgaagaaataaacacaagttaaatatgactaagcagaaagatggaaggaccaggaacggtgatgctaacttggaaccacgatgcaggctctaaactcctctacaatcatccccccttgtgagaaaaatacgtaagtcacttttaaaataaatagaaacctgaacacaaa

SEQ ID NO: 27428 - DNA, 1090 bp, Homo sapiens
aatcctcaagtcccaagatccaatcatattttctgtagggtggaggaggtttcagaccatcctgctctattatatcgaagaccacaatggaagacaaaggcttctaaagtatacgccacagcatatccattgtggagccgccttttgggcctgattttcagatagctgccacaggagttgtccttgatctggataaatccataaaaattgtgaagaaattaaagctaactggttttccatataaaattttcaagaacacttcatttattaagggaatgtttaattctgccttggaagtggccaaatttgaagatgctgtgattcgaactgtcagtgggataagggggcagatcaagagagcactctgagctccagaaggagctttccaggatagctttgaggataagctgcggatgagcgatattgtcttcatgcgaacttggtatcctgtttccatcccagccttctataacccagtaacatctttgttgaaaccagtgggtgagaaagacacctggtcaggaatgtggaccacgggccaactcaggctcgcccatggtgtcagactaaagacaaacaaggactctctgtataagaacatacatatgatagttgagaaagacacatattctgatcatgaagaaataaacacaagttaaatatgactaagcagaaagatggaaggaccaggaacggtgatgctaacttggaaccacgatgcaggctctaaactcctctacaatcatccccccttgtgagaaaaatacgtaagatctaaggcacatgagatgatatgctttctgtttgagtttctcctttatgttacgcatactgataaaattgttgatgccagttgatctgaaggtcccagcaaggagccgactcacagaagaatgaagttttcacatcatgatgatttaatcttccttgacctgagcaattgacaaccccaattctccagaacctcacccgccacaatccccttaaaaaccctggcccagaacccctcaagcagacagatgtgaagcttgaggattccttcatctctttgcccaatggcattgtgattattaaactctttttctgctgc

SEQ ID NO: 27429 - DNA, 2511 bp, Homo sapiens
gaggcaaagtctactttctggtacctcaaagaaatcattgttcaatcttccataaggaagagattctttaccaggctgtgagccagtgttagataacttgtgaatggatataagttacttttaacaacccctcttacttttttatttgaatcctctgaatacctgtcagtattttaaagttggcaatccaggacattataagtaggatggagcaggagaagaatcctattgaaaggacaaattaaaatagtaaatcctctcctctcccttctgtaggtactagctgccttgatttttttttgtgggtgggggggattttttcattccttattgaacttattttgcacaatagtgtttacaaatcttatacatcttactttgacagaagacttataataccttgtggtcttgagactggttgtctcctttgcctttcttcaaggattttcctttttctttttaccccccagtgaccactctgctctttaggattctagtggcagtattcttgtaacctgttagacgtgggtggatatacctcttcaggatggcctccttgctgtctttattgaagagctgcccacccagagtcttgactctagggcaggctagtgctattgtggtgtcagttgatatttagtttcatttgctgaaccccaaatttgagtgttagttagggagcctccattctgtgggagagtgtggaaaggcactctttttttctccatattagttaacaagaggtgtctttaggccctggatgttaccatctcatttggtcaagcccctgatacctagtttcacatggatgctaacgtggatgtaatatagttgtgacagcctatgcacaaaagcattacctgatcttaaggtttggtattctaaccaaagttgacagactgtgcgtctgtcttaatggatgtcttaggagttggttattctctctttttttttgagacggagtttcgctgttgttgcccaggctggagtgcaatggcgtatctccactcaccacaacctccgcctcctgggttcaagggattctcctgtcttagcctcctgagtagctgtgattacaggcatgcgccaccatgcctggctaatttcatattttttagtagagacaggatttctccatgttggtcaggctggtcttgaactcctgacctcaggtgatctgcccacctcggcctcctaaagtgctgggattacaggcatgagccactgcacctggccggttattctctctttacagatagctatagacatcattttaggaagtgttgcagtctggcatttgtgctattgttcattctctgtgaaggctgttcatagttgctatagcctgtgtttagttttgtgatttcatcaatcccatctttctgtgtgagtaatgcattctaaacatcctaccccactttagaaacggacgtggggaacgcttggtcatttaagccaacaataaatttaggtgaatgtccctaagtgtttactgtttttatccagtcaaggatttgcttttccttgaacatttgttttaaattctggggccaaaatgcaaaggagaagttctattcaaaggcagtagttgaaatctattattttagttagcctacttggcatttactacatcggtcacttctccaggctgccctaaattaggttgatggagtgagacatgccaaacatccacctttgggaccatagcatagttaaaattaaatgtagttggaatagctagcattgcagctacagtagggaactgtagtctagttccctacagaaaacccaaggagtgaagggacaggattttgcctaggcaaaaatctaagactcgtgccctcctggtacatggggttttaagactgaatgtgtaataggagcactgcctttgccaaatcaaatgagtgacaggttaactagaaaatgtgacaatcacatttcctcttagctcaaataattctgtttttccaaagctttagcagcttaattaaatctgttggactgggggaggagagagctgttctctagtggttaacatggtattctttaagaagaaaaaacaaagccaaagaaaactcattatctggcatgttcgccttaaagatggtagtgggtagaatctggagttttcatctcttttcaaagctgcatatctcttatatttggtattggcctctaagtctaatattgcagttggaattcttgctgtattattttttaagcaagtgttaggtgcatttaactgctttcttcatccatgacgacattcccaccatgggggtcttgacaaagcagagtaaaaatatgctgtttacattgtttacttacaagtaaggagcctgaaataacctgtagtttcgaatgcaggccctgatttactggcgttgtcagtttcaattatgaaactgaagtttggtgcctcctctttatcatgttttttcccttgtagcagttgtgtttaatgtcattaaaaagaaataaaagttctttgtcagtgaaaaaaaaaat

SEQ ID NO: 27430 - DNA, 1915 bp, Homo sapiens
gaggcaaagtctactttctggtacctcaaagaaatcattgttcaatcttccataaggaagagattctttaccaggctgtgagccagtgttagataacttgtgaatggatataagttacttttaacaacccctcttacttttttatttgaatcctctgaatacctgtcagtattttaaagttggcaatccaggacattataagtaggatggagcaggagaagaatcctattgaaaggacaaattaaaatagtaaatcctctcctctcccttctgtaggtactagctgccttgatttttttttgtgggtgggggggattttttcattccttattgaacttattttgcacaatagtgtttacaaatcttatacatcttactttgacagaagacttataataccttgtggtcttgagactggttgtctcctttgcctttcttcaagggattctcctgtcttagcctcctgagtagctgtgattacaggcatgcgccaccatgcctggctaatttcatattttttagtagagacaggatttctccatgttggtcaggctggtcttgaactcctgacctcaggtgatctgcccacctcggcctcctaaagtgctgggattacaggcatgagccactgcacctggccggttattctctctttacagatagctatagacatcattttaggaagtgttgcagtctggcatttgtgctattgttcattctctgtgaaggctgttcatagttgctatagcctgtgtttagttttgtgatttcatcaatcccatctttctgtgtgagtaatgcattctaaacatcctaccccactttagaaacggacgtggggaacgcttggtcatttaagccaacaataaatttaggtgaatgtccctaagtgtttactgtttttatccagtcaaggatttgcttttccttgaacatttgttttaaattctggggccaaaatgcaaaggagaagttctattcaaaggcagtagttgaaatctattattttagttagcctacttggcatttactacatcggtcacttctccaggctgccctaaattaggttgatggagtgagacatgccaaacatccacctttgggaccatagcatagttaaaattaaatgtagttggaatagctagcattgcagctacagtagggaactgtagtctagttccctacagaaaacccaaggagtgaagggacaggattttgcctaggcaaaaatctaagactcgtgccctcctggtacatggggttttaagactgaatgtgtaataggagcactgcctttgccaaatcaaatgagtgacaggttaactagaaaatgtgacaatcacatttcctcttagctcaaataattctgtttttccaaagctttagcagcttaattaaatctgttggactgggggaggagagagctgttctctagtggttaacatggtattctttaagaagaaaaaacaaagccaaagaaaactcattatctggcatgttcgccttaaagatggtagtgggtagaatctggagttttcatctcttttcaaagctgcatatctcttatatttggtattggcctctaagtctaatattgcagttggaattcttgctgtattattttttaagcaagtgttaggtgcatttaactgctttcttcatccatgacgacattcccaccatgggggtcttgacaaagcagagtaaaaatatgctgtttacattgtttacttacaagtaaggagcctgaaataacctgtagtttcgaatgcaggccctgatttactggcgttgtcagtttcaattatgaaactgaagtttggtgcctcctctttatcatgttttttcccttgtagcagttgtgtttaatgtcattaaaaagaaataaaagttctttgtcagtgaaaaaaaaaat

SEQ ID NO: 27431 - DNA, 2457 bp, Homo sapiens
gaggcaaagtctactttctggtacctcaaagaaatcattgttcaatcttccataaggaagagattctttaccaggctgtgagccagtgttagataacttgtgaatggatataagttacttttaacaacccctcttacttttttatttgaatcctctgaatacctgtcagtattttaaagttggcaatccaggacattataagtaggatggagcaggagaagaatcctattgaaaggacaaattaaaatagtaaatcctctcctctcccttctgtaggtactagctgccttgatttttttttgtgggtgggggggattttttcattccttattgaacttattttgcacaatagtgtttacaaatcttatacatcttactttgacagaagacttataataccttgtggtcttgagactggttgtctcctttgcctttcttcaaggattttcctttttctttttaccccccagtgaccactctgctctttaggattctagtggcagtattcttgtaacctgttagacgtgggtggatatacctcttcaggatggcctccttgctgtctttattgaagagctgcccacccagagtcttgactctagggcaggctagtgctattgtggtgtcagttgatatttagtttcatttgctgaaccccaaatttgagtgttagttagggagcctccattctgtgggagagtgtggaaaggcactctttttttctccatattagttaacaagaggtgtctttaggccctggatgttaccatctcatttggtcaagcccctgatacctagtttcacatggatgctaacgtggatgtaatatagttgtgacagcctatgcacaaaagcattacctgatcttaaggtttggtattctaaccaaagttgacagactgtgcgtctgtcttaatggatgtcttaggagttggttattctctctttttttttgagacggagtttcgctgttgttgcccaggctggagtgcaatggcgtatctccactcaccacaacctccgcctcctgggttcaagggattctcctgtcttagcctcctgagtagctgtgattacaggcatgcgccaccatgcctggctaatttcatattttttagtagagacaggatttctccatgttggtcaggctggtcttgaactcctgacctcaggtgatctgcccacctcggcctcctaaagtgctgggattacaggcatgagccactgcacctggccggttattctctctttacagatagctatagacatcattttaggaagtgttgcagtctggcatttgtgctattgttcattctctgtgaaggctgttcatagttgctatagcctgtgtttagttttgtgatttcatcaatcccatctttctgtgtgagtaatgcattctaaacatcctaccccactttagaaacggacgtggggaacgcttggtcatttaagccaacaataaatttaggtgaatgtccctaagtgtttactgtttttatccagtcaaggatttgcttttccttgaacatttgttttaaattctggggccaaaatgcaaaggagaagttctattcaaaggcagtagttgaaatctattattttagttagcctacttggcatttactacatcggtcacttctccaggctgccctaaattaggttgatggagtgagacatgccaaacatccacctttgggaccatagcatagttaaaattaaatgtagttggaatagctagcattgcagctacagtagggaactgtagtctagttccctacagaaaacccaaggagtgaagggacaggattttgcctaggcaaaaatctaagactcgtgccctcctggtacatggggttttaagactgaatgtgtaataggagcactgcctttgccaaatcaaatgagtgacaggttaactagaaaatgtgacaatcacatttcctcttagctcaaataattctgtttttccaaagctttagcagcttaattaaatctgttggactgggggaggagagagctgttctctagtggttaacatggtattctttaagaagaaaaaacaaagccaaagattttcatctcttttcaaagctgcatatctcttatatttggtattggcctctaagtctaatattgcagttggaattcttgctgtattattttttaagcaagtgttaggtgcatttaactgctttcttcatccatgacgacattcccaccatgggggtcttgacaaagcagagtaaaaatatgctgtttacattgtttacttacaagtaaggagcctgaaataacctgtagtttcgaatgcaggccctgatttactggcgttgtcagtttcaattatgaaactgaagtttggtgcctcctctttatcatgttttttcccttgtagcagttgtgtttaatgtcattaaaaagaaataaaagttctttgtcagtgaaaaaaaaaat

SEQ ID NO: 27432 - DNA, 1191 bp, Homo sapiens
agaagcagaggagaccaacggaccggacagagacgaggagaggaacaggaagagagaagctgggagaatcgggaacctgggggctagtgacctgcacacagggcaggggcactcggcagttcccagaggccacccctcccaccccagacatccagacatctggaactttgggtgccaagagtccagcttaatgcaggcagcctggcttttgggggctttggtggtcccccagctcttgggctttggccatggggctcggggagcagagagggagtgggagggaggctggggaggtgcccaggaggaggagcgggagagggaggccctgatgctgaagcatctgcaggaagccctaggactgcctgctgggaggggggatgagaatcctgccggaactgttgagggaaaagaggactgggagatggaggaggaccagggggaggaagaggaggaggaagcaacgccaaccccatcctccggccccagcccctctcccacccctgaggacatcgtcacttacatcctgggccgcctggccggcctggacgcaggcctgcaccagctgcacgtccgtctgcacgcgttggacacccgcgtggtcgagctgacccaggggctgcggcagctgcggaacgcggcaggcgacacccgcgatgccgtgcaagccctgcaggaggcgcagggtcgcgccgagcgcgagcacggccgcttggagggctgcctgaaggggctgcgcctgggccacaagtgcttcctgctctcgcgcgacttcgaaggcgcccagcccagcgcctcgccgcatccgctcagcccggaccagcccaacggtggcacgctcgagaactgcgtggcgcaggcctctgacgacggctcctggtgggaccacgactgccagcggcgtctctactacgtctgcgagttccccttctagcggggccggtaccccgcctccctgcccatcccaccacccggcctttccctgcgccgtgcccaccctcctccggaatcgcccttcccttcctggccacgaatggcagcgtcctccccgacccccagtctgggcgcttctgggagggctcttgcggtgccggcactcctccttgttagtgtctttccttgaaggggcgggcaccaggctaggtccggtgccaataaatccttgtggaatctgacttgaggggcaaaaaggca

SEQ ID NO: 27433 - DNA, 1250 bp, Homo sapiens
agaagcagaggagaccaacggaccggacagagacgaggagaggaacaggaagagagaagctgggagaatcgggaacctgggggctagtgacctgcacacagggcaggggcactcggcagttcccagaggccacccctcccaccccagacatccagacatctggaactttgggtgccaagagtccagcttaatgcaggcagcctggcttttgggggctttggtggtcccccagctcttgggctttggccatggggctcggggagcagagagggagtgggagggaggctggggaggtgcccaggaggaggagcgggagagggaggccctgatgctgaagcatctgcaggaagccctaggactgcctgctgggaggggggatgagaatcctgccggaactgttgagggaaaagaggactgggagatggaggaggaccagggggaggaagaggaggaggaagcaacgccaaccccatcctccggccccagcccctctcccacccctgaggacatcgtcacttacatcctgggccgcctggccggcctggacgcaggcctgcaccagctgcacgtccgtctgcacgcgttggacacccgcgtggtcgagctgacccaggggctgcggcagctgcggaacgcggcaggcgacacccgcgatgccgtgcaagccctgcaggaggcgcagggtcgcgccgagcgcgagcacggccgcttggagggctgcctgaaggggctgcgcctgggccacaagtgcttcctgctctcgcgcgacttcgaagctcaggcggcggcgcaggcgcggtgcacggcgcggggcgggagcctggcgcagccggcagaccgccagcagatggaggcgctcactcggtacctgcgcgcggcgctcgctccctacaactggcccgtgtggctgggcgtgcacgatcggcgcgccgagggcctctacctcttcgaaaacggccagcgcgtgtccttcttcgcctggcatcgctcaccccgccccgagctcggcgcccagcccagcgcctcgccgcatccgctcagcccggaccagcccaacggtggcacgctcgagaactgcgtggcgcaggcctctgacgacggctcctggtgggaccacgactgccagcggcgtctctactacgtctgcgagttccccttctagcggggccggtaccccgcctccctgcccatcaggctaggtccggtgccaataaatccttgtggaatctgacttgaggggcaaaaaggca

SEQ ID NO: 27434 - DNA, 1170 bp, Homo sapiens
agaagcagaggagaccaacggaccggacagagacgaggagaggaacaggaagagagaagctgggagaatcgggaacctgggggctagtgacctgcacacagggcaggggcactcggcagttcccagaggccacccctcccaccccagacatccagacatctggaactttgggtgccaagagtccagcttaatgcaggcagcctggcttttgggggctttggtggtcccccagctcttgggctttggccatggggctcggggagcagagagggagtgggagggaggctggggaggtgcccaggaggaggagcgggagagggaggccctgatgctgaagcatctgcaggaagccctaggactgcctgctgggaggggggatgagaatcctgccggaactgttgagggaaaagaggactgggagatggaggaggaccagggggaggaagaggaggaggaagcaacgccaaccccatcctccggccccagcccctctcccacccctgaggacatcgtcacttacatcctgggccgcctggccggcctggacgcaggcctgcaccagctgcacgtccgtctgcacgcgttggacacccgcgtggtcgagctgacccaggggctgcggcagctgcggaacgcggcaggcgacacccgcgatgccgtgcaagccctgcaggaggcgcagggtcgcgccgagcgcgagcacggccgcttggagggctgcctgaaggggctgcgcctgggccacaagtgcttcctgctctcgcgcgacttcgaagctcaggcggcggcgcaggcgcggtgcacggcgcggggcgggagcctggcgcagccggcagaccgccagcagatggaggcgctcactcggtactgccagcggcgtctctactacgtctgcgagttccccttctagcggggccggtaccccgcctccctgcccatcccaccacccggcctttccctgcgccgtgcccaccctcctccggaatcgcccttcccttcctggccacgaatggcagcgtcctccccgacccccagtctgggcgcttctgggagggctcttgcggtgccggcactcctccttgttagtgtctttccttgaaggggcgggcaccaggctaggtccggtgccaataaatccttgtggaatctgacttgaggggcaaaaaggca

SEQ ID NO: 27435 - DNA, 1422 bp, Homo sapiens
agaagcagaggagaccaacggaccggacagagacgaggagaggaacaggaagagagaagctgggagaatcgggaacctgggggctagtgacctgcacacagggcaggggcactcggcagttcccagaggccacccctcccaccccagacatccagacatctggaactttgggtgccaagagtccagcttaatgcaggcagcctggcttttgggggctttggtggtcccccagctcttgggctttggccatggggctcggggagcagagagggagtgggagggaggctggggaggtgcccaggaggaggagcgggagagggaggccctgatgctgaagcatctgcaggaagccctaggactgcctgctgggaggggggatgagaatcctgccggaactgttgagggaaaagaggactgggagatggaggaggaccagggggaggaagaggaggaggaagcaacgccaaccccatcctccggccccagcccctctcccacccctgaggacatcgtcacttacatcctgggccgcctggccggcctggacgcaggcctgcaccagctgcacgtccgtctgcacgcgttggacacccgcgtggtcgagctgacccaggggctgcggcagctgcggaacgcggcaggcgacacccgcgatgccgtgcaagccctgcaggaggcgcagggtcgcgccgagcgcgagcacggccgcttggagggctgcctgaaggggctgcgcctgggccacaagtgcttcctgctctcgcgcgacttcgaagctcaggcggcggcgcaggcgcggtgcacggcgcggggcgggagcctggcgcagccggcagaccgccagcagatggaggcgctcactcggtacctgcgcgcggcgctcgctccctacaactggcccgtgtggctgggcgtgcacgatcggcgcgccgagggcctctacctcttcgaaaacggccagcgcgtgtccttcttcgcctggcatcgctcaccccgccccgagctcggcgcccagcccagcgcctcgccgcatccgctcagcccggaccagcccaacggtggcacgctcgagaactgcgtggcgcaggcctctgacgacggctcctggtgggaccacgactgccagcggcgtctctactacgtctgcgagttccccttctagcggggccggtaccccgcctccctgcccatcccaccacccggcctttccctgcgccgtgcccaccctcctccggaatcgcccttcccttcctggccacgaatggcagcgtcctccccgacccccagtctgggcgcttctgggagggctcttgcggtgccggcactcctccttgttagtgtctttccttgaaggggcgggcaccaggctaggtccggtgccaataaatccttgtggaatctgacttgaggggcaaaaaggca

SEQ ID NO: 27436 - DNA, 1375 bp, Homo sapiens
agaagcagaggagaccaacggaccggacagagacgaggagaggaacaggaagagagaagctgggagaatcgggaacctgggggctagtgacctgcacacagggcaggggcactcggcagttcccagaggccacccctcccaccccagacatccagacatctggaactttgggtgccaagagtccagcttaatgcaggcagcctggcttttgggggctttggtggtcccccagctcttgggctttggccatggggctcggggagcagagagggagtgggagggaggctggggaggtgcccaggaggaggagcgggagagggaggccctgatgctgaagcatctgcaggaagccctaggactgcctgctgggaggggggatgagaatcctgccggaactgttgagggaaaagaggactgggagatggaggaggaccagggggaggaagaggaggaggaagcaacgccaaccccatcctccggccccagcccctctcccacccctgaggacatcgtcacttacatcctgggccgcctggccggcctggacgcaggcctgcaccagctgcacgtccgtctgcacgcgttggacacccgcgtggtcgagctgacccaggggctgcggcagctgcggaacgcggcaggcgacacccgcgatgccgtgcaagccctgcaggaggcgcagggtcgcgccgagcgcgagcacggccgcttggagggctgcctgaaggggctgcgcctgggccacaagtgcttcctgctctcgcgcgacttcgaagctcaggcggcggcgcaggcgcggtgcacggcgcggggcgggagcctggcgcagccggcagaccgccagcagatggaggcgctcactcggtacctgcgcgcggcgctcgctccctacaactggcccgtgtggctgggcgtgcacgatcggcgcgccgagggcctctacctcttcgaaaacggccagcgcgtgtccttcttcgcctggcatcgctcaccccgccccgagctcggcgcccagcccagcgcctcgccgcatccgctcagcccggaccagcccaacggtggcacgctcgagaactgcgtggcgcaggcctctgacgacggctcctggtgggaccacgactgccagcggcgtctctactacgtctgcgagttccccttctagcggggccggtaccccgcctccctgcccatcgcccttcccttcctggccacgaatggcagcgtcctccccgacccccagtctgggcgcttctgggagggctcttgcggtgccggcactcctccttgttagtgtctttccttgaaggggcgggcaccaggctaggtccggtgccaataaatccttgtggaatctgacttgaggggcaaaaaggca

SEQ ID NO: 27437 - DNA, 1043 bp, Homo sapiens
agaagcagaggagaccaacggaccggacagagacgaggagaggaacaggaagagagaagctgggagaatcgggaacctgggggctagtgacctgcacacagggcaggggcactcggcagttcccagaggccacccctcccaccccagacatccagacatctggaactttgggtgccaagagtccagcttaatgcaggcagctgggccgcctggccggcctggacgcaggcctgcaccagctgcacgtccgtctgcacgcgttggacacccgcgtggtcgagctgacccaggggctgcggcagctgcggaacgcggcaggcgacacccgcgatgccgtgcaagccctgcaggaggcgcagggtcgcgccgagcgcgagcacggccgcttggagggctgcctgaaggggctgcgcctgggccacaagtgcttcctgctctcgcgcgacttcgaagctcaggcggcggcgcaggcgcggtgcacggcgcggggcgggagcctggcgcagccggcagaccgccagcagatggaggcgctcactcggtacctgcgcgcggcgctcgctccctacaactggcccgtgtggctgggcgtgcacgatcggcgcgccgagggcctctacctcttcgggcgcccagcccagcgcctcgccgcatccgctcagcccggaccagcccaacggtggcacgctcgagaactgcgtggcgcaggcctctgacgacggctcctggtgggaccacgactgccagcggcgtctctactacgtctgcgagttccccttctagcggggccggtaccccgcctccctgcccatcccaccacccggcctttccctgcgccgtgcccaccctcctccggaatcgcccttcccttcctggccacgaatggcagcgtcctccccgacccccagtctgggcgcttctgggagggctcttgcggtgccggcactcctccttgttagtgtctttccttgaaggggcgggcaccaggctaggtccggtgccaataaatccttgtggaatctgacttgaggggcaaaaaggca

SEQ ID NO: 27438 - DNA, 740 bp, Homo sapiens
tttttgtccaatttgaaaaccagtacgacaaatatgacaaatattaatggatttgtgatttatgccagagaaaataaaaatttgtggattaaactgaaaaaccaacaagggctgtcaataaaagtggcctaatatcctctgaatttctgaaaacttgcccatctttgtatacttcagaaactctcaatgggatgtgcacagtagagtcatctgtaggaatcgttgctataccctgctctagagagtgaatcagaatctcctcagtagtttgattcccaaaaatacttctttaagtttttgagatgttcattctttggctaagaatcattttccctctaatgctacattgaagttaaactgtgaaaattcttacttaattttgtctttttactatcctgaaaatgttttgtacattacttatgaatgttatcctaacatttaagtaagcatctggccgggagcggtggctcatgcctgtaataccagcactttgggaggccaaggcgggaggatcacgaggtcaggagatggagactatcctggccaacacggtgaaaccgcgtctctactaaaaaaatacaaaaaaattagccgggcgtggtggcgggcaccagtagtcccagctactcaggaggctgaggcaggagagtggtgtgaacccgggaggcggagcttgcagtgagccgagatcgcgccactgcactccagcctgggtggcagccagactccgtctcaaaaaa

SEQ ID NO: 27439 - DNA, 3188 bp, Homo sapiens
  misc_feature (30)..(30): n is a, c, g, or t
  misc_feature (154)..(154): n is a, c, g, or t
  misc_feature (170)..(170): n is a, c, g, or t
  misc_feature (411)..(411): n is a, c, g, or t
ggggattgtggaagggtaggggaaggaganttctctctccccaggccactagataaaaggccatgtttgtccacattgggaggctgatgggaagaaaggatgccagaccagttggcctgtccctggggcttgtctcaggacctccaggaagtgnttctgaactgcaggcnctcgtgtgtgtctcccatttgtcaaaactttgacctgatcttttcagaatccaccttgtgaggccccagccttggaagccactgcccattgccagaacacggggagtagagcagtgagcactgagtgggcctgaggctgcctttcttccctggcacacgtcctgaggaggggaggttgtggcggcaccaggcagaagctatgccactgctgcgctgggtctccctccccagaagccctcantcttgatttgctcaagctgttcctgcttatcaacaaacaccttaatttatcaaacacagcaaagctagtgacagctgagaggtccatgtctgggtagaaccaggcccacgatgctgcctctcccgtgttctggagttcagctgcagggattctgctgatgtgcccagcaccatcgttctgtttgtgcttaaatggcacagcatttggtcagcacatctgaaaaggaaggtgtgagaagcaaagcccatggccacgttcccctgccagttatgtggcaagacgttcctcaccctggagaagttcacgattcacaattattcccactccagggagcggccgtacaagtgtgtgcagcctgactgtggcaaagcctttgtttccagatataaattgatgaggcatatggctacccattctccccagaaatctcaccagtgtgctcactgtgagaagacgttcaaccggaaagaccacctgaaaaaccacttccagacccacgaccccaacaaaatggcctttgggtgtgaggagtgtgggaagaagtacaacaccatgctgggctataagaggcacctggccctccatgcggccagcagtggggacctcacctgtggggtctgtgccctggagctagggagcaccgaggtgctactggaccacctcaaagcccatgcggaagagaagccccctagcggaaccaaggaaaagaagcaccagtgcgaccactgtgaaagatgcttctacacccggaaggatgtgcgacgccacctggtggtccacacaggatgcaaggacttcctgtgccagttctgtgcccagagatttgggcgcaaggatcacctcacccggcataccaagaagacccactcacaggagctgatgaaagagagcttgcagaccggagaccttctgagcaccttccacaccatctcgccttcattccaactgaaggctgctgccttgcctcctttccctttaggagcttctgcccagaacgggcttgcaagtagcttgccagctgaggtccatagcctcaccctcagtcccccagaacaagccgcccagcctatgcagccgctgccagagtccctggcctccctccacccctcggtatcccctggctctcctccgccaccccttcccaatcacaagtacaacaccacttctacctcatactccccacttgcaagcctgcccctcaaagcagatactaaaggtttttgcaatatcagtttgtttgaggacttgcctctgcaagagcctcagtcacctcaaaagctcaacccaggttttgatctggctaagggaaatgctggtaaagtaaacctgcccaaggagctgcctgcagatgctgtgaacctaacaatacctgcctctctggacctgtcccccctgttgggcttctggcagctgccccctcctgctacccaaaatacctttgggaatagcactcttgccctggggcctggggaatctttgccccacaggttaagctgtctggggcagcagcagcaagaacccccacttgccatgggcactgtgagcctgggccagctccccctgccccccatccctcatgtgttctcagctggcactggctctgccatcctgcctcatttccatcatgcattcagataattgatttttaaagggtatttttcgtattctggaagatgttttaagaagcattttaaatgtcagttacaatatgagaaagatttggaaaacgagactgggactatggcttattcagtgatgactggcttgagatgataagagaattctcgaactgcatgtattgtgccaatctgtcctgagtgttcatgctttgtaccaaatttaatgaacgcgtgttctgtaatcaaactgcaaatattgtcataaccaacatccaaaatgacggctgctatatataagtgtttgtcatatggaatttaatcgtaagccatgatcataatgttaactaaataactttatgtggcactgcctagtaagggaactatggaaaggtttggatttctccaaatctgggagaattttcaaaataagaaaataacctttatatgatatactatgactaggctgtgtatttcttttcagggatttttctaccttcagggttggatgtagtttagttactattaccatagccaacctgtagttttacatatacattttcttgtggagcaatagagttctccattttacagaagcattttaaatgtagtttgaatattttccacaagatgctgcaatgtgagttatcacttcatttatcttaaagaaagactaaactggttgtcagttacatctgacagaaaaaaaaaaaaaaatcactgtgtaaccagggttaagtggttaaaataatccagggcgtcagtcaaaggcattttgctgactttaatattgattatatttttaacagggaatttaaggaaaatattaccggggaattaaaaaatatatatatattaaaacaagaattttcctttgcccctgtccagcctaaacctacctacctcaaggctgcctaagttcctaagtattgtttgtaatcacccaataaataagtgcatttgtaattcatcagtcattattagcttttattaaaagaagattacgttttacaatgtaactataatctcttgaatttggtatcttattaatgagttttaaagatgtaaaacctaaccttttttaaagctccattgtcttatgtttttagaggcttttccgtaaacatatatcttacatataataaacttttcaaatcttgc

SEQ ID NO: 27440 - DNA, 129 bp, Homo sapiens
agtttcctttaacctggctttcagattaattcaggatttgggtaagctcttagcctcacactgactcaaaaatccaaacaaatatttatggcctagagagcatgtaaagcaaaacacctcactagaggg

SEQ ID NO: 27441 - DNA, 240 bp, Homo sapiens
catctcccactctggctcttcgcaggtccctaggagcccccatggtctcccctcaagcacattagactggttctccttgaagggtcttctgagtctagagtgaagatctctgagctccattcccagccactgccctgagattgtgagggcaatgcctttgtgatcctcagtttgcttaactataaagtggggctagaggaatccctaagatcccctccagctataatactctgtccttta

SEQ ID NO: 27442 - DNA, 383 bp, Homo sapiens
aaaaaaaaaaaaagctgtcaaaagaaaatgactttaaatgagtgtagatgttggagttagcagacaaagacttcaaagtagctattacaaatatgatcaaaagctaaaggaaaccatatttaaaagattaaaaggaaaatttatgacaatgactcaacaaataaggaatatcactgaagaaatagatactaaagaaccaaattgaaattctagtcaaattctctacccctgagccatacacccagtcatccaaactgaaattctagaggagaaaagtccaataagcaaaatgcaaaattcacaagattaattcaacagaagatttgagaacacagacgaatcaaagaacttaagatatatcaatggaaattatccaatttaaa

SEQ ID NO: 27443 - DNA, 1796 bp, Homo sapiens
gaactccgcctcatgcaggatgcccagggctcggaagcagtaaggaggatgctacagaaaggaactgcagaaagaaaaaaagccacatggttaacttttcccctggagggcaaaggggtccggctctcaaaaagaaaagccaggcacagatcccaacaccaagtgtaaggcagcacaaagtgggtctgaaaccccaggaccgggtcaaaggccttccgaaggcccgaggttcttgaggaggaggggaagctgatagggccctggtctttctgcaccagcgtggctctttaaaatacaaaacacccacaaagccaaaaaccctgaaacatgttctttagctaaccccttccctgcccagatgcctgcaattctgagaattcacttcagttttgccagatccaacccctaggcttgagggtggagagccaggcctcctcagggtcccttctaggctcccaggcccaccttaggctttaattgcattggctgtttcttatggtgttagtgaattttgcaaagaaagccctgagcattgcataaatgcttgggggcgtgtcatttaaatggaagttctccaatagtggctgaaggcagagtttactgttatccctccctcttgctggctttgctggagggcttttatcagagagattggaggtgggagagcacttttaaagcacaccccaccccctgcacccgagcggcacctaagcttcccagagaccatgaccttgtatgtggctggaggcctcaggcttagggagcagcctgaagcctttgctgtcaaccctcccaggaaagaagccgggcctcaggctgaggaaaaacagagtttcctctccagagggctcaatgagcagccgggtagtggcctcgggcagtcctcaccagggggacacctccctgctttgcattaactcatcagcaagctcatcgagagctaacgtgggcccagcagtcctgtgcttggaaatgatgccgtcacctccacactcctgctgttccagcctctgcaggtgaagctgcaaggtgagcagaggcaggcgtggggacacactcttcaaggactgcactgccccttctccctcctgagagctctgtgcactgggtttggggatgaggcgccagcctggtcaggggaggtgactgtggtccttctgaccagcttggatctttaaaataatcacaaaaaagctcagcctgagcaggtgggtgcaaggctcaggggcctgtgtttttcatcaatcagttttcttcctgcaagattcttagagctggatgttcacgggatcatggggcatggaggtggtcacgctcagacagtcatgcaccaccctcaatcccaggccctgcagagataggaagaatcccaaccagagggattcttccccaaacgttcccttgtggcccaagagtgagttccggcctgagtgctgttatgactgccggcgtctctccgactgcctctcgcctcagtttaaccatctataggttaggaacaaagaagggcttaggcagccatcgtttccccatttctgtcagagccaagggcttggaggaaagaagggagagggaggttccattcaccgttttctgggttagcgcttgattggatgtttcaagcaagggacaaggtgatggtggctgtaataggctcctcgtgggcaccgtcaccccagaaggcctgggcacccatgagaacctgtggccagcccttttcattggctgagttccctgctgttgtgcgtggtgccattttttttttaaacaacatatataaaaacaaaacaactggt

SEQ ID NO: 27444 - DNA, 3253 bp, Homo sapiens
gaactccgcctcatgcaggatgcccagggctcggaagcagtaaggaggatgctacagaaaggaactgcagaaagaaaaaaagccacatggttaacttttcccctggagggcaaaggggtccggctctcaaaaagaaaagccaggcacagatcccaacaccaagtgtaaggcagcacaaagtgggtctgaaaccccaggaccgggtcaaaggccttccgaaggcccgaggttcttgaggaggaggggaagctgatagggccctggtctttctgcaccagcgtggctctttaaaatacaaaacacccacaaagccaaaaaccctgaaacatgttctttagctaaccccttccctgcccagatgcctgcaattctgagaattcacttcagttttgccagatccaacccctaggcttgagggtggagagccaggcctcctcagggtcccttctaggctcccaggcccaccttaggctttaattgcattggctgtttcttatggtgttagtgaattttgcaaagaaagccctgagcattgcataaatgcttgggggcgtgtcatttaaatggaagttctccaatagtggctgaaggcagagtttactgttatccctccctcttgctggctttgctggagggcttttatcagagagattggaggtgggagagcacttttaaagcacaccccaccccctgcacccgagcggcacctaagcttcccagagaccatgaccttgtatgtggctggaggcctcaggcttagggagcagcctgaagcctttgctgtcaaccctcccaggaaagaagccgggcctcaggctgaggaaaaacagagtttcctctccagagggctcaatgagcagccgggtagtggcctcgggcagtcctcaccagggggacacctccctgctttgcattaactcatcagcaagctcatcgagagctaacgtgggcccagcagtcctgtgcttggaaatgatgccgtcacctccacactcctgctgttccagcctctgcaggtgaagctgcaaggtgagcagaggcaggcgtggggacacactcttcaaggactgcactgccccttctccctcctgagagctctgtgcactgggtttggggatgaggcgccagcctggtcaggggaggtgactgtggtccttctgaccagcttggatctttaaaataatcacaaaaaagctcagcctgagcaggtgggtgcaaggctcaggggcctgtgtttttcatcaatcagttttcttcctgcaagattcttagagctggatgttcacgggatcatggggcatggaggtggtcacgctcagacagtcatgcaccaccctcaatcccaggccctgcagagataggaagaatcccaaccagagggattcttccccaaacgttcccttgtggcccaagagtgagttccggcctgagtgctgttatgactgccggcgtctctccgactgcctctcgcctcagtttaaccatctataggttaggaacaaagaagggcttaggcagccatcgtttccccatttctgtcagagccaagggcttggaggcccagccccatccgggcaagggctgtccgctcctgcccaggcctcacctcctcgctgcagctggcaagattctttctagcagaacagaaacactggcccccaattccactctcccctcctgatgctaccgcagagggcagaaaggtgccctgtagcgtccaccatgtgtgtgtcctgagtttccagtgcaagtcatctggatttgcatttagctagggaaactcggccctcaaaccctctccctctctgcctgaatttgccaaaatgccaaccatccgggcaggtgtggatgccacagtccatccccattgcatttcacccccacatggacagaggcacacactcgcacacattcccagcacctttgactgctgggggatgcaggccagggtctgcctggagcctcagggttgggacttatctccaaaggagcccacaccccctcttccaggatgggcactggctggcagcacttttttccctcatcacatccctgacccctgcccagcccacatgcacatgctgtttcctgtctccagggccctagcctgtggatctcttcctcccatgcactcctagggtgaatgggctcagcaccaaacctggctgtgcccattccccacaaccccagcttggcctcctgtgggaaggagaaggcagacctgcccagaggagaggggcagtgttcccacccacctgctccagcacaggaaccagggaggaaagaagggagagggaggttccattcaccgttttctgggttagcgcttgattggatgtttcaagcaagggacaaggtgatggtggctgtaataggctcctcgtgggcaccgtcaccccagaaggcctgggcacccatgagaacctgtggccagcccttttcattggctgagttccctgctgttgtgcgtggtgccattttttttttaaacaacatatataaaaacaaaacaactggttctgtgtgtatcaacttaatttgcatatgaatgagtgttgtgttgtgatttgcagtgttttgacaccgtgattggctttgtttgggtctctcttctttctgtgaaattaactgctgtgcgttttcactgttcttagagaagaccctgagctcctggggttttcttgtctcacttctaccctgacctgctgggagcccaccccaccccagtccagccatgagggtatttccagcctattccaatgactgaaacccttcttggaagaaaacgtctaatgtcggggacgtagggacgcttccagacttgccctggccggaaccctgcagcctggggccccagcccgcctgcagctcagctttccccaacaccctcaggacccagccccagccccggcagaccttccctgggagctgcttaggtggtctccacagcgccctctaggggccaagcagggttccagattctccagccttctgccagctttaaaacccttcactcaagcagcattactgtacatgcaatgaaaaatactatatatgacagtcaaaacctgtgtacatatttccatgtacatatttatacatacacacaccttcctattataaatatataaagcatgacatctctttggcattccaagtttgtgtttttttaaatccttggaaatacggctttggaaacctttttcttcctttccctcttttctatgttgtaataaacattcatgtgaccttt

SEQ ID NO: 27445 - DNA, 3151 bp, Homo sapiens
gaactccgcctcatgcaggatgcccagggctcggaagcagtaaggaggatgctacagaaaggaactgcagaaagaaaaaaagccacatggttaacttttcccctggagggcaaaggggtccggctctcaaaaagaaaagccaggcacagatcccaacaccaagtgtaaggcagcacaaagtgggtctgaaaccccaggaccgggtcaaaggccttccgaaggcccgaggttcttgaggaggaggggaagctgatagggccctggtctttctgcaccagcgtggctctttaaaatacaaaacacccacaaagccaaaaaccctgaaacatgttctttagctaaccccttccctgcccagatgcctgcaattctgagaattcacttcagttttgccagatccaacccctaggcttgagggtggagagccaggcctcctcagggtcccttctaggctcccaggcccaccttaggctttaattgcattggctgtttcttatggtgttagtgaattttgcaaagaaagccctgagcattgcataaatgcttgggggcgtgtcatttaaatggaagttctccaatagtggctgaaggcagagtttactgttatccctccctcttgctggctttgctggagggcttttatcagagagattggaggtgggagagcacttttaaagcacaccccaccccctgcacccgagcggcacctaagcttcccagagaccatgaccttgtatgtggctggaggcctcaggcttagggagcagcctgaagcctttgctgtcaaccctcccaggaaagaagccgggcctcaggctgaggaaaaacagagtttcctctccagagggctcaatgagcagccgggtagtggcctcgggcagtcctcaccagggggacacctccctgctttgcattaactcatcagcaagctcatcgagagctaacgtgggcccagcagtcctgtgcttggaaatgatgccgtcacctccacactcctgctgttccagcctctgcaggtgaagctgcaaggtgagcagaggcaggcgtggggacacactcttcaaggactgcactgccccttctccctcctgagagctctgtgcactgggtttggggatgaggcgccagcctggtcaggggaggtgactgtggtccttctgaccagcttggatctttaaaataatcacaaaaaagctcagcctgagcaggtgggtgcaaggctcaggggcctgtgtttttcatcaatcagttttcttcctgcaagattcttagagctggatgttcacgggatcatggggcatggaggtggtcacgctcagacagtcatgcaccaccctcaatcccaggccctgcagagataggaagaatcccaaccagagggattcttccccaaacgttcccttgtggcccaagagtgagttccggcctgagtgctgttatgactgccggcgtctctccgactgcctctcgcctcagtttaaccatctataggttaggaacaaagaagggcttaggcagccatcgtttccccatttctgtcagagccaagggcttggaggcccagccccatccgggcaagggctgtccgctcctgcccaggcctcacctcctcgctgcagctggcaagattctttctagcagaacagaaacactggcccccaattccactctcccctcctgatgctaccgcagagggcagaaaggtgccctgtagcgtccaccatgtgtgtgtcctgagtttccagtgcaagtcatctggatttgcatttagctagggaaactcggccctcaaaccctctccctctctgcctgaatttgccaaaatgccaaccatccgggcaggtgtggatgccacagtccatccccattgcatttcacccccacatggacagaggcacacactcgcacacattcccagcacctttgactgctgggggatgcaggccagggtctgcctggagcctcagggttgggacttatctccaaaggagcccacaccccctcttccaggatgggcactggctggcagcacttttttccctcatcacatccctgacccctgcccagcccacatgcacatgctgtttcctgtctccagggccctagcctgtggatctcttcctcccatgcactcctagggtgaatgggctcagcaccaaacctggctgtgcccattccccacaaccccagcttggcctcctgtgggaaggagaaggcagacctgcccagaggagaggggcagtgttcccacccacctgctccagcacaggaaccagggaggaaagaagggagagggaggttccattcaccgttttctgggttagcgcttgattggatgtttcaagcaagggacaaggtgatggtggctgtaataggctcctcgtgggcaccgtcaccccagaaggcctgggcacccatgagaacctgtggccagcccttttcattggctgagttccctgctgttgtgcgtggtgccattttttttttaaacaacatatataaaaacaaaacaactggttctgtgtgtatcaacttaatttgcatatgaatgagtgttgtgttgtgatttgcagtgttttgacaccgtgattggctttgtttgggtctctcttctttctgtgaaattaactgctgtgcgttttcactgttcttagagaagaccctgagctcctggggttttcttgtctcacttctaccctgacctgctgggagcccaccccaccccagtccagccatgagggtatttccagcctattccaatgactgaaacccttcttggaagaaaacgtctaatgtcggggacgtagggacgcttccagacttgccctggccggaaccctgcagcctggggccccagcccgcctgcagctcagctttccccaacaccctcaggacccagccccagccccggcagaccttccctgggagctgcttaggtggtctccacagcgccctctaggggccaagcagggttccagattctccagccttctgccagctttaaaacccttcactcaagcagcattactgtacatgcaatgaaaaatactatatatgacagtcaaaacctgtgtacatatttccatgtacatatttatacatacacacaccttcctattataaatatataaagcatgacatctctttggca

SEQ ID NO: 27446 - DNA, 2518 bp, Homo sapiens
gaactccgcctcatgcaggatgcccagggctcggaagcagtaaggaggatgctacagaaaggaactgcagaaagaaaaaaagccacatggttaacttttcccctggagggcaaaggggtccggctctcaaaaagaaaagccaggcacagatcccaacaccaagtgtaaggcagcacaaagtgggtctgaaaccccaggaccgggtcaaaggccttccgaaggcccgaggttcttgaggaggaggggaagctgatagggccctggtctttctgcaccagcgtggctctttaaaatacaaaacacccacaaagccaaaaaccctgaaacatgttctttagctaaccccttccctgcccagatgcctgcaattctgagaattcacttcagttttgccagatccaacccctaggcttgagggtggagagccaggcctcctcagggtcccttctaggctcccaggcccaccttaggctttaattgcattggctgtttcttatggtgttagtgaattttgcaaagaaagccctgagcattgcataaatgcttgggggcgtgtcatttaaatggaagttctccaatagtggctgaaggcagagtttactgttatccctccctcttgctggctttgctggagggcttttatcagagagattggaggtgggagagcacttttaaagcacaccccaccccctgcacccgagcggcacctaagcttcccagagaccatgaccttgtatgtggctggaggcctcaggcttagggagcagcctgaagcctttgctgtcaaccctcccaggaaagaagccgggcctcaggctgaggaaaaacagagtttcctctccagagggctcaatgagcagccgggtagtggcctcgggcagtcctcaccagggggacacctccctgctttgcattaactcatcagcaagctcatcgagagctaacgtgggcccagcagtcctgtgcttggaaatgatgccgtcacctccacactcctgctgttccagcctctgcaggtgaagctgcaaggtgagcagaggcaggcgtggggacacactcttcaaggactgcactgccccttctccctcctgagagctctgtgcactgggtttggggatgaggcgccagcctggtcaggggaggtgactgtggtccttctgaccagcttggatctttaaaataatcacaaaaaagctcagcctgagcaggtgggtgcaaggctcaggggcctgtgtttttcatcaatcagttttcttcctgcaagattcttagagctggatgttcacgggatcatggggcatggaggtggtcacgctcagacagtcatgcaccaccctcaatcccaggccctgcagagataggaagaatcccaaccagagggattcttccccaaacgttcccttgtggcccaagagtgagttccggcctgagtgctgttatgactgccggcgtctctccgactgcctctcgcctcagtttaaccatctataggttaggaacaaagaagggcttaggcagccatcgtttccccatttctgtcagagccaagggcttggaggcccagccccatccgggcaagggctgtccgctcctgcccaggcctcacctcctcgctgcagctggcaagattctttctagcagaacagaaacactggcccccaattccactctcccctcctgatgctaccgcagagggcagaaaggtgccctgtagcgtccaccatgtgtgtgtcctgagtttccagtgcaagtcatctggatttgcatttagctagggaaactcggccctcaaaccctctccctctctgcctgaatttgccaaaatgccaaccatccgggcaggtgtggatgccacagtccatccccattgcatttcacccccacatggacagaggcacacactcgcacacattcccagcacctttgactgctgggggatgcaggccagggtctgcctggagcctcagggttgggacttatctccaaaggagcccacaccccctcttccaggatgggcactggctggcagcacttttttccctcatcacatccctgacccctgcccagcccacatgcacatgctgtttcctgtctccagggccctagcctgtggatctcttcctcccatgcactcctagggtgaatgggctcagcaccaaacctggctgtgcccattccccacaaccccagcttggcctcctgtgggaaggagaaggcagacctgcccagaggagaggggcagtgttcccacccacctgctccagcacaggaaccagggaggaaagaagggagagggaggttccattcaccgttttctgggttagcgcttgattggatgtttcaagcaagggacaaggtgatggtggctgtaataggctcctcgtgggcaccgtcaccccagaaggcctgggcacccatgagaacctgtggccagcccttttcattggctgagttccctgctgttgtgcgtggtgccattttttttttaaacaacatatataaaaacaaaacaactggt

SEQ ID NO: 27447 - DNA, 3095 bp, Homo sapiens
gaactccgcctcatgcaggatgcccagggctcggaagcagtaaggaggatgctacagaaaggaactgcagaaagaaaaaaagccacatggttaacttttcccctggagggcaaaggggtccggctctcaaaaagaaaagccaggcacagatcccaacaccaagtgtaaggcagcacaaagtgggtctgaaaccccaggaccgggtcaaaggccttccgaaggcccgaggttcttgaggaggaggggaagctgatagggccctggtctttctgcaccagcgtggctctttaaaatacaaaacacccacaaagccaaaaaccctgaaacatgttctttagctaaccccttccctgcccagatgcctgcaattctgagaattcacttcagttttgccagatccaacccctaggcttgagggtggagagccaggcctcctcagggtcccttctaggctcccaggcccaccttaggctttaattgcattggctgtttcttatggtgttagtgaattttgcaaagaaagccctgagcattgcataaatgcttgggggcgtgtcatttaaatggaagttctccaatagtggctgaaggcagagtttactgttatccctccctcttgctggctttgctggagggcttttatcagagagattggaggtgggagagcacttttaaagcacaccccaccccctgcacccgagcggcacctaagcttcccagagaccatgaccttgtatgtggctggaggcctcaggcttagggagcagcctgaagcctttgctgtcaaccctcccaggaaagaagccgggcctcaggctgaggaaaaacagagtttcctctccagagggctcaatgagcagccgggtagtggcctcgggcagtcctcaccagggggacacctccctgctttgcattaactcatcagcaagctcatcgagagctaacgtgggcccagcagtcctgtgcttggaaatgatgccgtcacctccacactcctgctgttccagcctctgcaggtgaagctgcaaggtgagcagaggcaggcgtggggacacactcttcaaggactgcactgccccttctccctcctgagagctctgtgcactgggtttggggatgaggcgccagcctggtcaggggaggtgactgtggtccttctgaccagcttggatctttaaaataatcacaaaaaagctcagcctgagcaggtgggtgcaaggctcaggggcctgtgtttttcatcaatcagttttcttcctgcaagattcttagagctggatgttcacgggatcatggggcatggaggtggtcacgctcagacagtcatgcaccaccctcaatcccaggccctgcagagataggaagaatcccaaccagagggattcttccccaaacgttcccttgtggcccaagagtgagttccggcctgagtgctgttatgactgccggcgtctctccgactgcctctcgcctcagtttaaccatctataggttaggaacaaagaagggcttaggcagccatcgtttccccatttctgtcagagccaagggcttggaggcccagccccatccgggcaagggctgtccgctcctgcccaggcctcacctcctcgctgcagctggcaagattctttctagcagaacagaaacactggcccccaattccactctcccctcctgatgctaccgcagagggcagaaaggtgccctgtagcgtccaccatgtgtgtgtcctgagtttccagtgcaagtcatctggatttgcatttagctagggaaactcggccctcaaaccctctccctctctgcctgaatttgccaaaatgccaaccatccgggcaggtgtggatgccacagtccatccccattgcatttcacccccacatggacagaggcacacactcgcacacattcccagcacctttgactgctgggggatgcaggccagggtctgcctggagcctcagggttgggacttatctccaaaggagcccacaccccctcttccaggatgggcactggctggcagcacttttttccctcatcacatccctgacccctgcccagcccacatgcacatgctgtttcctgtctccagggccctagcctgtggatctcttcctcccatgcactcctagggtgaatgggctcagcaccaaacctggctgtgcccattccccacaaccccagcttggcctcctgtgggaaggagaaggcagacctgcccagaggagaggggcagtgttcccacccacctgctccagcacaggaaccagggaggaaagaagggagagggaggttccattcaccgttttctgggttagcgcttgattggatgtttcaagcaagggacaaggtgatggtggctgtaataggctcctcgtgggcaccgtcaccccagaaggcctgggcacccatgagaacctgtggccagcccttttcattggctgagttccctgctgttgtgcgtggtgccattttttttttaaacaacatatataaaaacaaaacaactggttctgtgtgtatcaacttaatttgcatatgaatgagtgttgtgttgtgatttgcagtgttttgacaccgtgattggctttgtttgggtctctcttctttctgtgaaattaactgctgtgcgttttcactgttcttagagaagaccctgagctcctggggttttcttgtctcacttctaccctgacctgctgggagcccaccccaccccagtccagccatgagggtatttccagcctattccaatgactgaaacccttcttggaagaaaacgtctaatgtcggggacgtagggacgcttccagaattctccagccttctgccagctttaaaacccttcactcaagcagcattactgtacatgcaatgaaaaatactatatatgacagtcaaaacctgtgtacatatttccatgtacatatttatacatacacacaccttcctattataaatatataaagcatgacatctctttggcattccaagtttgtgtttttttaaatccttggaaatacggctttggaaacctttttcttcctttccctcttttctatgttgtaataaacattcatgtgaccttt

SEQ ID NO: 27448 - DNA, 424 bp, Homo sapiens
aggatcataggatagggaatggtgactttccaaaggagaacttaaccactttaagaaaaccacagctctccaggctctcccaggtaaccaaagtttataatggcactgctctccccaactccctgtcccttgactgagtattgaacgtaaccgtataattgagctcctgcgtgtagcaggtggcatgggtgccagacccttccaccccacactcacccccagcatctgtgatttaatcacagcagagcttttctttctctggcatgtgttctcccaagtctgaagcccagactgtaagtggcagccgtgcagaacgtagctgcctcagggcttcccttgcctccttggctgagtgaagctgagctgccagggttcaggttggttgaacacattcagagagagtgtgtgtgtctgtctgtctgtc

SEQ ID NO: 27449 - DNA, 290 bp, Homo sapiens
atcattttattcaaaagtacacgtactcccaaattccagtgactttaggaacattgctgaggccaagagggagggcagggaagggtaactcatgtgttgtatgacccccgttgtgctcaaaaggccttctattttttttccttcctacattttccgtttgcgcttcatgttctccttcccagaccccccagccgctgcatagtctcctctcttcttcagaataactgctccctgatgagaaatctcaactcaagctgaattacccaagcaggcttattaagctattttcc

SEQ ID NO: 27450 - DNA, 396 bp, Homo sapiens
gctattgtaattttcaccatttacaatgccaagttttgtttcagaaataatgcagcaatatccaacttgtagaaaatgtatgttagtgcattttattagttgctgtagggtaaaaacattaaatacaaaaaagtagagatgagaatgttgattatatgtatcaattatatataatatgtaaatttgaagatctaatccttaccaaaagatttcaggtagtctcattaaaacagtaaggaattatgtagggcagtattatagtaatactagaaaatcactcatgtggctaggtgctgtggctcatgcctgtaatcccagcactttgggaggccgaggcaggcgaatcacgaggtcaggagttcgagaccagcctgaccaatatggtgatgccctgtc

SEQ ID NO: 27451 - DNA, 172 bp, Homo sapiens
gggacctccaccattcaggacaagcagtgctctaattatttgctagagctgatcggaaatctgggcttaaggcaccatctggtagtgaaaaagagatgacctagtaagaaattaaaaaaaaagaaagaaagccaacaagtaaattaaaaggaatgtctaaccaaatatagac

SEQ ID NO: 27452 - DNA, 3928 bp, Homo sapiens
  misc_feature (1)..(8): n is a, c, g, or t
  misc_feature (16)..(16): n is a, c, g, or t
  misc_feature (2425)..(2425): n is a, c, g, or t
  misc_feature (2496)..(2496): n is a, c, g, or t
  misc_feature (3922)..(3922): n is a, c, g, or t
nnnnnnnngaaggatntgcgccgaaagcctcgggcggccttttgaggggctcgggctagcttcagcgccgtggggtctgacctggctggatatagtgtaccggcccggcaggaggggcggcccggtccgggttgcgcctcctggagccgcccccgggacgtcagtcctggaggaggcgagggttgctccggttgctaagaagactatgaacaagtcagagaacctgctgtttgctggttcatcattagcatcacaagtccatgctgctgccgttaatggagataagggtgctctacagaggctcatcgtaggaaactctgctcttaaagacaaagaagatcagtttgggagaacaccacttatgtattgcgtgttggctgacagattggattgtgcagatgctcttctgaaggcaggagcagatgtgaataaaactgaccatagccagagaacagccctccatcttgcagcccagaagggaaattatcgtttcatgaaactcttacttacacgcagagcaaactggatgcaaaaggatctggaagagatgactcctttgcacttgaccacccggcacaggagccctaagtgtttggcacttctgctgaagtttatggcaccaggagaagtggatacacaggataaaaacaagcaaacagctctgcattggagtgcctactacaataaccctgagcatgtgaagctgctcatcaagcatgattctaacattgggattcctgatgttgaaggcaagatcccacttcactgggcagccaaccataaagatccaagtgctgttcacacagtgagatgcattctggatgctgctccaacagagtctttactgaactggcaagactacgagggtcgaactcctcttcactttgcagttgctgatgggaatgtgaccgtggttgatgtcttgacctcatatgaaagctgcaatataacgtcttatgataacttatttcgaaccccactgcactgggcagctttattaggccatgcacagattgtccatctccttttagaaagaaataagtctggaactatcccatctgacagccaaggagccacacctttgcactatgctgctcagagtaactttgctgaaacggttaaagtgtttttaaaacatccttcagtgaaagatgattcagacctggaaggaagaacatcctttatgtgggcagctggcaaaggcagtgatgatgtccttagaactatgctgagcttaaaatcggacatagatattaacatggctgacaaatatggaggtacagctttgcatgctgctgctctttctggccatgtcagcaccgtgaagttattactggaaaataatgctcaagtagatgctactgatgttatgaaacatactccacttttccgagcctgtgagatgggacacaaagatgtgattcagacactcattaaaggtggagcaagggtagatctagttgaccaagatggacattctcttctacattgggcagcactgggaggaaatgctgatgtttgccagatattaatagaaaataagatcaatccaaatgtccaggattatgcaggaagaacccctttgcagtgtgcagcatatggaggctatatcaactgcatggcagttctcatggaaaacaatgcagaccctaacattcaagacaaagagggaagaacagctttgcattggtcctgcaacaatggataccttgatgccattaaattactgctagactttgctgctttccctaatcagatggaaaacaatgaagagagatacacaccccttgattatgctttgcttggtgagcgccatgaagtgatccagttcatgttggagcacggtgccctgtccatcgcagccatacaagacatcgccgccttcaaaatccaagctgtctacaaagggtacaaggtcagaaaagccttccgagacaggaaaaatctcctcatgaagcatgaacagttgagaaaagatgctgctgccaaaaagcgagaggaagaaaacaaacgaaaagaggcagaacagcaaaaaggaaggcggagcccagattcctgcagaccccaggcccttccctgtctgcctagcacccaggatgtgcccagcaggcagagccgggcccccagcaagcagcctcctgctggcaacgtggcccaaggccctgagccaagagacagcagaggatctccaggagggtctctaggcggagccctccagaaggagcagcatgtttcctcagatttgcagggaacaaactccagaaggccaaatgaaacagccagagaacattctaaaggccaatctgcttgtgtccacttcagacccaatgaaggcagtgatggaagcaggcatccaggagttccctctgttgagaagtccagaggtgagacagctggcgatgagcggtgtgcaaaggggaaaggnttcgtgaagcagccctcctgtatcagggtggctgggcctgatgagaaaggagaggactccaggcgggcagntgcaagccttccaccgcacgatagccactggaagcccagcaggcggcatgacacagaacccaaggccaaatgtgccccccagaaaaggcgcactcaagagctcagaggaggaaggtgctctccggctggttctagccgccctggcagtgcccggggggaggcggtccatgctgggcagaatcctccccaccatcgtacaccaagaaacaaagtgacacaagccaagctcacaggagggctctattcacatttgccacagagcacagaggagttgaggtcaggagctaggaggctggagacatctaccctgtccgaggactttcaggtatctaaggagactgatccagcacctggtcccctctctgggcagagtgtgaatattgaccttctccccgtagagctccgactgcagataattcagagagaacgaaggaggaaggagctgtttcgcaaaaagaacaaggcagcagcagtcatccagcgcgcctggcgaagctaccagctcaggaagcacctgtcccaccttcggcatatgaagcagcttggagctggagatgtggacagatggaggcaagagtctacagcattgctcctccaggtttggaggaaggaactggaactaaaattcccccaaaccactgcagtaagcaaggcccccaagagtccatccaagggcacctcaggcacaaagtccaccaagcactcagtgcttaagcaaatctatggttgttctcacgaagggaaaatacatcatcctacaagatctgtaaaagcctcttctgtgctgcgtctcaactcagtgagcaacctacagtgtatacatctccttgagaacagtggaagatcaaagaacttttcttataacctgcaatcagctactcagccaaaaaacaaaacaaaaccttgactgcctatggaggaagactgtgttcgggggagctggcatagctagtgcagagttcagattttctgctgataatcttttacaccttgggaaaactttaatatccgtacctgaaggctgattcacctaaaaatgtgttaactgaaagaaaatgtcagaatgtttcctttctgctcttacacagcattgttttgtcaatcaacacagcctgcactgaaaggacctgcatagactatgtctgtgcaaagtgcctgagtgtctgctttcacctcagtctgtacagttggaaatgagaattcataattaacagcaaaatctaaggaaaactaccgctgctgggttgggatttctgccagctagcctggtactggcttcttgtttcaagagatgaacctaaatgagataggaagcctgtcccatagcagccttcctctcactactttcctggcatctaatgcaacaaacttatcacactcactcacccaccacattaacaacataaaaccctcattcacacgaganaacacc

SEQ ID NO: 27453 - DNA, 3529 bp, Homo sapiens
  misc_feature (1)..(8): n is a, c, g, or t
  misc_feature (16)..(16): n is a, c, g, or t
  misc_feature (3523)..(3523): n is a, c, g, or t
nnnnnnnngaaggatntgcgccgaaagcctcgggcggccttttgaggggctcgggctagcttcagcgccgtggggtctgacctggctggatatagtgtaccggcccggcaggaggggcggcccggtccgggttgcgcctcctggagccgcccccgggacgtcagtcctggaggaggcgagggagtagaagaccaccaggctgcctaagaaggaatgaactggtccacgtcaaaactcctatgctgatcgtagtgggattgcacctatgaatagccactgccctccagcctaggttgctccggttgctaagaagactatgaacaagtcagagaacctgctgtttgctggttcatcattagcatcacaagtccatgctgctgccgttaatggagataagggtgctctacagaggctcatcgtaggaaactctgctcttaaagacaaagaagatcagtttgggagaacaccacttatgtattgcgtgttggctgacagattggattgtgcagatgctcttctgaaggcaggagcagatgtgaataaaactgaccatagccagagaacagccctccatcttgcagcccagaagggaaattatcgtttcatgaaactcttacttacacgcagagcaaactggatgcaaaaggatctggaagagatgactcctttgcacttgaccacccggcacaggagccctaagtgtttggcacttctgctgaagtttatggcaccaggagaagtggatacacaggataaaaacaagcaaacagctctgcattggagtgcctactacaataaccctgagcatgtgaagctgctcatcaagcatgattctaacattgggattcctgatgttgaaggcaagatcccacttcactgggcagccaaccataaagatccaagtgctgttcacacagtgagatgcattctggatgctgctccaacagagtctttactgaactggcaagactacgagggtcgaactcctcttcactttgcagttgctgatgggaatgtgaccgtggttgatgtcttgacctcatatgaaagctgcaatataacgtcttatgataacttatttcgaaccccactgcactgggcagctttattaggccatgcacagattgtccatctccttttagaaagaaataagtctggaactatcccatctgacagccaaggagccacacctttgcactatgctgctcagagtaactttgctgaaacggttaaagtgtttttaaaacatccttcagtgaaagatgattcagacctggaaggaagaacatcctttatgtgggcagctggcaaaggcagtgatgatgtccttagaactatgctgagcttaaaatcggacatagatattaacatggctgacaaatatggaggtacagctttgcatgctgctgctctttctggccatgtcagcaccgtgaagttattactggaaaataatgctcaagtagatgctactgatgttatgaaacatactccacttttccgagcctgtgagatgggacacaaagatgtgattcagacactcattaaaggtggagcaagggtagatctagttgaccaagatggacattctcttctacattgggcagcactgggaggaaatgctgatgtttgccagatattaatagaaaataagatcaatccaaatgtccaggattatgcaggaagaacccctttgcagtgtgcagcatatggaggctatatcaactgcatggcagttctcatggaaaacaatgcagaccctaacattcaagacaaagagggaagaacagctttgcattggtcctgcaacaatggataccttgatgccattaaattactgctagactttgctgctttccctaatcagatggaaaacaatgaagagagatacacaccccttgattatgctttgcttggtgagcgccatgaagtgatccagttcatgttggagcacggtgccctgtccatcgcagccatacaagacatcgccgccttcaaaatccaagctgtctacaaagggtacaaggtcagaaaagccttccgagacaggaaaaatctcctcatgaagcatgaacagttgagaaaagatgctgctgccaaaaagcgagaggaagaaaacaaacgaaaagaggcagaacagcaaaaaggaaggcggagcccagattcctgcagaccccaggcccttccctgtctgcctagcacccaggatgtgcccagcaggcagagccgggcccccagcaagcagcctcctgctggcaacgtggcccaaggccctgagccaagagacagcagaggatctccaggagggtctctaggcggagccctccagaaggagcagcatgtttcctcagatttgcagggaacaaactccagaaggccaaatgaaacagccagagaacattctaaaggccaatctgcttgtgtccacttcagacccaatgaaggcagtgatggaagcaggcatccaggagttccctctgttgagaagtccagagagctccgactgcagataattcagagagaacgaaggaggaaggagctgtttcgcaaaaagaacaaggcagcagcagtcatccagcgcgcctggcgaagctaccagctcaggaagcacctgtcccaccttcggcatatgaagcagcttggagctggagatgtggacagatggaggcaagagtctacagcattgctcctccaggtttggaggaaggaactggaactaaaattcccccaaaccactgcagtaagcaaggcccccaagagtccatccaagggcacctcaggcacaaagtccaccaagcactcagtgcttaagcaaatctatggttgttctcacgaagggaaaatacatcatcctacaagatctgtaaaagcctcttctgtgctgcgtctcaactcagtgagcaacctacagtgtatacatctccttgagaacagtggaagatcaaagaacttttcttataacctgcaatcagctactcagccaaaaaacaaaacaaaaccttgactgcctatggaggaagactgtgttcgggggagctggcatagctagtgcagagttcagattttctgctgataatcttttacaccttgggaaaactttaatatccgtacctgaaggctgattcacctaaaaatgtgttaactgaaagaaaatgtcagaatgtttcctttctgctcttacacagcattgttttgtcaatcaacacagcctgcactgaaaggacctgcatagactatgtctgtgcaaagtgcctgagtgtctgctttcacctcagtctgtacagttggaaatgagaattcataattaacagcaaaatctaaggaaaactaccgctgctgggttgggatttctgccagctagcctggtactggcttcttgtttcaagagatgaacctaaatgagataggaagcctgtcccatagcagccttcctctcactactttcctggcatctaatgcaacaaacttatcacactcactcacccaccacattaacaacataaaaccctcattcacacgaganaacacc

SEQ ID NO: 27454 - DNA, 391 bp, Homo sapiens
cactttcataactaggcatcaattctggccataatggcttattttaaactaatttgcctgtcaaaaaaatctgtaaaaactgaataaaatactatatacattgtttgaaggcattgagaacaatcagcacaggcaggatctaagagactacaatcattcaaagaagagaaacacgtaaagtgagtaccacattcatcctggccttttcctttatgacattttccaaactggaatgcaaaagaatacaaccctaacaggaagcagcagccttaccaggctgaagaaactgaggcagagtttggagataatagtggctggaacttgaaagtcaaaatcctggagaggagggaattgcagagaaagaatgcaagaatctggatacaaattcctc

SEQ ID NO: 27455 - DNA, 496 bp, Homo sapiens
aagtgcctgctctctcttaatcaagtctcccttgaagagatgtcccatatcttgagactgcaggaaatataaagctattatattaagtcatcctgcctctacagtaaactggcccatcatcccagggatagcctaaaccgaaatccttcttcctcaacaccaatgaactattcccttcagccttaaaattaataaccttaatatctatctggtatttgtttttaacagtgagcaacctacagtgtatacatctccttgagaacagtggaagatcaaagaacttttcttataacctgcaatcagctactcagccaaaaaacaaaacaaaaccttgactgcctatggaggaagactgtgttcgggggagctggcatagctagtgcagagttcagattttctgctgataatcttttacaccttgggaaaactttaatatccgtacctgaaggctgattcacctaaaaatgtgttaactgaaagaaaatgtcagaatgtt

SEQ ID NO: 27456 - DNA, 444 bp, Homo sapiens
agatacattatggaggcagaagtgttcattcaacaagcgtttgttaaatatctactatgtaatcatgattatacaactagagagaatatgaaaaaaatgaattacgtatgttagcttatagatggatgctctcagtacccatccctattaatcgtcatttccctttgtttagtgaaccttctgatatattggatatcaaatatcctttccaagtattgtctgtcccacttaattctggtatccatgaatgcagaagtgtgctatttatgtaatcatgaacactcatgtatatgtgtataccttcattcattcaacatgtgttaaaactattatgtaacaggcatcatgttaggccttggaacacaaaggtgaacaacatgattcctgctcttaagttgcttacaaagatcatggatgaagatattaaatgataattaaagctga

SEQ ID NO: 27457 - DNA, 1704 bp, Homo sapiens
  misc_feature (1)..(8): n is a, c, g, or t
  misc_feature (16)..(16): n is a, c, g, or t
nnnnnnnngaaggatntgcgccgaaagcctcgggcggccttttgaggggctcgggctagcttcagcgccgtggggtctgacctggctggatatagtgtaccggcccggcaggaggggcggcccggtccgggttgcgcctcctggagccgcccccgggacgtcagtcctggaggaggcgagggttgctccggttgctaagaagactatgaacaagtcagagaacctgctgtttgctggttcatcattagcatcacaagtccatgctgctgccgttaatggagataagggtgctctacagaggctcatcgtaggaaactctgctcttaaagacaaagaagatcagtttgggagaacaccacttatgtattgcgtgttggctgacagattggattgtgcagatgctcttctgaaggcaggagcagatgtgaataaaactgaccatagccagagaacagccctccatcttgcagcccagaaggcattgagaacaatcagcacaggcaggatctaagagactacaatcattcaaagaagagaaacacgtaaagtgagtaccacattcatcctggccttttcctttatgacattttccaaactggaatgcaaaagaatacaaccctaacaggaagcagcagccttaccaggctgaagaaactgaggcagagtttggagataatagtggctggaacttgaaagtcaaaatcctggagaggagggaattgcagagaaagaatgcaagaatctggatacaaattcctcacaagtttttaacagattcctaaactgtgcttgtatagggtggtgctctaagaaacctagtattaaacaacagctgggagactagacagctgagtagagattattttaaattatcctatattttcttttatgtttaaatctcttaatatataacacattgatttttgtatggggatccattctcattttaaagcatatggataactaattttcccaacacaacctagttcattaatttttggccatttagtatctgctctctgtcagttccaggcttttgtactacgaactccctatgcatttctgtttttttaaatgagggatcctgaatactagggagcctttgggaaatttgaaaataaaagttacatgatcagtgtattttagggggactaatatggcaactaaagctactttggaagagaaagagtggagatacatagattgctattatagttcaggccaatagagaggaattgggtttaagagatacattatggaggcagaagtgttcattcaacaagcgtttgttaaatatctactatgtaatcatgattatacaactagagagaatatgaaaaaaatgaattacgtatgttagcttatagatggatgctctcagtacccatccctattaatcgtcatttccctttgtttagtgaaccttctgatatattggatatcaaatatcctttccaagtattgtctgtcccacttaattctggtatccatgaatgcagaagtgtgctatttatgtaatcatgaacactcatgtatatgtgtataccttcattcattcaacatgtgttaaaactattatgtaacaggcatcatgttaggccttggaacacaaaggtgaacaacatgattcctgctcttaagttgcttacaaagatcatggatgaagatattaaatgataattaaagctgattgatctaccttgt

SEQ ID NO: 27458 - DNA, 2794 bp, Homo sapiens
  misc_feature (1)..(8): n is a, c, g, or t
  misc_feature (16)..(16): n is a, c, g, or t
nnnnnnnngaaggatntgcgccgaaagcctcgggcggccttttgaggggctcgggctagcttcagcgccgtggggtctgacctggctggatatagtgtaccggcccggcaggaggggcggcccggtccgggttgcgcctcctggagccgcccccgggacgtcagtcctggaggaggcgagggagtagaagaccaccaggctgcctaagaaggaatgaactggtccacgtcaaaactcctatgctgatcgtagtgggattgcacctatgaatagccactgccctccagcctaggttgctccggttgctaagaagactatgaacaagtcagagaacctgctgtttgctggttcatcattagcatcacaagtccatgctgctgccgttaatggagataagggtgctctacagaggctcatcgtaggaaactctgctcttaaagacaaagaagatcagtttgggagaacaccacttatgtattgcgtgttggctgacagattggattgtgcagatgctcttctgaaggcaggagcagatgtgaataaaactgaccatagccagagaacagccctccatcttgcagcccagaagggaaattatcgtttcatgaaactcttacttacacgcagagcaaactggatgcaaaaggatctggaagagatgactcctttgcacttgaccacccggcacaggagccctaagtgtttggcacttctgctgaagtttatggcaccaggagaagtggatacacaggataaaaacaagcaaacagctctgcattggagtgcctactacaataaccctgagcatgtgaagctgctcatcaagcatgattctaacattgggattcctgatgttgaaggcaagatcccacttcactgggcagccaaccataaagatccaagtgctgttcacacagtgagatgcattctggatgctgctccaacagagtctttactgaactggcaagactacgagggtcgaactcctcttcactttgcagttgctgatgggaatgtgaccgtggttgatgtcttgacctcatatgaaagctgcaatataacgtcttatgataacttatttcgaaccccactgcactgggcagctttattaggccatgcacagattgtccatctccttttagaaagaaataagtctggaactatcccatctgacagccaaggagccacacctttgcactatgctgctcagagtaactttgctgaaacggttaaagtgtttttaaaacatccttcagtgaaagatgattcagacctggaaggaagaacatcctttatgtgggcagctggcaaaggcagtgatgatgtccttagaactatgctgagcttaaaatcggacatagatattaacatggctgacaaatatggaggtacagctttgcatgctgctgctctttctggccatgtcagcaccgtgaagttattactggaaaataatgctcaagtagatgctactgatgttatgaaacatactccacttttccgagcctgtgagatgggacacaaagatgtgattcagacactcattaaaggtggagcaagggtagatctagttgaccaagatggacattctcttctacattgggcagcactgggaggaaatgctgatgtttgccagatattaatagaaaataagatcaatccaaatgtccaggattatgcaggaagaacccctttgcagtgtgcagcatatggaggctatatcaactgcatggcagttctcatggaaaacaatgcagaccctaacattcaagacaaagagggaagaacagctttgcattggtcctgcaacaatggataccttgatgccattaaattactgctagactttgctgctttccctaatcagatggaaaacaatgaagagagatacacaccccttgattatgctttgcttggtgagcgccatgaagtgatccagttcatgttggagcacggtgccctgtccatcgcagccatacaagacatcgccgccttcaaaatccaagctgtctacaaagggtacaaggtcagaaaagccttccgagacaggaaaaatctcctcatgaagcatgaacagttgagaaaagatgctgctgccaaaaagcgagaggaagaaaacaaacgaaaagaggcagaacagcaaaaaggaaggcggagcccagattcctgcagaccccaggcccttccctgtctgcctagcacccaggatgtgcccagcaggcagagccgggcccccagcaagcagcctcctgctggcaacgtggcccaaggccctgagccaagagacagcagaggatctccaggagggtctctaggcggagccctccagaaggagcagcatgtttcctcagatttgcagggaacaaactccagaaggccaaatgaaacagccagagaacattctaaaggccaatctgcttgtgtccacttcagacccaatgaaggcagtgatggaagcaggcatccaggagttccctctgttgagaagtccagagagctccgactgcagataattcagagagaacgaaggaggaaggagctgtttcgcaaaaagaacaaggcagcagcagtcatccagcgcgcctggcgaagctaccagctcaggaagcacctgtcccaccttcggcatatgaagcagcttggagctggagatgtggacagatggaggcaagagtctacagcattgctcctccaggtttggaggaaggaactggaactaaaattcccccaaaccactgcagtaagcaaggtggcaagagccagctctggcctgggcgttttctacgtcgtgcct

SEQ ID NO: 27459 - DNA, 342 bp, Homo sapiens
ccccaagcccacttttcccctggtaagaattttagagatcatcactaaaataataattcagcttattgactgcctattctaagccagctcctgtgtcaaatccaatacatgcacggtcccatttaatctccacatcaaccccatgaggaagacactcttatcacccccactttacagatgagaaaactcaggcttagagagttggtgaacctaactcaaggtcatgcagccactaagcaatagagctgaacccaagtctggtctcacgtctagtcccagcttcatcaccaggccttagtgctgctcatattgtattcatgtgcacaggagacaaaaaaaaaa

SEQ ID NO: 27460 - DNA, 433 bp, Homo sapiens
ggaaaacaaagttgcaggactaacacagcctgatttaaagcctgcagacagtgtggtgttggtgtcagtattgaggtttacatcttcatgttatgcaatgaaattgtgtcagttaggttttgctgtgtaacaaactttcccacaacttaatagcttaacaaagtgttaatcatttatttgctcagagttctgcgggtcaggagtttgggtgattgttttagtcttggccgcatttgctgagcctcagtggtctaggataacctcactctcatgtctggcagttggcaggttagttgatctgggggctcagctggagcagttcatctgtattccacttgctctcgtccttcacacttcttcacacagtagtgtcggggttccagagagtagcaagagagggcaagcctcagtgaacaggcacctgtcaagcctc

SEQ ID NO: 27461 - DNA, 397 bp, Homo sapiens
gagccgggaggatcatttgagcccaggatattgaggctacagtgagccatgatcacaccactgcactccagcctggagagaagagtgacaccctgtctccttaaaaaaaataataatatattgcaacaagctacattttcttttgattattttctctagcacttaaattaacatttgctagacatacatttcctttggtaatatgtcttaatacaaaatgtattatacgtgtgtgtatagtgctacaacgtatcccatgtccttaaatatttctgccacattcatttcccccataaaacatttattgagcacctactacataccaagtaatgttttaggtgttgcagataataaagacagcaacacaagatggctgtcctggagtttagactgatac

SEQ ID NO: 27462 - DNA, 243 bp, Homo sapiens
ttcagcttttattcagcacttaccatatggtgggcactatggtaggattcattaattaatttattgaaaataattattgagattatatagtcttgtgaaaagatttatcagaggctgttctgtgaattttagaggttttttgtttttgttttttttttgaaatggcttgaaacctgggaggcagaggtggcagtgagccgagatcatgccattgcactccagcctgggtgacaagagcgagac

SEQ ID NO: 27463 - DNA, 477 bp, Homo sapiens
tgattatggcattttaaaattagattttccagcagctgggccattttactgattcttttcaaagacgttctctgagattcactatctattcatgccattgtgcgttttcctgctgctaattttactttttgtttttatattttaatatatttatttctgcttcctttgttccttttttcttcactttttagttgaaattattttctcttgcttttacttttaaaaatgtaacatgcatttaatactacaatttattgagaacaactttacgcatattccataatcttaaatgtgaattattctgattctcattatttttcaattagctgttttcaaatccctttatttcctcattaatcagaaatttattcaaaagagtattcataaaatttgtttaatcttttggtgttgtttccagttgttatactttcctttgagaacatagattgcatatattcatctttctgacttatgatt

SEQ ID NO: 27464 - DNA, 457 bp, Homo sapiens
gtagcatgaaaatggactaatacaacatgtgtataactccccaagggaaaaatcagggacagacacaagactccaaaattatgctaacatataaaaccctacatcaaagttcaaatcatgcacttgctttcacaggtcacctgcttggccttcctgcaagagtgctttatttctttttccttctccaaagctttttaatgaaccatattagcccatgtttgcattgctataaagaactacctgagactgggtaatttataaagaaaatggtttaattggctcatggttctacaggtgcacggtttttgggagacctcagaaacattgcaattatggcagaagaggaagcaggtatgacttatgtggctagagcaggaagaaaagagtgaaggggaaggtgtcacacactgttaaacaagcaggtctcatgagaactcattcactatcacgaaaacag

SEQ ID NO: 27465 - DNA, 365 bp, Homo sapiens
gatggttttacctcagggattctgagataactcccacctatttgagctggcatttgtcaaaagatctctttgaggctggtgcagtggctgacccttgtaattccagcactttgcaaggctgagatgggtggaagtcttgaggtcaggagtttgagaccagcctggtcaacatagtgaaacccagtgtctactaataatacaaaaattagctgggcatggtgctgtgtgcctgtagtcccagctactcaggaagctgaggcacaagaattgcttgaacccaggaggcagaggtagcaatgagccaaaaatcatgtcactgcactctagcctggacgacaccatgagccctcatctcaaaaaaaaaa

SEQ ID NO: 27466 - DNA, 360 bp, Homo sapiens
caagtctcaaactcctaggtcctcccagctcactcattcccttatccccactaccccatcagttagctcgtgaaggtgtccagatcctagactcttccttatccacacagtctacattccctcctggcttatcccccatcctcatggtcatctggactgttttctcattcacatccttagcagtatttatgcccatatccaccttttcttcctcctattttggagaatgaagcatctctccttccttcaaaatcaatatttcaacctgtgcactccatgcctgctctcgcttctcaaggttcttccttccctgccaatcattccctctctgccctatgtattcaccttcctccatgtctc

SEQ ID NO: 27467 - DNA, 5544 bp, Homo sapiens
gcgggactcaagagtagccttcctcgaggacctgcctttcccatttgctgcctgaagttaatgtttcttgctggccaaatcagggacatgccggcattagcgggatgagtgggtgttccggcagggatgtggtcattgacggccagtgagggcgagagtaccacggcccacttcttccttggagctggagatgaggggctgggcacccgtggaataggcatgaggccagaagagagtgacagcgagctccttgaggatgaggaggatgaagtgcctcctgaacctcagatcattgttggcatctgtgccatgaccaagaaatccaagtccaagccaatgactcaaatcctagagcgactctgcagatttgactacctgactgttgtcattctgggagaagatgtaatccttaatgaacctgtggaaaactggccatcctgccactgcctcatctctttccactccaaaggctttcctctggacaaagctgttgcttactccaagcttcgaaacccctttcttatcaatgatctggccatgcagtattacatccaagataggagggaggtgtaccggatcctgcaggaagagggtattgatctgcctcgatatgctgtgctcaaccgtgatcctgcccggcctgaggaatgcaacctgatagaaggtgaagaccaagtagaggtcaatggagctgtctttcccaagccctttgtggagaagccagtgagtgcagaagaccacaatgtttacatctactaccccagctcagctggaggaggaagccagcgtctctttcgtaagattggcagccgaagcagtgtttactctcctgagagcagcgtccgaaagacggggtcgtacatctatgaggagtttatgccaacagatggcacagatgtcaaggtgtatacagtggggccagattatgcccatgctgaagctagaaaatctccagctttggatgggaaggttgaacgagacagtgaggggaaagagattcgatatccagtcatgctgactgccatggaaaagctggtggccaggaaagtctgcgtagctttcaagcaaacagtttgtggatttgaccttcttcgtgccaatggtcattcctttgtgtgtgatgtcaatggctttagttttgtcaagaactcgatgaaatactacgatgactgtgccaagattctggggaacaccataatgcgggagcttgccccacagttccagattccatggtccatccccacggaggctgaggacattcccattgttcccaccacatctggcactatgatggaacttcgttgtgtcattgcaattattcgtcatggggatcgtactcccaagcagaagatgaagatggaagtgaaacacccaaggttttttgctctgtttgaaaaacatggtggctacaagacagggaaattaaaactcaagcgacctgagcagctccaggaggtgctggatatcacaaggctgttgttggctgaactggagaaagaaccaggtggtgagatcgaggagaagactggaaaactagagcagctgaagtctgtactggagatgtatggtcacttctcaggtataaaccggaaggtacaattgacttactaccctcatggagtaaaagcttctaatgaggggcaagatccacagagggaaactctggccccatctctgttgctggtactgaagtggggtggagaactgactcctgctggccgtgttcaggctgaggagctggggcgagcttttcgctgcatgtaccctggaggacagggtgactatgctggcttccctggttgtgggctgcttcgtctccatagcactttccgccacgatctcaagatctatgcctctgatgagggtcgtgttcagatgactgctgctgccttcgccaagggccttctggctctagaaggggagctgacacccattttggtgcaaatggtgaagagtgccaacatgaatgggctactggacagcgatggggattccttgagcagctgccagcaccgggtgaaggctcggctgcaccatattctacagcaggatgcaccctttggccctgaggactacgatcagctggctcccaccagaagtacttccctgctcaactccatgactatcatccagaatcctgtgaaggtctgtgatcaggtatttgccctgatcgaaaacctcacccaccagatccgggaacgaatgcaggaccccaggtctgtagacctgcagctctaccacagtgagacactagagctaatgctacagcgttggagcaagctggagcgtgactttcgacagaagagtgggcgctatgatatcagtaagatccctgacatctatgactgtgtcaagtatgatgtgcagcacaatgggagtctgggacttcaaggcacagcagagttgctccgtctctctaaggcactggctgatgtggtcattccccaggagtacgggatcagtcgggaggagaaactggaaattgctgtgggcttctgtcttccactgttgcggaagatactacttgacctgcagagaacccacgaggatgagtctgtcaacaagctgcatcccctgtactcccgaggcgtgctctccccaggtcgccacgttcgaacgcgtctctatttcaccagtgagagccatgtccactccctgctcagtgtcttccgttatggaggacttcttgatgagacccaggatgcacaatggcagcgagctttggattatcttagtgccatctcagagcttaactacatgacccagattgtcatcatgctttatgaggacaacacacaggatcccttatcagaggaacggttccatgtggagctacacttcagccccggagtgaaaggtgttgaggaagaaggcagtgccccggctggctgtggattccgtccagcctcttctgagaatgaggagatgaaaaccaaccaaggcagtatggagaacctgtgtccaggaaaggcatcagatgaaccagaccgggcattgcagacttcaccccagcctcctgagggccctggccttccgaggagatcacccctcattcgtaaccgaaaagctggttccatggaggtactttctgagacttcatcctcgaggcctggtggctaccggctcttttcatcttcacggccacccacagaaatgaagcagagtggcctagggtttgaagggtgttccatggtgcctaccatctaccctctggaaacactgcataatgccctttccctacgtcaagtgagtgaattcttgagtagagtctgccagcgccacactgatgcccaggcacaggcatctgcagccctctttgattccatgcacagcagccaggcctcagataacccattttctccaccacgtactcttcattcacctcccctgcaactccagcagcgctctgagaagcccccttggttagagacaaggttttgccatgttggccaggctggtttagagctcctgacctcaagtgatctgcctgcctcggcctcccaaagtgctgggattacaggcgtgagccaccgcacccagccagacagcagtggcccttctagcactgtgtccagtgctggtccttcttcccctactacagtagatggtaactcccaatttggcttcagtgatcaaccctccctaaattcacacgtggctgaagaacatcaaggccttgggctgctccaggagacccctgggagtggagcacaagagctctccatagaaggggagcaagagctttttgaaccaaatcagtccccacaggtgccacctatggaaaccagccagccatacgaggaggtcagccagccatgtcaggaggtccctgacatcagccagccatgccaggacatttctgaggcgctcagccagccatgtcagaaggtccctgacatcagccagcaatgccaggagaaccatgacaatggtaaccacacatgccaggaggtccctcacatcagccagccatgccagaagtccagccaactgtgccagaaagtctctgaggaagtttgccagctatgtctggagaactccgaggaggtcagccagccatgccagggggtctctgtggaggttggcaagctggtccataagttccatgtaggggttggtagcttggtccaggaaacccttgtagaagttggcagcccagctgaagagatccctgaggaggtcatccagccataccaggagttctctgtggaggttggcaggctggcccaggagacttctgcgatcaatctgttatctcagggcatccctgagattgataaaccatcccaggagttccctgaggagattgatctgcaggcccaggaggtccctgaggagataaattagaagtcctgggtggtccctgaagtgattgatcagctgcctggagagggtattcctcaagcccagcatccatctggtgatccaaaccctcagagccagtctctagcccatgaccagcactcaccccttccaccagcaacatgtgattaattttctcattagtggtatcacactataccagccatttgagccagcaaccttttctgttggctaactcactggccagctctcaccagcggtgtctggggaagtagttctctttgtatgaagcatacctgtgccagagctgtggttgaggaggagccagttttaggttcgaagaagccattggctcctcacttagccattagacttgaataggatttccttggggtgggttggtctgtcattacccagccttctctgagcatcctaggaaatcacagattgttaaaggaaatgccgcttcactgctgaagacaccatctggcgacagcaaatgcaaaagaggggactctagggtcttcacttttctggggaaatgttcacgacttctcaaggtacgcttagaccatatgtgcattcaggggactcttgtctttgccagcactcctcaggtgagcccgggatggctatctgaaatgtctggaaaatagagtcccttccccaaacatctgacatggccactaaatctttagacttgccttatagatccttccatatcatccccaagtgccccttctgcctcagtcctgttcctctgggcaatagctctagggaaaagtaggtattagactgctgtgcaaaattcagagcaactacttaaaatgctctagaggattcttagccagtctgtgaaagtgggcctcctctgtggtggggctgtttggcttaggagatgctgtagtagtagagataatcaggttctattttaagcaatcagcagagatcaatattgtacagatacaagcaaaggtttaataaatatatatatatatatttatttctgtagttgtgccagggacagactggccaaagaccaaacactgcagggtccccaagaaatttgtccttatatcattgtgtctgagggccagatatgattatgaagctttttccaaagatccagggatgggaatgggagtgggtaggaggggtaatgcggtcattggagtcgggggctggaacattatgagtgctcaataaatataaactaatgag

SEQ ID NO: 27468 - DNA, 421 bp, Homo sapiens
ccttttcttaaatctgtttgcatcaatgaatatacctcctacagattaaaacaaatctccttggtattgtaaagtttatgttttatttaggaaatctcttagaagaaacaattattaaagaaatttaatgtcagacgctatggctcatgactctagtcccagtactttgggaggccaagatgggaggattgcttgaggccaggagttagaaaccagcttgggtaatatagcgagaccttgtctctaaaaaaaaaatttttttaattatccagacatagtggtgtgtacctgtagtcctagctacttgggaggctgaggtgggaggatcgcttgagcccaggagttcaaggttgttacaatgagttatgaccatgccactgcactccagcctgggtgacagagcagaccctgtctcgaaaaa

SEQ ID NO: 27469 - DNA, 421 bp, Homo sapiens
ccttttcttaaatctgtttgcatcaatgaatatacctcctacagattaaaacaaatctccttggtattgtaaagtttatgttttatttaggaaatctcttagaagaaacaattattaaagaaatttaatgtcagacgctatggctcatgactctagtcccagtactttgggaggccaagatgggaggattgcttgaggccaggagttagaaaccagcttgggtaatatagcgagaccttgtctctaaaaaaaaaatttttttaattatccagacatagtggtgtgtacctgtagtcctagctatcgggaggctgaggcaggagaatggcgtgaacctgggaggcagagcttgcagtgagccgagattgcatcagtgcactccagcctgggctacagagcgagactcttgtctccaaaaaaa

SEQ ID NO: 27470 - DNA, 383 bp, Homo sapiens
tctccgcctccttccatctcatctcatggtgcatccaccagagcaaggccccttcgaccttcatggacagacccttctccactctgccagccgtggctgctgtgtggccgagctcttccgattctggaggccgatgtccagatgcagcaacagggtcttcctggggccagacacgcagtcttgcagccacaccttggaccagctcctcactctgaggccagggcttcctccgagcatctttctcagcgagagagactggaaacgcgtggcagttttctttccagcctggcatatccacactctcgcatatggctcctaagttctgcttgaaaaccaaacaggtcttcctgcagcatcgcctgggaccaaccacacaggccaca

SEQ ID NO: 27471 - DNA, 386 bp, Homo sapiens
gtccgctttaaaacccttttcttacacacacacacacacacacacacagaatatatagtattgtttttggtgtatgagtgtgtgcgtcggaataaatggtttcatactctatatacttactgttttataatttaccttcttcactcaacactgtatctcagatgtcttagagatctaagacaccatatcttagagaatgagcagcctcattgttttattccgtaatatgaatttactaaatttattgggcctttttttttgagacagagtcttactctgtcactcaggctggagtgcaatggcacaaaatcgggctcactggcaagctccgcctcctgggttcaagtgattctcttgcctcacgcccagataattttttgtatttt

SEQ ID NO: 27472 - DNA, 259 bp, Homo sapiens
gtcggtcgtgatgtatccccaaactgtatctcagatgtcttagagatctaagacaccatatcttagagaatgagcagcctcattgttttattccgtaatatgaatttactaaatttattgggcctttttttttgagacagagtcttactctgtcactcaggctggagtgcaatggcacaaaatcgggctcactggcaagctccgcctcctgggttcaagtgattctcttgcctcacgcccagataattttttgtatttt

SEQ ID NO: 27473 - DNA, 964 bp, Homo sapiens
ccttgatagcttctttgtaagctcatgtgcctgtcttgccatcagagaggttgagatttctaaacacttaaacctagatcccctcttctttccaagtgatcacatccactttcgtgacatcatgccacttaaaaacagatgactcacacttatctccgatccttactcacccatactactctgagctggctctgtagattctgcactgatttgacatcttcatggtatctgatgcactcagattcaacatgatctttcttcctcctctcccaccctacacctatatgcatcaaaacctggttcttgaaccaggcacagttctgcctgtaatcccagcaacttgggaggctgaggtggcagcatcacttgagcccaggagttcgaggctgcagtaagcaatgtttgcgccactgtactccagcctggattacagagcaagatcccaactcaaaaacacacacacacacaacttggttctcctcttttgttccccatttccgtgactagtatttatatccaattatctatataattcagaaacgtgagtccttctcaatattctttctccctcattacgcacattcactgcatcaccaaatcctgttacctcctaacatctcttaagtccattcacttcttcccttcaaaatgcctggtccaggctactagcatgtattgactagtccatggcagttagccttctaattggtgtgtctgtataccctggcccccacaggcccattctccacagtgttgccagagttttttggaacaaaaatctattataaaagccccacccaaccaggcacggtggctcacacccgtaatcccagcactttgggaggccaaggcaggcagatcacgaggtcagcagtttgagaccagcctggccaatatggtgaaaccccatctctactaaaaaatacaaaaattagctgggtgtggtggcacacacctctagtct

SEQ ID NO: 27474 - DNA, 465 bp, Homo sapiens
gcttcacaaagctgcctcaagtggcattaacagctagggcaaacaagaagctcaccaataaatggaaaaggaaaagctgggccatgagatgtcataggggactttgaaaagctccatcgtattcctgggaatctccaaccccactcacacgatcagggctgtgggcatgccagagaagacttgagaaggccctgtgctcttggttcttaccgagtaagcaggcagcgaaaaccaaggcagagttgcaaactgcctgcctgggtgatgagaacattccctaacaaaaacacagagccccttgacaaaggctgggaggcttaccagttggaagcatttaaggatatctctgtccattaacgagctgaccactaagctaaccaaacagagacttcagtggccaaacacaacaatgaatatcggatttacaaaattatttcagcaaaaataaacacaacaaacagcaaa

SEQ ID NO: 27475 - DNA, 531 bp, Homo sapiens
gattgcatgagaggcagaggcacaattcctctccacttgaaacatcaacattcctgcagatgaattttctgccagcctgacaagggagctaaggtggctccagtccctccctctggtaagacctcagtgtgtttcactgagagcttcctcggccacctctgtcaaggctgggacctttccccaccattgggtattgcatttacccacctgctttagccaaagctggtttttacctgtggacacctcctgtattggcctgaagcctaaaatattcaatccagtaaataaaatactggggaaaaaataaataaaaaagtgcacatcacaggggaatgagattaagcgtcaagagacctctaccatttcaaccctatgggagacagtgaacttgctcacatgaccaacatattgctactacaaccagcagcagagaaagctatcatacaaagactcttaataaccaaggaactcagagtttccacccctgaaagcaccaagaactgaattctctctttgagagataaacaaaat

SEQ ID NO: 27476 - DNA, 428 bp, Homo sapiens
gagtttcataattttcttactgatgagtgcacacagtttaaattagagagtgttgaaaaaatattcatttacttatggtcctaatattaaacccatagcagtccccataaaatattcattgtcggatttatacacttttgaactttgaagctatttgactattttgaccaattttacaagagaaacaatgatttacattaccttatcagtttgaaatgcaaactgtaagaaaatataaagcgcttaattctacaaagttaagtgaaatcattaatttgataatcattgatttttgcatttaacttttaccttatctcatcagaaaaatcttaagtatgcttaaaataataatgcataagctaaacatacgcagagaaaaactgcataaaatataacaaaatgacgtgaattaaaaagagtaaaaaaaa

SEQ ID NO: 27477 - DNA, 533 bp, Homo sapiens
agatttctaaatatgctgataaaatcactgacatctcagtaaatatagtttattcctaggaagtgactagaatgattgatttagctatatgtaagttatttaatactgtttgaaaggtacttcatcaacaccatttactgtgatcaatagcattttcaggaacacttcagacttggggaggttactcctttgggtaaccttttaggattatctgttgtgggaacaagaagtagccatcaaaagccactgagcaggctgggtgctataatcccagcattttgggaggctgaagtgggaggactgcttgaacccaggggtttgagaccagcctggacaacatggtgagatcccctatctacaaaaactatattaaaaaaatttagcttgttgtagtgtacacacctattgtcccagttgctcaggaggctggggtgggagaatcacttgaccccaggaggtcaaggctgcagttagcattgcttgtgccactgcagtccagcctaggtgaaagagtgagaccctgtctcaaaaaa

SEQ ID NO: 27478 - DNA, 517 bp, Homo sapiens
cagacgcgcaggcagctctgtaatgagcaaaggcacagaatctcaactttacaaccgacctttccagccggctaagcttccacaatgtcctgcttcctctgacaaaggaaaactgtaaatatagagtgtgagcaagtgggaaacgctgcacttttgccattcaaagatgagcccggccattcccctgccttgctaggcaagtgggcgactcttcccagcagcctgagccctcatccccaggaccttcctagggcaccccgaccctctgtcctcattccctcgcccccatcttgaaatggaccctggcacagggtcgggtgagaggccctggagggcttggctctcctagcttttgagaaagaaatgtcaggcagcaaggaaaatgaggagagagagaagaagaaagggagggagggtgacagaggagggagaaagagagacagaatagcgaacaaacttaatgttaaaattccaagacaaatggagttaaataaatttacgaggatcgaacccatta

SEQ ID NO: 27479 - DNA, 84 bp, Homo sapiens
cctgcaaaaatgccattgggattttgataaggattgcattgatcctgtagatcactttgaatattatggacatttaaacaattt

SEQ ID NO: 27480 - DNA, 747 bp, Homo sapiens
gagaggcactctgcaaacacttcctcaaactttaggaaagcaaaaacattccttctgctcaacacggcagaaaacagggtctctgccccttggcgctgggtgaggagttcccaaagaccagccagccatgaacagcggcgtgtgcctgtgcgtgctgatggcggtactggcggctggcgccctgacgcagccggtgcctcccgcagatcccgcgggctccgggctgcagcgggcagaggaggcgccccgtaggcagctgagggtatcgcagagaacggatggcgagtcccgagcgcacctgggcgccctgctggcaagatacatccagcaggcccggaaagctccttctggacgaatgtccatcgttaagaacctgcagaacctggaccccagccacaggataagtgaccgggactacatgggctggatggattttggccgtcgcagtgccgaggagtatgagtacccctcctagaggacccagccgccatcagcccaacgggaagcaacctcccaacccagaggaggcagaataagaaaacaatcacactcataactcattgtctgtggagtttgacattgtatgtatctatttattaagttctcaatgtgaaaaatgtgtctgtaagattgtccagtgcaaccacacacctcaccagaattgtgcaaatggaagacaaaatgttttcttcatctgtgactcctggtctgaaaatgttgttatgctattaaagtgatttcattctg

SEQ ID NO: 27481 - DNA, 449 bp, Homo sapiens
  misc_feature (43)..(43): n is a, c, g, or t
aggagctttccgggcctgctggatgtatcttgccagcaggcanctccttctggacgaatgtccatcgttaagaacctgcagaacctggaccccagccacaggataagtgaccgggactacatgggctggatggattttggccgtcgcagtgccgaggagtatgagtacccctcctagaggacccagccgccatcagcccaacgggaagcaacctcccaacccagaggaggcagaataagaaaacaatcacactcataactcattgtctgtggagtttgacattgtatgtatctatttattaagttctcaatgtgaaaaatgtgtctgtaagattgtccagtgcaaccacacacctcaccagaattgtgcaaatggaagacaaaatgttttcttcatctgtgactcctggtctgaaaatgttgttatgctattaaagtgatttcattctg

SEQ ID NO: 27482 - DNA, 1483 bp, Homo sapiens
ccagagcggaatacggattccgattttaaaataagcgcttctaaatctttctcctgcatctaagacgggtgggggaaaaaaaggaaaggagttaggtcccaaggttcaaggcctgggatctccaggtcccaggctggcgggcctcggtgcccggaaagggccagggcgtgttgtgaacctttggcaaggcgctgctattcctcgcgcctcggtttgcggtctgtgaaatggggtggcagtgcctttgcagggacgcggcgaactcaagcaccagcaagcggactcgaactcaaagggtttcagggtgtagacgaccagagcgcactgaggggctccaggtcggcccgctccggagccgggagagtaaccgcgtgcagggaaaggcgcacggcagcctcggtgcctcccttccctccaccggacgggtgactgactaggggtgaggtcctcacctccaggctgcgcagctgagttctggaagctgcgtcaagagaggcccaggacaccaagagccagctgtggccagagccctttcactgacccagaacactggccctcggaaacctggagaactgcgagggcttttaatgcggctgagaagaaagtgaagaccccgactcctcctctctccttcgaaagagccgacacaggagccacttcaaccggttgtcgccccagtggccgccctctgagcacgtgttactgccagtctgcgtcagcgttgggtaaatacatgactggccgacgccgccgggcggggctatttaagagacagccgcccgctggtcctccctgaacttggctcagctgccgggctgctccggttggaaacgccaagccagctgcgtcctaatccaaaagccatgaacagcggcgtgtgcctgtgcgtgctgatggcggtactggcggctggcgccctgacgcagccggtgcctcccgcagatcccgcgggctccgggctgcagcgggcagaggaggcgccccgtaggcagctgagggtatcgcagagaacggatggcgagtcccgagcgcacctgggcgccctgctggcaagatacatccagcaggcccggaaagctccttctggacgaatgtccatcgttaagaacctgcagaacctggaccccagccacaggataagtgaccgggactacatgggctggatggattttggccgtcgcagtgccgaggagtatgagtacccctcctagaggacccagccgccatcagcccaacgggaagcaacctcccaacccagaggaggcagaataagaaaacaatcacactcataactcattgtctgtggagtttgacattgtatgtatctatttattaagttctcaatgtgaaaaatgtgtctgtaagattgtccagtgcaaccacacacctcaccagaattgtgcaaatggaagacaaaatgttttcttcatctgtgactcctggtctgaaaatgttgttatgctattaaagtgatttcattctg

SEQ ID NO: 27483 - DNA, 1645 bp, Homo sapiens
  misc_feature (1519)..(1520): n is a, c, g, or t
  misc_feature (1522)..(1522): n is a, c, g, or t
ccagagcggaatacggattccgattttaaaataagcgcttctaaatctttctcctgcatctaagacgggtgggggaaaaaaaggaaaggagttaggtcccaaggttcaaggcctgggatctccaggtcccaggctggcgggcctcggtgcccggaaagggccagggcgtgttgtgaacctttggcaaggcgctgctattcctcgcgcctcggtttgcggtctgtgaaatggggtggcagtgcctttgcagggacgcggcgaactcaagcaccagcaagcggactcgaactcaaagggtttcagggtgtagacgaccagagcgcactgaggggctccaggtcggcccgctccggagccgggagagtaaccgcgtgcagggaaaggcgcacggcagcctcggtgcctcccttccctccaccggacgggtgactgactaggggtgaggtcctcacctccaggctgcgcagctgagttctggaagctgcgtcaagagaggcccaggacaccaagagccagctgtggccagagccctttcactgacccagaacactggccctcggaaacctggagaactgcgagggcttttaatgcggctgagaagaaagtgaagaccccgactcctcctctctccttcgaaagagccgacacaggagccacttcaaccggttgtcgccccagtggccgccctctgagcacgtgttactgccagtctgcgtcagcgttgggtaaatacatgactggccgacgccgccgggcggggctatttaagagacagccgcccgctggtcctccctgaacttggctcagctgccgggctgctccggttggaaacgccaagccagctgcgtcctaatccaaaagccatgaacagcggcgtgtgcctgtgcgtgctgatggcggtactggcggctggcgccctgacgcagccggtgcctcccgcagatcccgcgggctccgggctgcagcgggcagaggaggcgccccgtaggcagctgagggtatcgcagagaacggatggcgagtcccgagcgcacctgggcgccctgctggcaagatacatccagcaggcccggaaagctccttctggacgaatgtccatcgttaagaacctgcagaacctggaccccagccacaggataagtgaccgggactacatgggctggatggattttggccgtcgcagtgccgaggagtatgagtacccctcctagaggacccagccgccatcagcccaacgggaagcaacctcccaacccagaggaggcagaataagaaaacaatcacactcataactcattgtctgtggagtttgacattgtatgtatctatttattaagttctcaatgtgaaaaatgtgtctgtaagattgtccagtgcaaccacacacctcaccagaattgtgcaaatggaagacaaaatgttttcttcatctgtgactcctggtctgaaaatgttgttatgctattaaagtgatttcattctgaaaaaaaaaaaccaaaaaaaaaaaaaaacaactccnngnggggcccggtgcccctttcccaagccttacagttgatataccctccttgcctgggggcccctttttcacttctgggaggagaaatccaatggcttaaccacctgaaatacccttgcaggaagg

SEQ ID NO: 27484 - DNA, 849 bp, Homo sapiens
aggggctccaggtcggcccgctccggagccgggagagtaaccgcgtgcagggaaaggcgcacggcagcctcggtgcctcccttccctccaccggacgggtgactgactaggggtgaggtcctcacctccaggctgcgcagctgagttctggaaggtactgtcctgggggtgtgagtgtgtgggccctcaggaaaggtgcgaggggcggatgccgtggtctacccgagcttgcgggggtgcggtggtcaagttccccaggaccctcgctggcgccgcttgtcgacaacggggaacagtgggcgccgcgggtggtggtaacttggcccgggaagaaaacacatccctttcccaaaccggattcctctgagcaaaaccagatggtgtcatccgcattttacagctgcgtcaagagaggcccaggacaccaagagccagctgtggccagagccctttcactgacccagaacactggccctcggaaacctggagaactgcgagggcttttaatgcggctgagaagaaagtgaagaccccgactcctcctctctccttcgaaagagccgacacaggtatgaagaccagcgcctcggacgctccggggtagggggccgacgccccctccctttcagaatcacgccttgctgatgctcagtcctgcccagtgtccaccccccacccccgcccccagtttcctttctagcccctccggtccccaaagcgaactaagctagcggcagcttctccatcccggaggagactccaaactcctaggtttcccaccttggagagtactgctctggaatgcgcaggggagcggcacctggaaagggttgggcggaagcttctcgg

SEQ ID NO: 27485 - DNA, 768 bp, Homo sapiens
gaatttctagtgtatgcataatcacattttgtgtgcctctcggcagccattccattgttgaagaggcagccaacacagaaaattgttgaggggttttgatctttgacaagggaagcgtatagtgtgagctcaccagtcaccctggcttttttccctggagacatttcctagtttgtggcataggggaaatagatcccaaataaaaagtgacggtctcactgggctaaggaagaaaggtggaagtttggggccactaaagcaaatttcgctcattttccaggtttaggagagaaccacataaaatctaacctcaaaatctgcagtcaggtccctctaaagtcattgactgacttcagaggtacacataagcaagagaagaaacccagcagaaaacagtagctgaaaagctaaagatctgagcagacatttcagtatctaatgccagagaggcaaaaatggaagttcaaatcctgccaagttagaggggccttattacaccctgagttttccactgtggccccatcatgaccactgcctaagattgaaggcaaaactaaaacagaccagccctcaggaaaatgagttactgctgtgctgctgctaaaaggaaacagccttctttggagaaaggtattatctaaaacttctacaattttgtatccataattcagtatttcattcaccaaaataggatatgctgttttggacaagctaatgaaactgaattgaccaaaaaccaatagaaattatctagtgctgacagaaaaa

SEQ ID NO: 27486 - DNA, 2758 bp, Homo sapiens
atctgtgcagtgtatagcatttcagtactccactgttcttactaagtcaagtttaaataaaggctgttcaaataagcccacaacagtgaacaaacgaagtgttaatgtgaatgctgctagtggaggagttcagaattccggaattgtcagagaagcacctgccacgtccattgccacagttctaccacaacctatgacatcagctatggggaaaggaacagttgctgttcaagaaaaagcaggtttgcctcgaagcataaacacagacactttatctaaggaaacagacagtggaaaaaatcaggatttctccagctttgatgatactgggaaaagtagtttaggtgacatgttctcacctatcagagatgatgctgtagttaacaagggaagtgatgagtccataggcaaaggagatggctttgactttctaccgcagttgaactcagtgtttcctccaagaaaaaatccagtaacttcaagtacttcagtattgcattctagtcctcttaatgtttttatgggatctccagggaaagaggaaaatgaaaaccgtgatctaacagctgagtctaagaaaatatatatgggaaaacaggaatctaaagactccttcaaacagttagcaaagttggtcacatctggtgctgaaagtggaaatctaaatacctctccatcatctaaccaaacaagaaattctgagaaatttgaaaagccagagaatgaaattgaagcccagttgatatgtgaacccccaatcaatggatcctcaactccaaatccaaagatagcatcttctgtcactgctggagttgccagttcactctcagaaaaaatagccgacagcattggaaataaccggcaaaatgcaccattgacttccattcaaattcgttttattcagaacatgatacaggaaacgttggatgactttagagaagcatgccatagggacattgtgaatttgcaagtggagatgattaaacagtttcatatgcaactgaatgaaatgcattctttgctggaaagatactcagtgaatgaaggtttagtggctgaaattgaaagactacgagaagaaaacaaaagattacgggcccacttttgaaatttcagtgaataccttaatgttctgtaatttgggaagtttctggcaacacagaactacatagaatcagtattgttttcatggcctccagggaaaaaatgtttttcaagtaagagtaaaagggtgatgggattttataccaacaactgtttcatcttaaaaatatgtatatttttatattaaaaattgtacagtatgtcatctacccaataggaaagtcaacaggatctttattttttgaaagctttagccatccactaagtgccctttttcataagagaagaaaattgtgcataaaaattggttatgtttgttttttagtcatcttttttaacatatatttttgattgacaaattgcctttcaaatttttggggctagttgagatttaaagagtttgatatgccttctatttttatggagaaagtaattttaaaatggcaattggtgtttctaagccattgactaataaaacatagggttggctagtaattattttgttaacttgatgaagtcaagtatgactattatttattgtacatttgataagacaatttttggaattttgaattgcacaaattacatgatatcttttgcatttatgttactatattgtacttctgacaaatctttattcctgggtggtatttttaagatatctttacctataaaaaatgtttaaggttcataggactcgacaagagctatctggtgattttctcattagtaacatgcaacgttgtactgcaaaatttcaatcaacatgacaacttataatgagtggagatttcatattaggtactaaatattatagtattatttctattttctttttccaaataagaagcttggattattttattttgtggtctttatcattaactttaattctttctgtactgtgtataatatttttatattattggccttaccataaaattatttagaaaggttgtcaaaataagttatacctctttggcaatagatagatgtatacatctacctactatgatctacaattttaggttaagtgaagcttgggggggctactgacttggttaccttcttgtctcttgtcccaaagatttaaactatgtacctttgtatagctcttctgccccattttgacttctgagatgaaagtatttactaaaattaaaaaaaaaaaaacaaaaaacaaacctttagctcactaactttatgggtttctgaagtgatggaaatttttaaggatatatttaataagcataaacttactaataattacttccaaaaataaaaacaggaatattacttttacccagtgtggtttatagcatacatttgtactgaagcatatagggatgttaatgtgatcttttcctgacagattatgaaagcattatgacttgtaacaagtttccttgtatatcactaacaggtttagaagacataaatattagtgtgttttgcctacatggtgtatttaaatctattaatattttcctgttgcttttttaaaaaaataaatacacataatgtatattaaaagaggtgggatgaaataattttagtaattatgtgtacagatgaaacatttttgtcatggaatttaaaagctaagtaagtataaaaaataaaatgttatatgcaaaaaataggaaacatgaaa

SEQ ID NO: 27487 - DNA, 2694 bp, Homo sapiens
  misc_feature (2694)..(2694): n is a, c, g, or t
atctgtgcagtgtatagcatttcagtactccactgttcttactaagtcaagtttaaataaaggctgttcaaataagcccacaacagtgaacaaacgaagtgttaatgtgaatgctgctagtggaggagttcagaattccggaattgtcagagaagcacctgccacgtccattgccacagttctaccacaacctatgacatcagctatggggaaaggaacagttgctgttcaagaaaaagcaggtttgcctcgaagcataaacacagacactttatctaaggaaacagacagtggaaaaaatcaggatttctccagctttgatgatactgggaaaagtagtttaggtgacatgttctcacctatcagagatgatgctgtagttaacaagggaagtgatgagtccataggcaaaggagatggctttgactttctaccgcagttgaactcagtgtttcctccaagaaaaaatccagtaacttcaagtacttcagtattgcattctagtcctcttaatgtttttatgggatctccagggaaagaggaaaatgaaaaccgtgatctaacagctgagtctaagaaaatatatatgggaaaacaggaatctaaagactccttcaaacagttagcaaagttggtcacatctggtgctgaaagtggaaatctaaatacctctccatcatctaaccaaacaagaaattctgagaaatttgaaaagccagagaatgaaattgaagcccagttgatatgtgaacccccaatcaatggatcctcaactccaaatccaaagatagcatcttctgtcactgctggagttgccagttcactctcagaaaaaatagccgacagcattggaaataaccggcaaaatgcaccattgacttccattcaaattcgttttattcagaacatgatacaggaaacgttggatgactttagagaagcatgccatagggacattgtgaatttgcaagtggagatgattaaacagtttcatatgcaactgaatgaaatgcattctttgctggaaagatactcagtgaatgaaggtttagtggctgaaattgaaagactacgagaagaaaacaaaagattacgggcccacttttgaaatttcagtgaataccttaatgttctgtaatttgggaagtttctggcaacacagaactacatagaatcagtattgttttcatggcctccagggaaaaaatgtttttcaagtaagagtaaaagggtgatgggattttataccaacaactgtttcatcttaaaaatatgtatatttttatattaaaaattgtacagtatgtcatctacccaataggaaagtcaacaggatctttattttttgaaagctttagccatccactaagtgccctttttcataagagaagaaaattgtgcataaaaattggttatgtttgttttttagtcatcttttttaacatatatttttgattgacaaattgcctttcaaatttttggggctagttgagatttaaagagtttgatatgccttctatttttatggagaaagtaattttaaaatggcaattggtgtttctaagccattgactaataaaacatagggttggctagtaattattttgttaacttgatgaagtcaagtatgactattatttattgtacatttgataagacaatttttggaattttgaattgcacaaattacatgatatcttttgcatttatgttactatattgtacttctgacaaatctttattcctgggtggtatttttaagatatctttacctataaaaaatgtttaaggttcataggactcgacaagagctatctggtgattttctcattagtaacatgcaacgttgtactgcaaaatttcaatcaacatgacaacttataatgagtggagatttcatattaggtactaaatattatagtattatttctattttctttttccaaataagaagcttggattattttattttgtggtctttatcattaactttaattctttctgtactgtgtataatatttttatattattggccttaccataaaattatttagaaaggttgtcaaaataagttatacctctttggcaatagatagatgtatacatctacctactatgatctacaattttaggttaagtgaagcttgggggggctactgacttggttaccttcttgtctcttgtcccaaagatttaaactatgtacctttgtatagctcttctgccccattttgacttctgagatgaaagtatttactaaaattaaaaaaaaaaaaacaaaaaacaaacctttagctcactaactttatgggtttctgaagtgatggaaatttttaaggatatatttaataagcataaacttactaataattacttccaaaaataaaaacaggaatattacttttacccagtgtggtttatagcatacatttgtactgaagcatatagggatgttaatgtgatcttttcctgacagattatgaaagcattatgacttgtaacaagtttccttgtatatcactaacaggtttagaagacataaatattagtgtgttttgcctacatggtgtatttaaatctattaatattttcctgttgcttttttaaaaaaataaatactataaaccacactgggtaaaagtaatattcctgtttttatttttggagaaatgggctttggagaaatgggctttn

SEQ ID NO: 27488 - DNA, 533 bp, Homo sapiens
ggaaacgttggatgagtagtaattgagaaactactccttctatctagaccttacttgttttttttttagatgtaaaaccagaactatagataatgttgttggttactattgtctaggttctggtaatcctaaagccatagaaaacataatgagttttgttgatcttttcgtactgcatttattgattatgagccaggaaaaggcacatttacctagggcaattattaggtaactcagcagggcagtctagcaggtagactgccattgtgaactttttttattattaaaatgtggacaagttctggtaagcttaaattgggttcttaacctgcagtatgttcatagatctattaggtatgctgtgtgcaataatgtagtagaaaaagatactttaaagcacaattctgaatgttttccaatagaatgcatcagaatgtaatacttaatctaaaaaaaattctttctcagacttatccttgtctgtctcatccttcgaattgtgaacattctaagaatgtgttctacaatgctgc

SEQ ID NO: 27489 - DNA, 211 bp, Homo sapiens
gatgagtcagtctagagatccccccctgagcacttctgtacctgtagccccctgccttactgtcctggcacacccctcaccatcctgtataccttaaatatcaaagagggcaagagagaaagggctttaaagataagttatttttttaaggaaccttaatattatttttaagaagtaaccaaattagtgacgtgaaatgcaaaaaaaaaaa

SEQ ID NO: 27490 - DNA, 5053 bp, Homo sapiens
atctgccccactttctgtctcacaaacaaccttgccacagtcatcttctacccctgtcctgcccagggcaagggagactcctgtgacttcatttcagacatcaacaatgacatcattcatgacaatgctccatagtagtcaaactgcagaccttaagagccagagcaccccacaccaagagaaagtcattacagaatcaaagtcaccaagcctggtgtctctgcccacagagtccaccaaagctgtaacaacaaactctcctttgcctccatccttaacagagtcctccacagagcaaacccttccagccacaagcaccaacttagcacaaatgtctccaactttcacaactaccattctgaagacctctcagcctcttatgaccactcctggcaccctgtcaagcacagcatctctggtcactggccctatagccgtacagactacagctggaaaacagctctcgctgacccatcctgaaatactagttcctcaaatctcaacagaaggtggcatcagcacagaaaggaaccgagtgattgtggatgctaccactggattgatccctttgaccagtgtacccacatcagcaaaagaaatgaccacaaagcttggcgttacagcagagtacagcccagcttcacgttccctcggaacatctccttctccccaaaccacagttgtttccacggctgaagacttggctcccaaatctgccacctttgctgttcagagcagcacacagtcaccaacaacactgtcctcttcagcctcagtcaacagctgtgctgtgaacccttgtcttcacaatggcgaatgcgtcgcagacaacaccagccgtggctaccactgcaggtgcccgccttcctggcaaggggatgattgcagtgtggatgtgaatgagtgcctgtcgaacccctgcccatccacagccacgtgcaacaatactcagggatcctttatctgcaaatgcccggttgggtaccagttggaaaaagggatatgcaatttggttagaaccttcgtgacagagtttaaattaaagagaacttttcttaatacaactgtggaaaaacattcagacctacaagaagttgaaaatgagatcaccaaaacgttaaatatgtgtttttcagcgttacctagttacatccgatctacagttcacgcctctagggagtccaacgcggtggtgatctcactgcaaacaaccttttccctggcctccaatgtgacgctatttgacctggctgataggatgcagaaatgtgtcaactcctgcaagtcctctgctgaggtctgccagctcttgggatctcagaggcggatctttagagcgggcagcttgtgcaagcggaagagtcccgaatgtgacaaagacacctccatctgcactgacctggacggcgttgccctgtgccagtgcaagtcgggatactttcagttcaacaagatggaccactcctgccgagcatgtgaagatggatataggcttgaaaatgaaacctgcatgagttgcccatttggccttggtggtctcaactgtggaaacccctatcagcttatcactgtggtgatcgcagccgcgggaggtgggctcctgctcatcctaggcatcgcactgattgttacctgttgcagaaagaataaaaatgacataagcaaactcatcttcaaaagtggagatttccaaatgtccccgtatgctgaataccccaaaaatcctcgctcacaagaatggggccgagaagctattgaaatgcatgagaatggaagtaccaaaaacctcctccagatgacggatgtgtactactcgcctacaagtgtaaggaatccagaacttgaacgaaacggactctacccggcctacactggactgccaggatcacggcattcttgcattttccccggacagtataacccgtctttcatcagtgatgaaagcagaagaagagactacttttaagtccaggagagagagggactcattgctctgagccagtcacctgggacctctgctcagaggaccgcaccaggaggctgcgcccaggatttgtcgggagccacgctgagtggcaagcaggaagagggacaggcatgcggggcgtgaccacagtggaggagacaggtggatgtggaaccacaggctgctcattcagcacctttgttgttactgtgaacgtgaatgtgggccagtatcaagagagtctctctgagtgactgcaccatggcactggcaccagggcgactattagccagggcagaccactagacttcagtgcagggacctggttttcccttcgtttgcactttagtaaattgggtgggaggtttccttttggatctgttttgagactgttccagaaagaaggcttcctttcccgagacacttccataggcagcaatttggtgattcatttgcagcaaaatactggcttgttaattattttcctgcccagcgcctgcgtgctaaacaacagatgaggatgagcgtaccactgaagtctgaagatgtcgccattgaacggacagtgttttcatatgtttctaggttgtcttatgctacagtttccaagccagcccccacagtgaggaaatgtgtgaggcaccgcacacaactgcaatgtgttttttaagtcaaggtgacacatgtatttaagattttttttttaaaatctctttgcagttaaatctcactttttcaaacaagcctggatcagggcaaaacaacttatatttggttttagctggaggctcagcaggcagattgcaggcaggggggcacttttcatccatgagggcccagcctggggcctgggactctgatcaccattgtggaggccagctgcactcctgcacggggttcctagctgcagaagggtcccgcctaggccgaggggaaacacctgaggaagaacagggagccgagatggagccacacatgagtttgctcaccggctactgcagcactttgtacccagaatctcatgtccacaaaccccatgtaaactttcaaccactcaaagctgtttattcggctgaagaaataacttttttttctcacccagtcatttgtacctcttcatatggctatgtcgcaccctccagaaacgtggttatacttccagtcagtgtgggagaactgaagacttccggttggtcgaggaactgagggttgaccttcgggaaggaagttccactcatcttatttattatgcctgtgatgtgggtcctgccagggagacatccagtactcggtgtctttaattgccacctggggaactgtgtttattggccttctttggggcatcctggttttggatgaagtgaggggaatacagaggtaaaagaattgtctccaccctgaagcggggagtcccgcttcacatttctggaaatggtgcagccactggggacagttctgccccgggcatggttgtttcttcaaggtcctctaaatataatccctattcttacataatccttggccctgatggttttaagcaagaactcctgtgtcccatggtctccaccactcaccatcaccctgctgtagcaagagtcctagtcaggggaggtgcattttagtagttaaattgcacttatccatgagataaataaaaggagaactgtttttatcagtggaggctaacctaaaatttcaaagtgtcgcctttttgaaatcttgggcctctctctctgtagaaccaatggccctttgtggcttcacggcctcgcacctaactggagagttctgagctcctgcagctcacctgagcccacagactaggcttcttggctccttccgcagcatgcctgctcacccccagaacccgcagctgtgggaagagccatgtagggaggctattcccaggcatacacttccactgccttcagctgacgtcacagctgacaaatcatctcctctatcggagccagaagacttcagctccacaaaatgaagtgttctgtcctgaaaacattcttgggaagaatcccaacatcgagaaaacggtgtcctgtgagttccaacaatgcttcttgttcatgggtttcttccgtatggagtggattaagagtgttttattttgttgttctaactgagaaaaaaaggaggcacccacaaggttgaggtcacacagtctccacagtttccaggaggcgtttgggggtggggaaggcacctccagagcatgaggctctaaggggacatgagtaaagcatgtctgtgacccagtgaggaagggagaggccagctgcactcctgcacggggttcctagctgcagaagggtcccgcctaggccgaggggaaacacctgatagcagaagaggcctggatgcacacctggcacgccgaggctctccgcccagacacagtgctccatgtcagcccctgcacctggggtgtgtgattcacgtgcacagatgccacaatcctgcaccaatatcccacagatgggggaaggtgagaggaaggggcaagtgatgtgtaactgctcaagagatgcttaaacctccatagagaggagccgggcgcaggggcatctgtgtgtcccgtcacacactgcagcagggaagggtggctggctggctccctggcatcagtggtttggtttaagctccagagggtcttattgccattgtcttttcctctgccccttgagccagcctaaggccctggagtctgtttctttaggcggatgaactgacatgctcctaccatgaccaggctctgggcaaggctcctcacagtatccttgagaggtgggcatggaagtgcccatttctcaggtacagaaaccttcagagaggataaatagcttgccctgtagaagcaggactgaaacccttgtccgcctgactcccccagctactctgcccactgtagccccctgccttactgtcctggcacacccctcaccatcctgtataccttaaatatcaaagagggcaagagagaaagggctttaaagataagttatttttttaaggaaccttaatattatttttaagaagtaaccaaattagtgacgtgaaatgcaaaaaaaaaaa

SEQ ID NO: 27491 - DNA, 3746 bp, Homo sapiens
atctgccccactttctgtctcacaaacaaccttgccacagtcatcttctacccctgtcctgcccagggcaagggagactcctgtgacttcatttcagacatcaacaatgacatcattcatgacaatgctccatagtagtcaaactgcagaccttaagagccagagcaccccacaccaagagaaagtcattacagaatcaaagtcaccaagcctggtgtctctgcccacagagtccaccaaagctgtaacaacaaactctcctttgcctccatccttaacagagtcctccacagagcaaacccttccagccacaagcaccaacttagcacaaatgtctccaactttcacaactaccattctgaagacctctcagcctcttatgaccactcctggcaccctgtcaagcacagcatctctggtcactggccctatagccgtacagactacagctggaaaacagctctcgctgacccatcctgaaatactagttcctcaaatctcaacagaaggtggcatcagcacagaaaggaaccgagtgattgtggatgctaccactggattgatccctttgaccagtgtacccacatcagcaaaagaaatgaccacaaagcttggcgttacagcagagtacagcccagcttcacgttccctcggaacatctccttctccccaaaccacagttgtttccacggctgaagacttggctcccaaatctgccacctttgctgttcagagcagcacacagtcaccaacaacactgtcctcttcagcctcagtcaacagctgtgctgtgaacccttgtcttcacaatggcgaatgcgtcgcagacaacaccagccgtggctaccactgcaggtgcccgccttcctggcaaggggatgattgcagtgtggatgtgaatgagtgcctgtcgaacccctgcccatccacagccacgtgcaacaatactcagggatcctttatctgcaaatgcccggttgggtaccagttggaaaaagggatatgcaatttggttagaaccttcgtgacagagtttaaattaaagagaacttttcttaatacaactgtggaaaaacattcagacctacaagaagttgaaaatgagatcaccaaaacgttaaatatgtgtttttcagcgttacctagttacatccgatctacagttcacgcctctagggagtccaacgcggtggtgatctcactgcaaacaaccttttccctggcctccaatgtgacgctatttgacctggctgataggatgcagaaatgtgtcaactcctgcaagtcctctgctgaggtctgccagctcttgggatctcagaggcggatctttagagcgggcagcttgtgcaagcggaagagtcccgaatgtgacaaagacacctccatctgcactgacctggacggcgttgccctgtgccagtgcaagtcgggatactttcagttcaacaagatggaccactcctgccgagcatgtgaagatggatataggcttgaaaatgaaacctgcatgagttgcccatttggccttggtggtctcaactgtggaaacccctatcagcttatcactgtggtgatcgcagccgcgggaggtgggctcctgctcatcctaggcatcgcactgattgttacctgttgcagaaagaataaaaatgacataagcaaactcatcttcaaaagtggagatttccaaatgtccccgtatgctgaataccccaaaaatcctcgctcacaagaatggggccgagaagctattgaaatgcatgagaatggaagtaccaaaaacctcctccagatgacggatgtgtactactcgcctacaagtgtaaggaatccagaacttgaacgaaacggactctacccggcctacactggactgccaggatcacggcattcttgcattttccccggacagtataacccgtctttcatcagtgatgaaagcagaagaagagactacttttaagtccaggagagagagggactcattgctctgagccagtcacctgggacctctgctcagaggaccgcaccaggaggctgcgcccaggatttgtcgggagccacgctgagtggcaagcaggaagagggacaggcatgcggggcgtgaccacagtggaggagacaggtggatgtggaaccacaggctgctcattcagcacctttgttgttactgtgaacgtgaatgtgggccagtatcaagagagtctctctgagtgactgcaccatggcactggcaccagggcgactattagccagggcagaccactagacttcagtgcagggacctggttttcccttcgtttgcactttagtaaattgggtgggaggtttccttttggatctgttttgagactgttccagaaagaaggcttcctttcccgagacacttccataggcagcaatttggtgattcatttgcagcaaaatactggcttgttaattattttcctgcccagcgcctgcgtgctaaacaacagatgaggatgagcgtaccactgaagtctgaagatgtcgccattgaacggacagtgttttcatatgtttctaggttgtcttatgctacagtttccaagccagcccccacagtgaggaaatgtgtgaggcaccgcacacaactgcaatgtgttttttaagtcaaggtgacacatgtatttaagattttttttttaaaatctctttgcagttaaatctcactttttcaaacaagcctggatcagggcaaaacaacttatatttggttttagctggaggctcagcaggcagattgcaggcaggggggcacttttcatccatgagggcccagcctggggcctgggactctgatcaccattgtggaggccagaggcagctgcgtatggaggagaaatgtcaaactgaacgcaggtttcaccactctaggaaagcagcttgttgagcccctgcagctggatgtggttagagggatgggctgaataggcaggttagatttcctgcatcaacagtgctttgggaagctgtgtggattcctgaggaagaacagggagccgagatggagccacacatgagtttgctcaccggctactgcagcactttgtacccagaatctcatgtccacaaaccccatgtaaactttcaaccactcaaagctgtttattcggctgaagaaataacttttttttctcacccagtcatttgtacctcttcatatggctatgtcgcaccctccagaaacgtggttatacttccagtcagtgtgggagaactgaagacttccggttggtcgaggaactgagggttgaccttcgggaaggaagttccactcatcttatttattatgcctgtgatgtgggtcctgccagggagacatccagtactcggtgtctttaattgccacctggggaactgtgtttattggccttctttggggcatcctggttttggatgaagtgaggggaatacagaggtaaaagaattgtctccaccctgaagcggggagtcccgcttcacatttctggaaatggtgcagccactggggacagttctgccccgggcatggttgtttcttcaaggtcctctaaatataatccctattcttacataatccttggccctgatggttttaagcaagaactcctgtgtcccatggtctccaccactcaccatcaccctgctgtagcaagagtcctagtcaggggaggtgcattttagtagttaaattgcacttatccatgagataaataaaaggagaactgtttttatcagtg

SEQ ID NO: 27492 - DNA, 653 bp, Homo sapiens
tactactactaaattcgcggccgcgtcgaccacaatcctgcaccaatatcccacagatgggggaaggtgagaggaaggggcaagtgatgtgtaactgctcaagagatgcttaaacctccatagagaggagccgggcgcaggggcatctgtgtgtcccgtcacacactgcagcagggaagggtggctggctggctccctggcatcagtggtttggtttaagctccagagggtcttattgccattgtcttttcctctgccccttgagccagcctaaggccctggagtctgtttctttaggcggatgaactgacatgctcctaccatgaccaggctctgggcaaggctcctcacagtatccttgagaggtgggcatggaagtgcccatttctcaggtacagaaaccttcagagaggataaatagcttgccctgtagaagcaggactgaaacccttgtccgcctgactcccccagctactctgcccactgtagccccctgccttactgtcctggcacacccctcaccatcctgtataccttaaatatcaaagagggcaagagagaaagggctttaaagataagttatttttttaaggaaccttaatattatttttaagaagtaaccaaattagtgacgtgaaatgcaaaaaaaaaaa

SEQ ID NO: 27493 - DNA, 435 bp, Homo sapiens
cagggtggtgactgtagagtcaggggagaccattcttgagaactcactcattccttcattacctccagccaatatgcttttttgtttgttttacgtttagcctatcagcttatcactgtggtgatcgcagccgcgggaggtgggctcctgctcatcctaggcatcgcactgattgttacctgttgcaggtaagtgatgagagttcaggttccaatcccgttcctttgcctgtgctatacaagggtcagtttgtattcttttacaggatacttgagatggttcacaatattaaaccataatgtgtgactaacccatttttaaaaaaggagaaagggaattcacgatagttggtgcctgtgaggaaaaagaaggggagtaaatggaacttcattttctttattagaaaagaatagctgaaagcacaagcaggaaatg

SEQ ID NO: 27494 - DNA, 5155 bp, Homo sapiens
atctgccccactttctgtctcacaaacaaccttgccacagtcatcttctacccctgtcctgcccagggcaagggagactcctgtgacttcatttcagacatcaacaatgacatcattcatgacaatgctccatagtagtcaaactgcagaccttaagagccagagcaccccacaccaagagaaagtcattacagaatcaaagtcaccaagcctggtgtctctgcccacagagtccaccaaagctgtaacaacaaactctcctttgcctccatccttaacagagtcctccacagagcaaacccttccagccacaagcaccaacttagcacaaatgtctccaactttcacaactaccattctgaagacctctcagcctcttatgaccactcctggcaccctgtcaagcacagcatctctggtcactggccctatagccgtacagactacagctggaaaacagctctcgctgacccatcctgaaatactagttcctcaaatctcaacagaaggtggcatcagcacagaaaggaaccgagtgattgtggatgctaccactggattgatccctttgaccagtgtacccacatcagcaaaagaaatgaccacaaagcttggcgttacagcagagtacagcccagcttcacgttccctcggaacatctccttctccccaaaccacagttgtttccacggctgaagacttggctcccaaatctgccacctttgctgttcagagcagcacacagtcaccaacaacactgtcctcttcagcctcagtcaacagctgtgctgtgaacccttgtcttcacaatggcgaatgcgtcgcagacaacaccagccgtggctaccactgcaggtgcccgccttcctggcaaggggatgattgcagtgtggatgtgaatgagtgcctgtcgaacccctgcccatccacagccacgtgcaacaatactcagggatcctttatctgcaaatgcccggttgggtaccagttggaaaaagggatatgcaatttggttagaaccttcgtgacagagtttaaattaaagagaacttttcttaatacaactgtggaaaaacattcagacctacaagaagttgaaaatgagatcaccaaaacgttaaatatgtgtttttcagcgttacctagttacatccgatctacagttcacgcctctagggagtccaacgcggtggtgatctcactgcaaacaaccttttccctggcctccaatgtgacgctatttgacctggctgataggatgcagaaatgtgtcaactcctgcaagtcctctgctgaggtctgccagctcttgggatctcagaggcggatctttagagcgggcagcttgtgcaagcggaagagtcccgaatgtgacaaagacacctccatctgcactgacctggacggcgttgccctgtgccagtgcaagtcgggatactttcagttcaacaagatggaccactcctgccgagcatgtgaagatggatataggcttgaaaatgaaacctgcatgagttgcccatttggccttggtggtctcaactgtggaaacccctatcagcttatcactgtggtgatcgcagccgcgggaggtgggctcctgctcatcctaggcatcgcactgattgttacctgttgcagaaagaataaaaatgacataagcaaactcatcttcaaaagtggagatttccaaatgtccccgtatgctgaataccccaaaaatcctcgctcacaagaatggggccgagaagctattgaaatgcatgagaatggaagtaccaaaaacctcctccagatgacggatgtgtactactcgcctacaagtgtaaggaatccagaacttgaacgaaacggactctacccggcctacactggactgccaggatcacggcattcttgcattttccccggacagtataacccgtctttcatcagtgatgaaagcagaagaagagactacttttaagtccaggagagagagggactcattgctctgagccagtcacctgggacctctgctcagaggaccgcaccaggaggctgcgcccaggatttgtcgggagccacgctgagtggcaagcaggaagagggacaggcatgcggggcgtgaccacagtggaggagacaggtggatgtggaaccacaggctgctcattcagcacctttgttgttactgtgaacgtgaatgtgggccagtatcaagagagtctctctgagtgactgcaccatggcactggcaccagggcgactattagccagggcagaccactagacttcagtgcagggacctggttttcccttcgtttgcactttagtaaattgggtgggaggtttccttttggatctgttttgagactgttccagaaagaaggcttcctttcccgagacacttccataggcagcaatttggtgattcatttgcagcaaaatactggcttgttaattattttcctgcccagcgcctgcgtgctaaacaacagatgaggatgagcgtaccactgaagtctgaagatgtcgccattgaacggacagtgttttcatatgtttctaggttgtcttatgctacagtttccaagccagcccccacagtgaggaaatgtgtgaggcaccgcacacaactgcaatgtgttttttaagtcaaggtgacacatgtatttaagattttttttttaaaatctctttgcagttaaatctcactttttcaaacaagcctggatcagggcaaaacaacttatatttggttttagctggaggctcagcaggcagattgcaggcaggggggcacttttcatccatgagggcccagcctggggcctgggactctgatcaccattgtggaggccagaggcagctgcgtatggaggagaaatgtcaaactgaacgcaggtttcaccactctaggaaagcagcttgttgagcccctgcagctggatgtggttagagggatgggctgaataggcaggttagatttcctgcatcaacagtgctttgggaagctgtgtggattcctgaggaagaacagggagccgagatggagccacacatgagtttgctcaccggctactgcagcactttgtacccagaatctcatgtccacaaaccccatgtaaactttcaaccactcaaagctgtttattcggctgaagaaataacttttttttctcacccagtcatttgtacctcttcatatggctatgtcgcaccctccagaaacgtggttatacttccagtcagtgtgggagaactgaagacttccggttggtcgaggaactgagggttgaccttcgggaaggaagttccactcatcttatttattatgcctgtgatgtgggtcctgccagggagacatccagtactcggtgtctttaattgccacctggggaactgtgtttattggccttctttggggcatcctggttttggatgaagtgaggggaatacagaggtaaaagaattgtctccaccctgaagcggggagtcccgcttcacatttctggaaatggtgcagccactggggacagttctgccccgggcatggttgtttcttcaaggtcctctaaatataatccctattcttacataatccttggccctgatggttttaagcaagaactcctgtgtcccatggtctccaccactcaccatcaccctgctgtagcaagagtcctagtcaggggaggtgcattttagtagttaaattgcacttatccatgagataaataaaaggagaactgtttttatcagtggaggctaacctaaaatttcaaagtgtcgcctttttgaaatcttgggcctctctctctgtagaaccaatggccctttgtggcttcacggcctcgcacctaactggagagttctgagctcctgcagctcacctgagcccacagactaggcttcttggctccttccgcagcatgcctgctcacccccagaacccgcagctgtgggaagagccatgtagggaggctattcccaggcatacacttccactgccttcagctgacgtcacagctgacaaatcatctcctctatcggagccagaagacttcagctccacaaaatgaagtgttctgtcctgaaaacattcttgggaagaatcccaacatcgagaaaacggtgtcctgtgagttccaacaatgcttcttgttcatgggtttcttccgtatggagtggattaagagtgttttattttgttgttctaactgagaaaaaaaggaggcacccacaaggttgaggtcacacagtctccacagtttccaggaggcgtttgggggtggggaaggcacctccagagcatgaggctctaaggggacatgagtaaagcatgtctgtgacccagtgaggaagggagaggccagctgcactcctgcacggggttcctagctgcagaagggtcccgcctaggccgaggggaaacacctgatagcagaagaggcctggatgcacacctggcacgccgaggctctccgcccagacacagtgctccatgtcagcccctgcacctggggtgtgtgattcacgtgcacagatgccacaatcctgcaccaatatcccacagatgggggaaggtgagaggaaggggcaagtgatgtgtaactgctcaagagatgcttaaacctccatagagaggagccgggcgcaggggcatctgtgtgtcccgtcacacactgcagcagggaagggtggctggctggctccctggcatcagtggtttggtttaagctccagagggtcttattgccattgtcttttcctctgccccttgagccagcctaaggccctggagtctgtttctttaggcggatgaactgacatgctcctaccatgaccaggctctgggcaaggctcctcacagtatccttgagaggtgggcatggaagtgcccatttctcaggtacagaaaccttcagagaggataaatagcttgccctgtagaagcaggactgaaacccttgtccgcctgactcccccagctactctgcccactgtagccccctgccttactgtcctggcacacccctcaccatcctgtataccttaaatatcaaagagggcaagagagaaagggctttaaagataagttatttttttaaggaaccttaatattatttttaagaagtaaccaaattagtgacgtgaaatgcaaaaaaaaaaa

SEQ ID NO: 27495 - DNA, 3409 bp, Homo sapiens
atctgccccactttctgtctcacaaacaaccttgccacagtcatcttctacccctgtcctgcccagggcaagggagactcctgtgacttcatttcagacatcaacaatgacatcattcatgacaatgctccatagtagtcaaactgcagaccttaagagccagagcaccccacaccaagagaaagtcattacagaatcaaagtcaccaagcctggtgtctctgcccacagagtccaccaaagctgtaacaacaaactctcctttgcctccatccttaacagagtcctccacagagcaaacccttccagccacaagcaccaacttagcacaaatgtctccaactttcacaactaccattctgaagacctctcagcctcttatgaccactcctggcaccctgtcaagcacagcatctctggtcactggccctatagccgtacagactacagctggaaaacagctctcgctgacccatcctgaaatactagttcctcaaatctcaacagaaggtggcatcagcacagaaaggaaccgagtgattgtggatgctaccactggattgatccctttgaccagtgtacccacatcagcaaaagaaatgaccacaaagcttggcgttacagcagagtacagcccagcttcacgttccctcggaacatctccttctccccaaaccacagttgtttccacggctgaagacttggctcccaaatctgccacctttgctgttcagagcagcacacagtcaccaacaacactgtcctcttcagcctcagtcaacagctgtgctgtgaacccttgtcttcacaatggcgaatgcgtcgcagacaacaccagccgtggctaccactgcaggtgcccgccttcctggcaaggggatgattgcagtgtggatgtgaatgagtgcctgtcgaacccctgcccatccacagccacgtgcaacaatactcagggatcctttatctgcaaatgcccggttgggtaccagttggaaaaagggatatgcaatttggttagaaccttcgtgacagagtttaaattaaagagaacttttcttaatacaactgtggaaaaacattcagacctacaagaagttgaaaatgagatcaccaaaacgttaaatatgtgtttttcagcgttacctagttacatccgatctacagttcacgcctctagggagtccaacgcggtggtgatctcactgcaaacaaccttttccctggcctccaatgtgacgctatttgacctggctgataggatgcagaaatgtgtcaactcctgcaagtcctctgctgaggtctgccagctcttgggatctcagaggcggatctttagagcgggcagcttgtgcaagcggaagagtcccgaatgtgacaaagacacctccatctgcactgacctggacggcgttgccctgtgccagtgcaagtcgggatactttcagttcaacaagatggaccactcctgccgagcatgtgaagatggatataggcttgaaaatgaaacctgcatgagttgcccatttggccttggtggtctcaactgtggaaacccctatcagcttatcactgtggtgatcgcagccgcgggaggtgggctcctgctcatcctaggcatcgcactgattgttacctgttgcagaaagaataaaaatgacataagcaaactcatcttcaaaagtggagatttccaaatgtccccgtatgctgaataccccaaaaatcctcgctcacaagaatggggccgagaagctattgaaatgcatgagaatggaagtaccaaaaacctcctccagatgacggatgtgtactactcgcctacaagtgtaaggaatccagaacttgaacgaaacggactctacccggcctacactggactgccaggatcacggcattcttgcattttccccggacagtataacccgtctttcatcagtgatgaaagcagaagaagagactacttttaagtccaggagagagagggactcattgctctgagccagtcacctgggacctctgctcagaggaccgcaccaggaggctgcgcccaggatttgtcgggagccacgctgagtggcaagcaggaagagggacaggcatgcggggcgtgaccacagtggaggagacaggtggatgtggaaccacaggctgctcattcagcacctttgttgttactgtgaacgtgaatgtgggccagtatcaagagagtctctctgagtgactgcaccatggcactggcaccagggcgactattagccagggcagaccactagacttcagtgcagggacctggttttcccttcgtttgcactttagtaaattgggtgggaggtttccttttggatctgttttgagactgttccagaaagaaggcttcctttcccgagacacttccataggcagcaatttggtgattcatttgcagcaaaatactggcttgttaattattttcctgcccagcgcctgcgtgctaaacaacagatgaggatgagcgtaccactgaagtctgaagatgtcgccattgaacggacagtgttttcatatgtttctaggttgtcttatgctacagtttccaagccagcccccacagtgaggaaatgtgtgaggcaccgcacacaactgcaatgtgttttttaagtcaaggtgacacatgtatttaagattttttttttaaaatctctttgcagttaaatctcactttttcaaacaagcctggatcagggcaaaacaacttatatttggttttagctggaggctcagcaggcagattgcaggcaggggggcacttttcatccatgagggcccagcctggggcctgggactctgatcaccattgtggaggccagaggcagctgcgtatggaggagaaatgtcaaactgaacgcaggtttcaccactctaggaaagcagcttgttgagcccctgcagctggatgtggttagagggatgggctgaataggcaggttagatttcctgcatcaacagtgctttgggaagctgtgtggattcctgaggaagaacagggagccgagatggagccacacatgagtttgctcaccggctactgcagcactttgtacccagaatctcatgtccacaaaccccatgtaaactttcaaccactcaaagctgtttattcggctgaagaaataacttttttttctcacccagtcatttgtacctcttcatatggctatgtcgcaccccttgtccgcctgactcccccagctactctgcccactgtagccccctgccttactgtcctggcacacccctcaccatcctgtataccttaaatatcaaagagggcaagagagaaagggctttaaagataagttatttttttaaggaaccttaatattatttttaagaagtaaccaaattagtgacgtgaaatgcaaaaaaaaaaa

SEQ ID NO: 27496 - DNA, 407 bp, Homo sapiens
gggaatttttaaaaatacttgcttacatgtcttaaaacatacttgaaatatgtgcctagagtgatcctattaaccacaggcacacagtgcacataaggcaatcctatgttttgtatctgtgcacaaatagctttaggacagaatttaaatgtgccaaaacccaaagttcttccagatgtatgctttcactgatttctggaaaattgcttcacagtaccctctcaaagtacatagaccacattataaaatccagaggccactatgcacttttacaacatcattgcgttgactcatgctgtcatttgtcagtgaaatgatgttgtaaatctctcatctttctatgctgcctggcttagacttattatagagttttccaaattcctaccctcattaatgactctttttct

SEQ ID NO: 27497 - DNA, 474 bp, Homo sapiens
acatgaccctccctaccccaagcctcagcttttgcaagagccaatgccatatgtgccacataatgtaaaacaaaatttctcagcaacattttttctgtgggacatctatctgccatattgttgtatctttttcagatatatccattctgcttcacttcttagcagtattcctagaaaagagggtttgatttggccgcgcatggtggctcacgcctgtaatcccagcactttgggaggccgaggctggcggatcacgaggtcaggagatcgagaccatcctggctaatacggtgaaaccctgtctctactaaaaatacaaaaaaattagccgggcgtggtggcgggtgcctgtagtcccagctactctggaggctgaggcaggagaatggtgtcaacccgggaggcggagtttgcagtgagccgagatcgcgccactgcattccagcctgggtgacagagggagactccatctca

SEQ ID NO: 27498 - DNA, 365 bp, Homo sapiens
ctggtcttgaactcctgacctcaggtgatccacctgcctcggtgccctggagtactgcgattccaggtgtgagccaccacgcctggccctcactgcactcatgagcaagaaacacacagccgaggccggtcacggtggctcacgcctagaatcctagcactttgggaggctgaggccagacgatcgtctgagctcaggagtttgagacccgcctgggtaacatggcaagacccttttctatgaaaaatagaaaaaatcagccgggtgtgtgggtggtgcatgcctgtggtcccggctacttgggaggccgaggtgggaggatcacttgagcccaagagatggaggctgcagtgagacgtgactgg

SEQ ID NO: 27499 - DNA, 684 bp, Homo sapiens
ctgttcggcacgtggaaggattgttacagttggggtaccaggtgggttgggaaggaagggaagtggtgcatgaaactgagatttaaatttattttaaaataaatccatgttgtcccacagcataggattagtgggaagaaatgggctttggaatgagacagttgtgagttccaaccccaacccaacaccagagttctgtgagtctgagctggttattgagtctgagtcacgatttcttcatgtatcaaatggataacattgagataacattctgtagccactgccaagaagtcacaaaattgtaatgttataattcttgaatggaaccttgggagattattccagtcccaggtttttaacttcttttggctgatgggcctctttgataatcagatggaagctttagacccactttctagaaagatgcaaattcttcatgtgtatgcagaatttcatgcatataattttagtctgattagtccagtctcttcactttagtcctgcataaagacataaacaattggccaggcacggtgctcatgcctataatcctactgaaatcctaaagctctgggagcctgagttgggaagattgcttaaggcaggagtttgagaccagcctgggcaacatagtgagactccctaaaatctggcctgggtgacagagctagctctgtctcttaa

SEQ ID NO: 27500 - DNA, 769 bp, Homo sapiens
ctgaaagctgacctgggccacgtgtggcccgctggctgtgcattgggcaagcttcatctaaacatggaaaaggtacagtataaaagataagaaatggtacacctgtatagggcacttaccgtgaatggagcttttaggactggaagttgctctggtaagtcagtgagtgagtggtgagtgaatgtgaaggcctaagacatcactgtacactactgtagatgttataaacagtgtatacttagacgactataaattaatgttaaaaataaagtaattcaactacaatgtctctaggcaataggaactttttggctctattataatcttatggggccacctttttatatgcagtcggttgttgactgaaactttatgtggcatgtgatcataatgcttggattctgaaagttttctctccaagggcgtgcaaccattttggtataaaagcaggtaagatgaagtgaaagaattgtgaggcagatggagtgatatatgcctgtggtcccatcctagctactcaggaatctgaggcaggaagatggtttgagcccagaagttggaggttatagggtgctagctgcggtcgtgatcatagctcaccgcaaccttgaacccctgggcttaagcagtctttccatctcagcctcctgagtagctggaactacaggtgtatgccacccatgcctagctaatttttttttttttaatttttagtatagatgaggtcttgatatattgcccaggctggaaaaactttttaaagcaataa

SEQ ID NO: 27501 - DNA, 388 bp, Homo sapiens
ctcttaactatatttctagataacactattttactgtgtggcagccattgtcagtgagttttttttaggaagaaaagctaaaataatactttatgtatttatacaaataaacataaagtgataatattgttcagatttaccttttgattcaggtgatctcaaaaagtcttccccaaagtattctttgatattgaatgcttaccttttatttacttatgtttgttagttgctttaaagtatttttcaagcaaataactttttaatttctattaataagttactttttatcatcttaagtttagattctgcatgtttgcatataattagaaattaggattatatatgatcagaaatttgtggacaatgatagcacttccataatacatag

SEQ ID NO: 27502 - DNA, 163 bp, Homo sapiens
gccagttcccagagataataaaggactcctgctcagaagcaggcctttcatgtgcaaaccaaccaatccagagcccacaccccaccaaaaccccaaagcacaaattataagtgaacacattgatggatttaagcacatcaaaaataacatcttttttttaagc

SEQ ID NO: 27503 - DNA, 945 bp, Homo sapiens
atggaatttacagatagaaactacacgttggtcactgagtttattctattaggttttccaactcgccctgaactgcagattgtcctgttcctcatgtttctgacattgtatgctataattctgatagggaacattggattgatgctgttgatcaggattgatcctcaccttcaaacccccatgtattttttccttagcaacctatcatttgtagacctttgctatttctcagacattgttcccaaaatgctggtcaatttcctctcggagaacaaatctatttcctattatgggtgtgccctgcagttttattttttctgtacttttgcagatacagaatccttcatcctggccgccatggcctatgatcgctatgtcgccatctgtaaccctttattgtacacagttgtgatgtctaggggcatctgtatgcggttgattgtcttgtcataccttggaggcaacatgagttccctggttcacacatcctttgcctttattctgaaatattgtgacaaaaatgttattaatcattttttctgtgacctccctcccctgcttaaactatcctgcactgacacaacaattaatgagtggctcctctccacatacggcagctcagtggaaatcatttgttttatcatcatcatcatctcctactttttcattcttctctcagtcttaaagatccgctctttcagtgggaggaagaagaccttttctacatgcgcctctcacctgacttcagtgacgatctaccaagggactctcctctttatttactcacggcccagctacctgtattctccaaacactgataaaattatctcagtgttctacaccattttcattccagtgctgaatccgttgatttatagtttgagaaataaagatgtaaaggatgcagctgagaaagttctaagatcaaaggtagattcttcatga

SEQ ID NO: 27504 - DNA, 341 bp, Homo sapiens
aagattattgatagaaggattaattggacctcactcaccttttctgtgccataaggaaagcagttaggtaaagctgaccttctttggagggaagacacaaggtcaaggcatgcccatcaggatgccctttgggcctagacctgatgtgagaatgatgggcttggagtgttctggaaatagctgggaggcctgtgtgtttaggagcaccttaaacagtaggatataagggcagagaagtagctgggaactgagaaaagaactttggctgttattctagtaagactgaaaatttcaggtgggatttgaacagagatgtgttgtgatctgacttggtggttcat

SEQ ID NO: 27505 - DNA, 1274 bp, Homo sapiens
aagaggatgcagaatcttagggagtgaggcaagcagggaaaacacgtccatctgttcatgtccagagatggtttagccaactgggccactgagttcagtgtctaaaatatgctgagagaaaacagacaacagttagaaaaaagagagccacatcaaggaggtccagcaagatgccatcctatcagacaaacgagagcagagcaatccaagacaagcagtatttgcaggttgagtacaggtccaggcaggcatccagcactgtgttagtctgtttgggctgctgggacaaaataccgtagactgggggacttaaacaacaaaatggattttcttgtaattctggaggccagaagtccaggatcaaggtgttggcagggttggttgcttctgaggcccctctcctgggcttgtaggtgactcacttctccctgtgacttcacttggtcttccctatgtatgtgtctgtatcctaatctttatttctcataaggacacgagtcctattgccttagggcccaccctaatgatctcattatgcacttaatttacctctttcaagaccctaactccaaatgcagtcacattctgtggtgcttggggtaagactacatgatacaaattgtgagtttaaaacataattcagcccataatgaaaaatcaaggtggttttacggtagatcgaagggccatttaaggggtaggaaaataaagccactgagtcaatgaagggttggatatcattgttggtggggaaaggggagactggtaagaaaaccaaggcatctagagaactaagtagcatgatcaggaataggagagaaatgtggattgttgggggtgtgaggggaagctatggttggggtcatggtaggaaccctggttctagttcagcacttaaccagccagggtctagggtgctcatccttctaacactgactcagaactttaattgttttcttgactgaatttgtccctgagcccgaagcagggatctgcttgccgtgaagattaggttagttcagttaaggggacaggagaactttagagccatgagccagtggaccagtaagaattattttctttggagctgggcacagtagctcatgcttgtaatgccaggactttgggaggccgaggcaggtggatggagaccagcctgggcaatgtggtgaaactgcatctctacaaaaaataaaaataataataatacaaaaattagccaggcgtgatggtgcgtacctgtaatcccagctacttgagaggctaaggtggga

SEQ ID NO: 27506 - DNA, 317 bp, Homo sapiens
ttttttttttcttaatttccctgggctccatggattgtgtgtatgtgtatgaatgagagagagaaagagagagagaatttcgtatgttactcaggtggcatttgggaacgaacggtgctcaaaatagaaatggatagtattcgccctcactctgccaagaacacagagtccgaccatgtctatggagaagcagatggcatcatgtggggacacctgaggcagggaaggtgcaatacctaaactgattttgatgttggcaagagtccccgtttaccgactaagcatgaacgtgccaacagctattgagaaaagaggtt

SEQ ID NO: 27507 - DNA, 432 bp, Homo sapiens
gatagtaagaggcagggcttaggcatgggtatatgatttaattatgaccagtgaagttgacaaggaaatgtgggaaaatagccatctttcaaccatgaggagtgacatcaccaagtcactcaagatggcagagtagaaaacagaaaataccatgtgggacactaataagatcattatgacaattcattaactgccaatactccaaattttttgttgagtgagaagatacacccttactgtttactttacttgtagtaaggccttctattacttatatttttattaacacagaaaagtttttacgaatattcacacagtttcccacactgggttaagtcaaactaacacgaagttggattgattcctctggtagaagtcaggggttttccctttcttcatgctgcatgcctagacaacatgtcacatgacaat

SEQ ID NO: 27508 - DNA, 470 bp, Homo sapiens
taaactgttgctatactagattaaactgattgccttctagtggtaaaccagactttcagctatttctttccatgtttctatgttctgccctttttttctttccttctgggactcagatgataggaagctcggcccttttgttattacctaaggtctctatggttctgttcaaggttttcaaactttgtctgttactcagattcagtcatttctattaatttatttatgaactgactgactacttcctccatcatcttcatcccagtagtgagcccagccagtgtgttttctatttttgtagttgattttttcatttctaatatttccacttagttcttcttcatatcttccatttctttgcaaaattttctatatgttttaagagtaccctcctttacttgtacaatatttttaacaactgcttgaaaatctttgtcaaataattccagtatctgtttcatctcagagta

SEQ ID NO: 27509 - DNA, 349 bp, Homo sapiens
ggagacatgccaatggcaggacttatagaccagtcgtaggatccctaagtcctctctgagggtctggcctggatcccaatacctctgcatcctgccttgtctctccaaaaatatttatctttagagagagttcggagggccaagcaaagcttgtctaaaccgcagagagatgcacctgctcctggtccggggcctctggacctccctcccctccaccctgtcctgactcctttacatggacccttgtcaccccacctgcggccccagaagctcaaaggaagagctgacctggggtacacaacacccccttcccctgtacaaatcccagtctgggtcctaccttgaaggg

SEQ ID NO: 27510 - DNA, 1334 bp, Homo sapiens
aaagaaaatgtggctgcccagaaggtcaatcatgagtgagttgtgattgcgcccctgtactccagcctgggcaacagagtgagacacagtctgaaataaataaataaataaacaaaataaaaacaaataagtaaatgaaattaaaacaaaacccaaaatacggtcttaaaaaaaggacatttagtaaaataataggaaatctaagacattaacaagtgagtcttctttattttctaccttagttgatttaatgaaatccagtgatttcatattctcccatttgcacaaaacaaaaattcatagatactttgaagagttggaagggaactgagaaggcctgtatcccaagcaactatacagtacagaatcttgggaaaagcttgccttagagatgaccatttcgggttttgcttgaattggaaatcttctacctgtctcaccttttagacatccttaattgttccctaaattgttcctaaatttgcttccttgtaatgtctttctggacctgccatctcttgctacaaagaacataaaaaaccaaaaaccatttcttgatgagattctgcccttcatctcctatctctctaagtctttcatttgccacatttaccatcactttgtttaaggaggaggcactgtagtccgagtgaggagggatgaagaggtgaagagatgggtctctacttctacctcttgcattgaccatactggtgactttgggtgagccacctttccattagggcctctgtttctttcttgtcaggtgagggagatggacttagatgacttagatgatttttttttttttgagacgaaatctactttgttgcacaggctggtgtgcagtggcacggtcatagctcactgcagcctttacctcctgggctcaagcgatcctctcaccttggcctcccaaagtgttgggattacaggcatgagctactgaccccagcctagatgacctttaagcttgctttcaacctgcattctggagttattagcttttcagctgaggtttttattaaatggttttatttgtcatcttctgtctgcccccttgtggacattgttttgggaagaaaataaaatatttaattgctcgaagaacaatataatgaccatctcaccctccaaaaattcacttgcatcacactgtttgttttcagttattcatgttcacttctagtcgtcgttcataaatgtacatcattttacatggttgaatcatatcagggacataattttgtactttcccccctccctgataaagatgatgtttttacagtaaaataaaaaaatgcttgtgattcaataagcttttaaaatattac

SEQ ID NO: 27511 - DNA, 1695 bp, Homo sapiens
  misc_feature (45)..(45): n is a, c, g, or t
  misc_feature (51)..(51): n is a, c, g, or t
  misc_feature (74)..(74): n is a, c, g, or t
  misc_feature (88)..(88): n is a, c, g, or t
  misc_feature (100)..(100): n is a, c, g, or t
  misc_feature (110)..(110): n is a, c, g, or t
  misc_feature (126)..(126): n is a, c, g, or t
  misc_feature (137)..(137): n is a, c, g, or t
  misc_feature (151)..(151): n is a, c, g, or t
  misc_feature (168)..(168): n is a, c, g, or t
  misc_feature (171)..(171): n is a, c, g, or t
  misc_feature (208)..(208): n is a, c, g, or t
  misc_feature (543)..(543): n is a, c, g, or t
  misc_feature (611)..(611): n is a, c, g, or t
  misc_feature (978)..(978): n is a, c, g, or t
  misc_feature (1395)..(1395): n is a, c, g, or t
  misc_feature (1461)..(1461): n is a, c, g, or t
  misc_feature (1467)..(1467): n is a, c, g, or t
  misc_feature (1531)..(1531): n is a, c, g, or t
  misc_feature (1537)..(1537): n is a, c, g, or t
  misc_feature (1544)..(1544): n is a, c, g, or t
  misc_feature (1578)..(1578): n is a, c, g, or t
  misc_feature (1587)..(1587): n is a, c, g, or t
  misc_feature (1598)..(1598): n is a, c, g, or t
  misc_feature (1607)..(1607): n is a, c, g, or t
  misc_feature (1621)..(1621): n is a, c, g, or t
  misc_feature (1677)..(1677): n is a, c, g, or t
  misc_feature (1681)..(1681): n is a, c, g, or t
  misc_feature (1683)..(1683): n is a, c, g, or t
  misc_feature (1686)..(1686): n is a, c, g, or t
  misc_feature (1688)..(1691): n is a, c, g, or t
tggagatagagtcttgctctgtcacccaggctggatcttggctcnctgcancctctgcctcctgggttcaagcnattctcctgccttngcctctcgagtngctgggattncaggcacctgccaccncgcccggctantttttgtatttttngcagagatggggtttcnccntgttggccaggatggtctcgatctcttgacctcatgntctgcctgccttggcctcccaaagtgccggaattacaggcatgagccaccacacctggccactgttctcaaattgtattatggagttttttttttttacaaaatatggatatattttaatttactcaaatgggaactactgataagcagttcttatttttccagcataagcaaggctacaataaatatctttgaatatatgtactgatgctttttgttttttgttgaagctatatcccaataagtgataagtacggtctaagagagaacatgttttttacaattttgattgatatcatattgggccacgcatggtggctcaggcctggcatcccngcactttgggaggttgaggtgggaggatagcttgagctcaggagttcaagaccagcttgagcaacctngtgagacctcatctctactaaaaaaacaaaacaaacaaacacaaaattagctaggtgtggtggcatgtgccagtagtcccagctagttgggaggctgaggtggaaagattgcttgatcctgggaggttgaggctacagtgagctgtgatggtatcactgcactctatcctggacaacacagcaagaacctgcctcaaacaaatgtatttggttgatattgtatcagatttcttctgaaaaacgttttaatggtttagactttcaccaagtgcaagaaactggcattttctttgtaactggcctggaatgttaccactcttttaaacttttgtcaagatgatcgtgagaaatagtatctaattacttnaatttgcatttccctgactcctaatgaagttcagcatctcttcaaatctttattgggcatttggattttctcttcagtgaattgcttcatcatattctccatttattctaaagttgtgttcctatttgtcgctttcaaatctagtttggtggaatccttgcatgttagaaaccttaaccctcgtaatatgtgttgtagatatttttccctcgcctatgagttgtctttcatccttgagcatgagttttagagtcagaagaacaacagtaggatttgaatcatgttacgttattttctagttgtcgtattttttatttcttcagcctcttagaatcttagtttcctttaaaattgagataatagtatctactttattcaaaaaaattttttggctggacgcggtggctcacgcttgtnatcccaccattttgggaggccaaggcaggcggatcacctgaggtcaggagtttgagaccagcttgnccaacntggtgaaaacccatctctactaaaaatacaaaaattagccaggtacagcggggcatgcctgtantcccangtactcnggaggctgaggcaggagaatcacttgacccgggnggcagagangaggtagtganctgaatcgnaccactgcactccngcctgagtggtagggcgagactctgtctcaaaaaaaaaatgttttttcattatttntttntnganannnncttc

SEQ ID NO: 27512 - DNA, 3339 bp, Homo sapiens
cagagagcgttgagctgggaacagtgacaagtgcttatcaagttccttcactctcaacacggttgacaagaactgatggcattatggaacacatcacaaaaatacccaatgaagcagcacacagaggtaccataagaccagtcaaaggccctcagacatccacttcgcctgccagtcctaaaggactacacacaggagggacaaaaagaatggagaccaccaccacagctctgaagaccaccaccacagctctgaagaccacttccagagccaccttgaccaccagtgtctatactcccactttgggaacactgactcccctcaatgcatcaatgcaaatggccagcacaatccccacagaaatgatgatcacaaccccatatgttttccctgatgttccagaaacgacatcctcattggctaccagcctggggggaggtgggctgggctggctctgggagttctggaagctcccaagctttgtagctcaggccaacagagcccagggacagaggcagagccccagaggggtgacaccccctctgagtcccattcgttcacctatcttctatggccgccccatagccatactgcccattagcgtggccgccagcattacagctcagaggcatcgccgctacaaagctttggtggcatcagagccgctcagtgtgcggctctatcgtctgggcttggcttaccttgctttcacaggcccactggcatacagtgccctctgcaacacagctgccaccctcagctatgtggcagaaacctttggctccttcttgaattggttcagcttcttcccccttcttggccgcctcatggagtttgtcctccttctgccttaccggatctggaggctactgatgggggagactggcttcaacagcagctgctttcaggagtgggcgaagctctatgagtttgttcacagttttcaggatgagaagcgtcagctggcttaccaggttttgggcctctcagaaggggcaacaaatgaagaaatacatcggagttaccaggagctagtgaaggtctggcacccagaccacaacctggaccagacagaggaggcacagaggcacttcctggagatccaggctgcgtatgaagtcctgagtcaacccaggaagccctggggatcccggaggtgaaaagaaacttccccctgaggactgactcttcctagcagagctgggcaacttgtcccaaatctagctttgcccacgaatggcatcccaacagagttaaagaaactgcttgcaggggctgggcgtggtggctcatgcctgtaatcccagcactttgggaggccgaggcgggcagatcacgaggtcaggagttcgagaccagcagcctggccaatatagtgaaacttcgtctctactaaaaatacaaaaaattagccaggagtggtggcaggcacctgtagtcccagctacttgggaggctgaggcaggagaatcacctgaacctgagaggcggaggttgcagtgagccgagatcacgccactgcactccagcctgggcaacaagagtgaaactccgtctcaaaaaaaaaaaaaaagaaagaaaaactgcttgcaggggacatgagaaaacaatggggtgagaaaaggttgtggtagaaggatgtgtttatattctgaatttctgaattcttggctattgcattcttgacaatttttcttaaaaccagagagtgaaaggcatattataaaacaatcaaatatcttttagagtatggacaactattatatatcaataaaaaattaattagaaaaaatatatcttttagagaacacaccaccttatcccacccatgatatattgatgtgtgatggagaaagattatttaactatttttttaaatgtgtaaagcagcagggcatagtggcttacgcctgtaatcccaacactttgggaagctgaggtgggaggatcaccttaggtcaggagttcaagaccagcctggccaaccaacatggtgaaaccccatctctactaaaaatacaaaacttagccagccatggtggcacatgcctgtagccccagctagtcgggaggctgaggcaggaaaatcacttgagcctgggaggtggaggttgcagtcaactgagattgagccactgcactgtactccagcctgggcggcagagctagattctgtctcaaaaattaaataaataaataagtaagtaaataaataaataaataaatgtataaagcactatgttaggagattgaaggaaaaatatgaaggttctagtattcacaagctgtcctgtgataagagagatttgatcttttctgtagatggggtgagactaggattaaatttcaaaatttgagaaaaatattttcattccatttatgggagaactttctagcagctacactttctccaaaagggaacaagctactgtggagtggggggtagttcttcctcctctgcttagaggagaatttttggagagctctcagactttacataggtgattggactggctgacttctcaggtcttcccagtatttgaggtctgattctgggctacataccctactcctagaagcatacaatctgatgggagataatgacacaggtacacagatatcaaagcccttgttcagtgttttgaactaaatgtcataagagctgtaaatagtgtattggcacattggaggagggacagataacattgttttatggggactcagaaagattcattattttatatgtcatatgtccctttggggactttgggaaaccctagggaaccagcggctagagcatctcaagggggccttattcaattctaggtaactagccaggtgtgaaagaaagggcccagggtgtctcactttgcagaggaagattggagaccaggaacatgattttaaattatgtgcctttactgcagctttcttgctctctttgtgtgtgtgcattctttccatttttttcttctttctggatgttaaatctgagtaatatatatcatttttaaagtggaattatgaccaggcatggtgcctcttgcctataatcctagcactttggcaagccaaggcaggaagattgcttgagcccaggagttcaacaccagcctgggcaacatggcaaaactccatctctacaaaaagtacaaaaatgagccaggtgttgtggggtgcgcctgtagtcccagctaaggaggctgagattgggaggatcacttgaacccaaaaggtggaggctgcagtgagctgagatcgtaccactacactccagcctgagtgacacagtgacagcctgtctcaaaaatataaaaataaataaataaataaagtgga

SEQ ID NO: 27513 - DNA, 3397 bp, Homo sapiens
gtgggagcagggcgagacgggccattttcactctgtggtcaaaggaaatgactggtctgactcggtctgggagcggggcacccagggtctaaggataactctggggccatgacagccatgagtctcacagaggaccccgagacttctgtgctgcgagtaaccggacttgttctgagacctttgccctagaggatggccaaggggctcctggtgacctatgccctctgggctgtggggggccctgctgggctccaccacctgtacctgggaagggacagccacgccctgctctggatgctgaccctggggggaggtgggctgggctggctctgggagttctggaagctcccaagctttgtagctcaggccaacagagcccagggacagaggcagagccccagaggggtgacaccccctctgagtcccattcgctttgctgcccaggtgatagttggcatctattttggccttgtggcactgattagcctttcttccatggtcaacttctatattgtggccctcccactggcagttggcttaggggtcttgctggtggctgctgttggcaaccagacctcagactttaagaacactctggggtcagcatttctcacttcacctatcttctatggccgccccatagccatactgcccattagcgtggccgccagcattacagctcagaggcatcgccgctacaaagctttggtggcatcagagccgctcagtgtgcggctctatcgtctgggcttggcttaccttgctttcacaggcccactggcatacagtgccctctgcaacacagctgccaccctcagctatgtggcagaaacctttggctccttcttgaattggttcagcttcttcccccttcttggccgcctcatggagtttgtcctccttctgccttaccggatctggaggctactgatgggggagactggcttcaacagcagctgctttcaggagtgggcgaagctctatgagtttgttcacagttttcaggatgagaagcgtcagctggcttaccaggttttgggcctctcagaaggggcaacaaatgaagaaatacatcggagttaccaggagctagtgaaggtctggcacccagaccacaacctggaccagacagaggaggcacagaggcacttcctggagatccaggctgcgtatgaagtcctgagtcaacccaggaagccctggggatcccggaggtgaaaagaaacttccccctgaggactgactcttcctagcagagctgggcaacttgtcccaaatctagctttgcccacgaatggcatcccaacagagttaaagaaactgcttgcaggggctgggcgtggtggctcatgcctgtaatcccagcactttgggaggccgaggcgggcagatcacgaggtcaggagttcgagaccagcagcctggccaatatagtgaaacttcgtctctactaaaaatacaaaaaattagccaggagtggtggcaggcacctgtagtcccagctacttgggaggctgaggcaggagaatcacctgaacctgagaggcggaggttgcagtgagccgagatcacgccactgcactccagcctgggcaacaagagtgaaactccgtctcaaaaaaaaaaaaaaagaaagaaaaactgcttgcaggggacatgagaaaacaatggggtgagaaaaggttgtggtagaaggatgtgtttatattctgaatttctgaattcttggctattgcattcttgacaatttttcttaaaaccagagagtgaaaggcatattataaaacaatcaaatatcttttagagtatggacaactattatatatcaataaaaaattaattagaaaaaatatatcttttagagaacacaccaccttatcccacccatgatatattgatgtgtgatggagaaagattatttaactatttttttaaatgtgtaaagcagcagggcatagtggcttacgcctgtaatcccaacactttgggaagctgaggtgggaggatcaccttaggtcaggagttcaagaccagcctggccaaccaacatggtgaaaccccatctctactaaaaatacaaaacttagccagccatggtggcacatgcctgtagccccagctagtcgggaggctgaggcaggaaaatcacttgagcctgggaggtggaggttgcagtcaactgagattgagccactgcactgtactccagcctgggcggcagagctagattctgtctcaaaaattaaataaataaataagtaagtaaataaataaataaataaatgtataaagcactatgttaggagattgaaggaaaaatatgaaggttctagtattcacaagctgtcctgtgataagagagatttgatcttttctgtagatggggtgagactaggattaaatttcaaaatttgagaaaaatattttcattccatttatgggagaactttctagcagctacactttctccaaaagggaacaagctactgtggagtggggggtagttcttcctcctctgcttagaggagaatttttggagagctctcagactttacataggtgattggactggctgacttctcaggtcttcccagtatttgaggtctgattctgggctacataccctactcctagaagcatacaatctgatgggagataatgacacaggtacacagatatcaaagcccttgttcagtgttttgaactaaatgtcataagagctgtaaatagtgtattggcacattggaggagggacagataacattgttttatggggactcagaaagattcattattttatatgtcatatgtccctttggggactttgggaaaccctagggaaccagcggctagagcatctcaagggggccttattcaattctaggtaactagccaggtgtgaaagaaagggcccagggtgtctcactttgcagaggaagattggagaccaggaacatgattttaaattatgtgcctttactgcagctttcttgctctctttgtgtgtgtgcattctttccatttttttcttctttctggatgttaaatctgagtaatatatatcatttttaaagtggaattatgaccaggcatggtgcctcttgcctataatcctagcactttggcaagccaaggcaggaagattgcttgagcccaggagttcaacaccagcctgggcaacatggcaaaactccatctctacaaaaagtacaaaaatgagccaggtgttgtggggtgcgcctgtagtcccagctaaggaggctgagattgggaggatcacttgaacccaaaaggtggaggctgcagtgagctgagatcgtaccactacactccagcctgagtgacacagtgacagcctgtctcaaaaatataaaaataaataaataaataaagtgga

SEQ ID NO: 27514 - DNA, 2619 bp, Homo sapiens
aaaaaattattttagaaaaaagaattccagccttttgaaacatagacaagctctagatctcatggcaagagccattaaccacaactgcccattttccaagctggaattctaacctgagctgctggacctttcccacgggcaagtagaagccaattctagagatatgatagcctgatttagcaaaggtgcaaggagaggcccaggtaccctgacaacttgggggattctaatttgtcatcttctgtttccataaggttttgggcctctcagaaggggcaacaaatgaagaaatacatcggagttaccaggagctagtgaaggtctggcacccagaccacaacctggaccagacagaggaggcacagaggcacttcctggagatccaggctgcgtatgaagtcctgagtcaacccaggaagccctggggatcccggaggtgaaaagaaacttccccctgaggactgactcttcctagcagagctgggcaacttgtcccaaatctagctttgcccacgaatggcatcccaacagagttaaagaaactgcttgcaggggctgggcgtggtggctcatgcctgtaatcccagcactttgggaggccgaggcgggcagatcacgaggtcaggagttcgagaccagcagcctggccaatatagtgaaacttcgtctctactaaaaatacaaaaaattagccaggagtggtggcaggcacctgtagtcccagctacttgggaggctgaggcaggagaatcacctgaacctgagaggcggaggttgcagtgagccgagatcacgccactgcactccagcctgggcaacaagagtgaaactccgtctcaaaaaaaaaaaaaaagaaagaaaaactgcttgcaggggacatgagaaaacaatggggtgagaaaaggttgtggtagaaggatgtgtttatattctgaatttctgaattcttggctattgcattcttgacaatttttcttaaaaccagagagtgaaaggcatattataaaacaatcaaatatcttttagagtatggacaactattatatatcaataaaaaattaattagaaaaaatatatcttttagagaacacaccaccttatcccacccatgatatattgatgtgtgatggagaaagattatttaactatttttttaaatgtgtaaagcagcagggcatagtggcttacgcctgtaatcccaacactttgggaagctgaggtgggaggatcaccttaggtcaggagttcaagaccagcctggccaaccaacatggtgaaaccccatctctactaaaaatacaaaacttagccagccatggtggcacatgcctgtagccccagctagtcgggaggctgaggcaggaaaatcacttgagcctgggaggtggaggttgcagtcaactgagattgagccactgcactgtactccagcctgggcggcagagctagattctgtctcaaaaattaaataaataaataagtaagtaaataaataaataaataaatgtataaagcactatgttaggagattgaaggaaaaatatgaaggttctagtattcacaagctgtcctgtgataagagagatttgatcttttctgtagatggggtgagactaggattaaatttcaaaatttgagaaaaatattttcattccatttatgggagaactttctagcagctacactttctccaaaagggaacaagctactgtggagtggggggtagttcttcctcctctgcttagaggagaatttttggagagctctcagactttacataggtgattggactggctgacttctcaggtcttcccagtatttgaggtctgattctgggctacataccctactcctagaagcatacaatctgatgggagataatgacacaggtacacagatatcaaagcccttgttcagtgttttgaactaaatgtcataagagctgtaaatagtgtattggcacattggaggagggacagataacattgttttatggggactcagaaagattcattattttatatgtcatatgtccctttggggactttgggaaaccctagggaaccagcggctagagcatctcaagggggccttattcaattctaggtaactagccaggtgtgaaagaaagggcccagggtgtctcactttgcagaggaagattggagaccaggaacatgattttaaattatgtgcctttactgcagctttcttgctctctttgtgtgtgtgcattctttccatttttttcttctttctggatgttaaatctgagtaatatatatcatttttaaagtggaattatgaccaggcatggtgcctcttgcctataatcctagcactttggcaagccaaggcaggaagattgcttgagcccaggagttcaacaccagcctgggcaacatggcaaaactccatctctacaaaaagtacaaaaatgagccaggtgttgtggggtgcgcctgtagtcccagctaaggaggctgagattgggaggatcacttgaacccaaaaggtggaggctgcagtgagctgagatcgtaccactacactccagcctgagtgacacagtgacagcctgtctcaaaaatataaaaataaataaataaataaagtgga

SEQ ID NO: 27515 - DNA, 1997 bp, Homo sapiens
  misc_feature (845)..(845): n is a, c, g, or t
  misc_feature (913)..(913): n is a, c, g, or t
  misc_feature (1280)..(1280): n is a, c, g, or t
  misc_feature (1697)..(1697): n is a, c, g, or t
  misc_feature (1763)..(1763): n is a, c, g, or t
  misc_feature (1769)..(1769): n is a, c, g, or t
  misc_feature (1833)..(1833): n is a, c, g, or t
  misc_feature (1839)..(1839): n is a, c, g, or t
  misc_feature (1846)..(1846): n is a, c, g, or t
  misc_feature (1880)..(1880): n is a, c, g, or t
  misc_feature (1889)..(1889): n is a, c, g, or t
  misc_feature (1900)..(1900): n is a, c, g, or t
  misc_feature (1909)..(1909): n is a, c, g, or t
  misc_feature (1923)..(1923): n is a, c, g, or t
  misc_feature (1979)..(1979): n is a, c, g, or t
  misc_feature (1983)..(1983): n is a, c, g, or t
  misc_feature (1985)..(1985): n is a, c, g, or t
  misc_feature (1988)..(1988): n is a, c, g, or t
  misc_feature (1990)..(1993): n is a, c, g, or t
aaaaaattattttagaaaaaagaattccagccttttgaaacatagacaagctctagatctcatggcaagagccattaaccacaactgcccattttccaagctggaattctaacctgagctgctggacctttcccacgggcaagtagaagccaattctagagatatgatagcctgatttagcaaaggtgcaaggagaggcccaggtaccctgacaacttgggggattctaatttgtcatcttctgtttccataaggttttgggcctctcagaaggggcaacaaatgaagaaatacatcggagttaccaggagctagtgaaggtctggcacccagaccacaacctggaccagacagaggaggcacagaggcacttcctggagatccaggctgcgtatgaagtcctgagtcaacccaggaagccctggggatcccggaggtgaaaagaaacttccccctgaggactgactcttcctagcagagctgggcaacttgtcccaaatctagctttgcccacgaatggcatcccaacagagttaaagaaactgcttgcatgagccaccacacctggccactgttctcaaattgtattatggagttttttttttttacaaaatatggatatattttaatttactcaaatgggaactactgataagcagttcttatttttccagcataagcaaggctacaataaatatctttgaatatatgtactgatgctttttgttttttgttgaagctatatcccaataagtgataagtacggtctaagagagaacatgttttttacaattttgattgatatcatattgggccacgcatggtggctcaggcctggcatcccngcactttgggaggttgaggtgggaggatagcttgagctcaggagttcaagaccagcttgagcaacctngtgagacctcatctctactaaaaaaacaaaacaaacaaacacaaaattagctaggtgtggtggcatgtgccagtagtcccagctagttgggaggctgaggtggaaagattgcttgatcctgggaggttgaggctacagtgagctgtgatggtatcactgcactctatcctggacaacacagcaagaacctgcctcaaacaaatgtatttggttgatattgtatcagatttcttctgaaaaacgttttaatggtttagactttcaccaagtgcaagaaactggcattttctttgtaactggcctggaatgttaccactcttttaaacttttgtcaagatgatcgtgagaaatagtatctaattacttnaatttgcatttccctgactcctaatgaagttcagcatctcttcaaatctttattgggcatttggattttctcttcagtgaattgcttcatcatattctccatttattctaaagttgtgttcctatttgtcgctttcaaatctagtttggtggaatccttgcatgttagaaaccttaaccctcgtaatatgtgttgtagatatttttccctcgcctatgagttgtctttcatccttgagcatgagttttagagtcagaagaacaacagtaggatttgaatcatgttacgttattttctagttgtcgtattttttatttcttcagcctcttagaatcttagtttcctttaaaattgagataatagtatctactttattcaaaaaaattttttggctggacgcggtggctcacgcttgtnatcccaccattttgggaggccaaggcaggcggatcacctgaggtcaggagtttgagaccagcttgnccaacntggtgaaaacccatctctactaaaaatacaaaaattagccaggtacagcggggcatgcctgtantcccangtactcnggaggctgaggcaggagaatcacttgacccgggnggcagagangaggtagtganctgaatcgnaccactgcactccngcctgagtggtagggcgagactctgtctcaaaaaaaaaatgttttttcattatttntttntnganannnncttc

SEQ ID NO: 27516 - DNA, 4542 bp, Homo sapiens
  misc_feature (3390)..(3390): n is a, c, g, or t
  misc_feature (3458)..(3458): n is a, c, g, or t
  misc_feature (3825)..(3825): n is a, c, g, or t
  misc_feature (4242)..(4242): n is a, c, g, or t
  misc_feature (4308)..(4308): n is a, c, g, or t
  misc_feature (4314)..(4314): n is a, c, g, or t
  misc_feature (4378)..(4378): n is a, c, g, or t
  misc_feature (4384)..(4384): n is a, c, g, or t
  misc_feature (4391)..(4391): n is a, c, g, or t
  misc_feature (4425)..(4425): n is a, c, g, or t
  misc_feature (4434)..(4434): n is a, c, g, or t
  misc_feature (4445)..(4445): n is a, c, g, or t
  misc_feature (4454)..(4454): n is a, c, g, or t
  misc_feature (4468)..(4468): n is a, c, g, or t
  misc_feature (4524)..(4524): n is a, c, g, or t
  misc_feature (4528)..(4528): n is a, c, g, or t
  misc_feature (4530)..(4530): n is a, c, g, or t
  misc_feature (4533)..(4533): n is a, c, g, or t
  misc_feature (4535)..(4538): n is a, c, g, or t
cagagagcgttgagctgggaacagtgacaagtgcttatcaagttccttcactctcaacacggttgacaagaactgatggcattatggaacacatcacaaaaatacccaatgaagcagcacacagaggtaccataagaccagtcaaaggccctcagacatccacttcgcctgccagtcctaaaggactacacacaggagggacaaaaagaatggagaccaccaccacagctctgaagaccaccaccacagctctgaagaccacttccagagccaccttgaccaccagtgtctatactcccactttgggaacactgactcccctcaatgcatcaatgcaaatggccagcacaatccccacagaaatgatgatcacaaccccatatgttttccctgatgttccagaaacgacatcctcattggctaccagcctggggggaggtgggctgggctggctctgggagttctggaagctcccaagctttgtagctcaggccaacagagcccagggacagaggcagagccccagaggggtgacaccccctctgagtcccattcgttcacctatcttctatggccgccccatagccatactgcccattagcgtggccgccagcattacagctcagaggcatcgccgctacaaagctttggtggcatcagagccgctcagtgtgcggctctatcgtctgggcttggcttaccttgctttcacaggcccactggcatacagtgccctctgcaacacagctgccaccctcagctatgtggcagaaacctttggctccttcttgaattggttcagcttcttcccccttcttggccgcctcatggagtttgtcctccttctgccttaccggatctggaggctactgatgggggagactggcttcaacagcagctgctttcaggagtgggcgaagctctatgagtttgttcacagttttcaggatgagaagcgtcagctggcttaccaggttttgggcctctcagaaggggcaacaaatgaagaaatacatcggagttaccaggagctagtgaaggtctggcacccagaccacaacctggaccagacagaggaggcacagaggcacttcctggagatccaggctgcgtatgaagtcctgagtcaacccaggaagccctggggatcccggaggtgaaaagaaacttccccctgaggactgactcttcctagcagagctgggcaacttgtcccaaatctagctttgcccacgaatggcatcccaacagagttaaagaaactgcttgcaggggctgggcgtggtggctcatgcctgtaatcccagcactttgggaggccgaggcgggcagatcacgaggtcaggagttcgagaccagcagcctggccaatatagtgaaacttcgtctctactaaaaatacaaaaaattagccaggagtggtggcaggcacctgtagtcccagctacttgggaggctgaggcaggagaatcacctgaacctgagaggcggaggttgcagtgagccgagatcacgccactgcactccagcctgggcaacaagagtgaaactccgtctcaaaaaaaaaaaaaaagaaagaaaaactgcttgcaggggacatgagaaaacaatggggtgagaaaaggttgtggtagaaggatgtgtttatattctgaatttctgaattcttggctattgcattcttgacaatttttcttaaaaccagagagtgaaaggcatattataaaacaatcaaatatcttttagagtatggacaactattatatatcaataaaaaattaattagaaaaaatatatcttttagagaacacaccaccttatcccacccatgatatattgatgtgtgatggagaaagattatttaactatttttttaaatgtgtaaagcagcagggcatagtggcttacgcctgtaatcccaacactttgggaagctgaggtgggaggatcaccttaggtcaggagttcaagaccagcctggccaaccaacatggtgaaaccccatctctactaaaaatacaaaacttagccagccatggtggcacatgcctgtagccccagctagtcgggaggctgaggcaggaaaatcacttgagcctgggaggtggaggttgcagtcaactgagattgagccactgcactgtactccagcctgggcggcagagctagattctgtctcaaaaattaaataaataaataagtaagtaaataaataaataaataaatgtataaagcactatgttaggagattgaaggaaaaatatgaaggttctagtattcacaagctgtcctgtgataagagagatttgatcttttctgtagatggggtgagactaggattaaatttcaaaatttgagaaaaatattttcattccatttatgggagaactttctagcagctacactttctccaaaagggaacaagctactgtggagtggggggtagttcttcctcctctgcttagaggagaatttttggagagctctcagactttacataggtgattggactggctgacttctcaggtcttcccagtatttgaggtctgattctgggctacataccctactcctagaagcatacaatctgatgggagataatgacacaggtacacagatatcaaagcccttgttcagtgttttgaactaaatgtcataagagctgtaaatagtgtattggcacattggaggagggacagataacattgttttatggggactcagaaagattcattattttatatgtcatatgtccctttggggactttgggaaaccctagggaaccagcggctagagcatctcaagggggccttattcaattctaggtaactagccaggtgtgaaagaaagggcccagggtgtctcactttgcagaggaagattggagaccaggaacatgattttaaattatgtgcctttactgcagctttcttgctctctttgtgtgtgtgcattctttccatttttttcttctttctggatgttaaatctgagtaatatatatcatttttaaagtggaattatgaccaggcatggtgcctcttgcctataatcctagcatgccttggcctcccaaagtgccggaattacaggcatgagccaccacacctggccactgttctcaaattgtattatggagttttttttttttacaaaatatggatatattttaatttactcaaatgggaactactgataagcagttcttatttttccagcataagcaaggctacaataaatatctttgaatatatgtactgatgctttttgttttttgttgaagctatatcccaataagtgataagtacggtctaagagagaacatgttttttacaattttgattgatatcatattgggccacgcatggtggctcaggcctggcatcccngcactttgggaggttgaggtgggaggatagcttgagctcaggagttcaagaccagcttgagcaacctngtgagacctcatctctactaaaaaaacaaaacaaacaaacacaaaattagctaggtgtggtggcatgtgccagtagtcccagctagttgggaggctgaggtggaaagattgcttgatcctgggaggttgaggctacagtgagctgtgatggtatcactgcactctatcctggacaacacagcaagaacctgcctcaaacaaatgtatttggttgatattgtatcagatttcttctgaaaaacgttttaatggtttagactttcaccaagtgcaagaaactggcattttctttgtaactggcctggaatgttaccactcttttaaacttttgtcaagatgatcgtgagaaatagtatctaattacttnaatttgcatttccctgactcctaatgaagttcagcatctcttcaaatctttattgggcatttggattttctcttcagtgaattgcttcatcatattctccatttattctaaagttgtgttcctatttgtcgctttcaaatctagtttggtggaatccttgcatgttagaaaccttaaccctcgtaatatgtgttgtagatatttttccctcgcctatgagttgtctttcatccttgagcatgagttttagagtcagaagaacaacagtaggatttgaatcatgttacgttattttctagttgtcgtattttttatttcttcagcctcttagaatcttagtttcctttaaaattgagataatagtatctactttattcaaaaaaattttttggctggacgcggtggctcacgcttgtnatcccaccattttgggaggccaaggcaggcggatcacctgaggtcaggagtttgagaccagcttgnccaacntggtgaaaacccatctctactaaaaatacaaaaattagccaggtacagcggggcatgcctgtantcccangtactcnggaggctgaggcaggagaatcacttgacccgggnggcagagangaggtagtganctgaatcgnaccactgcactccngcctgagtggtagggcgagactctgtctcaaaaaaaaaatgttttttcattatttntttntnganannnncttc

SEQ ID NO: 27517 - DNA, 2834 bp, Homo sapiens
  misc_feature (1682)..(1682): n is a, c, g, or t
  misc_feature (1750)..(1750): n is a, c, g, or t
  misc_feature (2117)..(2117): n is a, c, g, or t
  misc_feature (2534)..(2534): n is a, c, g, or t
  misc_feature (2600)..(2600): n is a, c, g, or t
  misc_feature (2606)..(2606): n is a, c, g, or t
  misc_feature (2670)..(2670): n is a, c, g, or t
  misc_feature (2676)..(2676): n is a, c, g, or t
  misc_feature (2683)..(2683): n is a, c, g, or t
  misc_feature (2717)..(2717): n is a, c, g, or t
  misc_feature (2726)..(2726): n is a, c, g, or t
  misc_feature (2737)..(2737): n is a, c, g, or t
  misc_feature (2746)..(2746): n is a, c, g, or t
  misc_feature (2760)..(2760): n is a, c, g, or t
  misc_feature (2816)..(2816): n is a, c, g, or t
  misc_feature (2820)..(2820): n is a, c, g, or t
  misc_feature (2822)..(2822): n is a, c, g, or t
  misc_feature (2825)..(2825): n is a, c, g, or t
  misc_feature (2827)..(2830): n is a, c, g, or t
gtgggagcagggcgagacgggccattttcactctgtggtcaaaggaaatgactggtctgactcggtctgggagcggggcacccagggtctaaggataactctggggccatgacagccatgagtctcacagaggaccccgagacttctgtgctgcgagtaaccggacttgttctgagacctttgccctagaggatggccaaggggctcctggtgacctatgccctctgggctgtggggggccctgctgggctccaccacctgtacctgggaagggacagccacgccctgctctggatgctgaccctggggggaggtgggctgggctggctctgggagttctggaagctcccaagctttgtagctcaggccaacagagcccagggacagaggcagagccccagaggggtgacaccccctctgagtcccattcgctttgctgcccaggtgatagttggcatctattttggccttgtggcactgattagcctttcttccatggtcaacttctatattgtggccctcccactggcagttggcttaggggtcttgctggtggctgctgttggcaaccagacctcagactttaagaacactctggggtcagcatttctcacttcacctatcttctatggccgccccatagccatactgcccattagcgtggccgccagcattacagctcagaggcatcgccgctacaaagctttggtggcatcagagccgctcagtgtgcggctctatcgtctgggcttggcttaccttgctttcacaggcccactggcatacagtgccctctgcaacacagctgccaccctcagctatgtggcagaaacctttggctccttcttgaattggttcagcttcttcccccttcttggccgcctcatggagtttgtcctccttctgccttaccggatctggaggctactgatgggggagactggcttcaacagcagctgctttcaggagtgggcgaagctctatgagtttgttcacagttttcaggatgagaagcgtcagctggcttaccaggttttgggcctctcagaaggggcaacaaatgaagaaatacatcggagttaccaggagctagtgaaggtctggcacccagaccacaacctggaccagacagaggaggcacagaggcacttcctggagatccaggctgcgtatgaagtcctgagtcaacccaggaagccctggggatcccggaggtgaaaagaaacttccccctgaggactgactcttcctagcagagctgggcaacttgtcccaaatctagctttgcccacgaatggcatcccaacagagttaaagaaactgcttgcaggggctgggcgtggtggctcatgctgccttggcctcccaaagtgccggaattacaggcatgagccaccacacctggccactgttctcaaattgtattatggagttttttttttttacaaaatatggatatattttaatttactcaaatgggaactactgataagcagttcttatttttccagcataagcaaggctacaataaatatctttgaatatatgtactgatgctttttgttttttgttgaagctatatcccaataagtgataagtacggtctaagagagaacatgttttttacaattttgattgatatcatattgggccacgcatggtggctcaggcctggcatcccngcactttgggaggttgaggtgggaggatagcttgagctcaggagttcaagaccagcttgagcaacctngtgagacctcatctctactaaaaaaacaaaacaaacaaacacaaaattagctaggtgtggtggcatgtgccagtagtcccagctagttgggaggctgaggtggaaagattgcttgatcctgggaggttgaggctacagtgagctgtgatggtatcactgcactctatcctggacaacacagcaagaacctgcctcaaacaaatgtatttggttgatattgtatcagatttcttctgaaaaacgttttaatggtttagactttcaccaagtgcaagaaactggcattttctttgtaactggcctggaatgttaccactcttttaaacttttgtcaagatgatcgtgagaaatagtatctaattacttnaatttgcatttccctgactcctaatgaagttcagcatctcttcaaatctttattgggcatttggattttctcttcagtgaattgcttcatcatattctccatttattctaaagttgtgttcctatttgtcgctttcaaatctagtttggtggaatccttgcatgttagaaaccttaaccctcgtaatatgtgttgtagatatttttccctcgcctatgagttgtctttcatccttgagcatgagttttagagtcagaagaacaacagtaggatttgaatcatgttacgttattttctagttgtcgtattttttatttcttcagcctcttagaatcttagtttcctttaaaattgagataatagtatctactttattcaaaaaaattttttggctggacgcggtggctcacgcttgtnatcccaccattttgggaggccaaggcaggcggatcacctgaggtcaggagtttgagaccagcttgnccaacntggtgaaaacccatctctactaaaaatacaaaaattagccaggtacagcggggcatgcctgtantcccangtactcnggaggctgaggcaggagaatcacttgacccgggnggcagagangaggtagtganctgaatcgnaccactgcactccngcctgagtggtagggcgagactctgtctcaaaaaaaaaatgttttttcattatttntttntnganannnncttc

SEQ ID NO: 27518 - DNA, 1305 bp, Homo sapiens
gcaggcgtgcgccgccacacctgatgggttttcgtacttttttggtggagacggggtttcgctgtgttggccgggctggtctccagctcctaaccgtgagtgatccgccagcctcggcctcccgaggtgccgggattgcagacggagtcttgttaactcagtgctcaatggtgcccaggctggagtgcagtggcgtgatctcggctacaacctccacttcccagccgcctgtcttggccccccaaagtgccgagattgcagcctctgcccggccgctaccccgtctgggaagtgaggagcgtctctgcctggccgcccatcgtctgggatgtgaggagcccctctgcctggctgcccagtctggaaagtgaggagtgtctctgcccggccgccatcccatctaggaagtgaggagcgtctctgcccggccgcccatcgtctgagatgggagcgcctctgccccgccgccccgtctgggagatcattaagcagcttcgagtctggaaaatttgttgaatgtactgagcaattagaattgttaccaggagaaaatatcaatctacttgctggaggatcaaaagaaaaaatagacatgaaaaacctgcttcgtaacatgttaagtccagatccaagggaacctcagaaatccattgaagttcaattgttaagaagttctgtttgtttggcaactgctttaaacccgatagaacaagatcagaagtggcagtctataactgaaaatgtggtaaagtacttgaagcaaacatcccgcatcgctgttggacctctgagactttctactttaacagtttcacagtctttgccagttctaagtaccttgcagctgtattgctcacctgctttggagaacacagtttctaacagactttaaacagaggactgtcttattccactcttcggtgaagctttacgttcatgtaaacagcatgatgtgaggccatggatgcaggcagtaaggtatactatgtaccagaatcagttgttggagaaaaattaaagttaagtggttttcctttttttttttgtaagagaaaattaaaggtgtttttttttttaaattttgctttattgaggtttatattacacattctaagtgtatggtttgatgagttctaacatgtcttcacttgtgtgaccaccaatacgattgagatacagaacaccgtcttaccccagaaggttcccttgggatcatctcctcatttggccctgtcagcagttactcatttgctttctgtcactatggattagacttgtctttactaaagtttcatgtacgtgaaa

SEQ ID NO: 27519 - DNA, 1146 bp, Homo sapiens
ccctctccctctctttccacggtctccctctccctctctttccacggtttccacggtctccctctccctctctttccacggtctccctctcatgccaagccgaagctggactgtgctgctgccatctcggctcactgcaacgtctctgcctggccgcccatcgtctgggatgtgaggagcccctctgcctggctgcccagtctggaaagtgaggagtgtctctgcccggccgccatcccatctaggaagtgaggagcgtctctgcccggccgcccatcgtctgagatgggagcgcctctgccccgccgccccgtctgggagatcattaagcagcttcgagtctggaaaatttgttgaatgtactgagcaattagaattgttaccaggagaaaatatcaatctacttgctggaggatcaaaagaaaaaatagacatgaaaaacctgcttcgtaacatgttaagtccagatccaagggaacctcagaaatccattgaagttcaattgttaagaagttctgtttgtttggcaactgctttaaacccgatagaacaagatcagaagtggcagtctataactgaaaatgtggtaaagtacttgaagcaaacatcccgcatcgctgttggacctctgagactttctactttaacagtttcacagtctttgccagttctaagtaccttgcagctgtattgctcacctgctttggagaacacagtttctaacagactttaaacagaggactgtcttattccactcttcggtgaagctttacgttcatgtaaacagcatgatgtgaggccatggatgcaggcagtaaggtatactatgtaccagaatcagttgttggagaaaaattaaagttaagtggttttcctttttttttttgtaagagaaaattaaaggtgtttttttttttaaattttgctttattgaggtttatattacacattctaagtgtatggtttgatgagttctaacatgtcttcacttgtgtgaccaccaatacgattgagatacagaacaccgtcttaccccagaaggttcccttgggatcatctcctcatttggccctgtcagcagttactcatttgctttctgtcactatggattagacttgtctttactaaagtttcatgtacgtgaaa

SEQ ID NO: 27520 - DNA, 423 bp, Homo sapiens
aaaagaaagaaacagtgccgaaaaatcacaatgatttgagttcttcaaaaacctttgattggctgcattggctctgttctgcatattactagacttcttacatgatcacaagtaaccactaattggttaaaaccaaagagagagagagagagagtgtgtgtgtgtgtgtgtgtgtttggttggggggtgttgtgttagcttccaggtgaatgcattatctgttaatcctgtttattgatctgtttttataagtgctccatgattctctgaaaacagtatactatgtatctaatttttggatacaggatggacatacgtactcaaactgtgtttttcaatttgtactgtatttgtttctctcgacctgacttagtgatagaggtatattaaagtcttccactagcatggtagattaacaaattc

SEQ ID NO: 27521 - DNA, 734 bp, Homo sapiens
taaagcaaaaagctagacaattgtttcatcattttttattaaatcacctgtcttttctccacagatacaaatgctatgtctaaattttatcacagtcttgggtctgttgttgggctgtcttttgctccattgatgtgtcttttggcaactgtggcatattgtttcactgtatctttatatgtcataatattgaggcagattctttgtaattcttgtttttagaattttcatagctattcattctcatgcttctcagtgtattctgaagtcattcatcattttctagaaaatttatgattggcattttgattggaatcccttggaattcatcagttagagttgactactgtaggctattaaaacgtcttcctataagaatgtagatatcagactggtgaaaatttaaggagctgaagtaattttaaattttaattgtaagattttcgtggaggtgatttttcaaaaaggtttagttactgatgttggttcctgtgttatttctggtagatgaatcaattatattaggtaaaagtattatcattggcatgattaaaaagatgttttagcttaaaacctaaatgatgggttgataggtacagcaagccaccacagcatgtgtatacaacctgcatgttctgcacatgtatgtaacaaacctgcatgttctgcacgtgtgtttaacaaacctgcatgttctgcacatgtatcccaggacttaaagtaaaaaaaaacaa

SEQ ID NO: 27522 - DNA, 579 bp, Homo sapiens
agcctcgctgaggaaattgactttgaatatccttttacactcttctgttttagaaagcattgtggtaaaacattgaatcatcatggtcataagttctgttcacattctttcttgctttgaatattttttcccagtggccaatatttgattctgttgtatcatggctaaaaggtaggcatggcaacaaaataaagacaggaagtctttggaataagtgatcccatcacaatgaatcaatttgccattggaacatatttttacaaagtcactcttttgaaaatatttagctatgaattaaaacagagtctgtatggttaatatttttcctggtctaaagtgaacagcattttagagaatgaactcaggacacaaccacagcacaagaaaaacgtgataattaagtttacacatatgtgttactactgcaacagaaaacatgtaaagaacatttgatttatgtatcagtctgcactgtttaattttttgtgtcataaatactcttatttaaaaaaacaggactagttaacagtgtcaattactagtaattcatggtataaataattaaacaaggaagtgttc

SEQ ID NO: 27523 - DNA, 945 bp, Homo sapiens
ttttccattttctccatgccctgacacagtgttggatatccactacctgtttaaaatatatgtgctgatttgagttggtcaggtgttgggggtgggatacgacagagaaaatggggtcccagctactgaggacgcaacacatgaacagggaaacgggacagatcctcttgggaaaaagccccactggggccaattccggggccttttcctccacagcccgcagagatgcctgtgcacttcccccaagaagctcctccaagttacgtgaccctgatgaaggtcttccttcaccatatgatttgttacaggaaaaataaggaaggaatttggaagcagttaaggtcactttgtgccgagactatcgcactatatcatgttaaataaaatgtcaggtgatagttattgagtcattcttttctaatggttttatgcacagtagataattttattatctacatatgatttggatttgaataaattatcagattgttaagaatttaataagaatatgtaaatacatttgtattccctatttaagtcaacctaagaatgaaatgatgagaataatggtattttgtgaggatggtgggggctttttggtagatgacctcctctgatctccgccacaatcctggaacacagatattacatccccttcttacaaatgagaaaactgaagctcagacaggttaatttgcctaaggtctcccatcccagaatacgggttcaaattttagaggtttttcaccttatgctacctatagatattcaaatcttaatttattcacatgaaatgatgggttaaatcgtttacaaaattatcaaccataagattctgttgacaaatacccatgaaatatttacttttaaaaatgtcctgtccatgcatatgaatttcagttttaaacatgaaaagtattttagcttttaggttgcaaaaaaaaa

SEQ ID NO: 27524 - DNA, 778 bp, Homo sapiens
gttctcctgcctcagcctcctgagtagctgggaccacaggcgcataccgccacgcccggctaatttttgtatttttagtagagatggggtttcgccatattggccaggctggtttcaaactactgacctcgtgatccgcctgcctcggcctcccaaagtgttgggattacaggcgtgagccaccgcgcctggccaagcccagtcttacaaatgaggaccctgaggttggtaggagggaggtgacctgtccacaccaggagttagcagaaacttgaacccatatttctttgctgctcatgggcagagttacactgctgctatgattcccaggagagaaactgaactttgctaaactactttggcaaactcaaaagcagatgggccagccatttgtggtctgaaagcactcggatgctagagaccctctgttacatggtgcctgtcagacagccctacaatttggatcctggggctggaaaaagataagaatgctgggagactttggttgtggcagactgcctctcagtgggtcccactgtgttggctgagtgccagcggtggactcctgatgcctgcatttgcagaactgatagctgcagggaggcagtgggttccagcggcacagcgttctcacatttctggccacttctagaggcagaggacggggtcagcaccatggacagcctcacggtcccgcctccctttcgtgtgtcagaacacgcgacccggactagtctggtctggggacggccctagtcattgctggctgttctaagcg

SEQ ID NO: 27525 - DNA, 444 bp, Homo sapiens
tggaaaagtgatcaacgcacagtgcggcttatggatccttcccacccactcaccacccacctgccagattatctgttggcaaatcccaggcctgatagcatttcctctgtcagtatttcagtgtatacctctaaacaataagggatttaagagaaaacataatcctggtaccattgttatacttgaaaaagttgcctgtgcgcagtggctcatgcccataatcccagcattgggaggccaagatagaaggatcacttgagcccaggaattcgagaccagcctgggtaacagtgagaatgtgtctctacaaaagaaaaaaaaaattagccaggcactgtggcacatgtctgtggtcccagctccttgggaggctgaggtaggaggatcacttgagtccaggaattcaagaccagcctgggcaacatagtgagactatgtctctac

SEQ ID NO: 27526 - DNA, 761 bp, Homo sapiens
tggtaaaccttcttttatataatattatttaaagtatcagaagagatactgtagcaaattaaaatcttggttccattggctgctctcttcagaaacacaggccttcagctcacgctggggtcggttggcagcagttgtatggatcgaaaagggcattgtgttcagggctgaatcctctgcacagtgccttccacatccataacccgcccccgaatggaactgtccaacgcttccagccaacacagctggactggtcgggggagagggctatttccctatgagggagccttcagggcacttgttttctgggctgctttaaggagatcaagaaccccacctgatacctgaaagagaaacattctgtcattcccttcaccctgtggggtttattctgagaaaaacaggggtcactaggcaaagtcataatcaggaaaaatggggagtcctgctgcccatgggtgatatcttacagcctctgtgagacacttttgtgaaaagggaaaaaaatgaaatagtcatttgtgcaacaaatgcttattgagaacctactgtatgccaggctttgaactaggtgttgagacaagcaagatggataggtttaaaattgttttgaaggttgtccacaataagaaatctgcttaatatcagccaagcgtggtggctcacacctgtaatcccagcgctttgggaggccgaggcaggcggatcacttgaagtcaggagtttgagaccagccaacaaggtgaaaccccgtgtctact

SEQ ID NO: 27527 - DNA, 269 bp, Homo sapiens
ggaaaacgggttaataaaacagctttatagcagtttataaatacgttaacatattttacattttatccatatgccacaggttaagaccaagtgcttaaatcaaaagcttatttgaattattttaggaaaaataatctcagaaaagaaagttagagtgagggaagattagtgaaatagttgtatttggtagtagctttctattaatatattttagataaactggagacaagccttaaaaactgaaccacaattatgagacctgaatacat

SEQ ID NO: 27528 - DNA, 850 bp, Homo sapiens
cccaagtgctgcagccaaaaacacaggcttcgtccccaccggctcccagctagagagctttcttcttgggagagcaggacttccacttctcattctgccccagctgcctgttgctgagtttacgtctgcagcaagtaatgccaagaggtgggggctgccttcttgcatccagctctgactagtgaaactgaagctctcccttgggtgtggcatgctgatagtgctgaggggggccctgaccaccctcaccttgccacttctattcaaggtgatattggaggttcttgggagagcaattaggtaagaaaaataaatacaggtcacctagatgggaaaggaataagtcatactatctcaatttgcaaatgacatggtcatatgtatatataaaatactaaggaaccctctaaaaaaaaactattagaactaataaactagttcagcagggttgcaagatacaagatcaacatataaaaatcaattgtatttctacacactatcaatgaacaatctgaaaattaagaaaacgattctattgacaaaagcaccaaaaagaataaaatacttcagaatatatttaacagaggaaatgtaaaacttatactctgaaaactataaataattcttgaaagaaacttaaaagatcaaaataaatggaaaagtaaccatgttcacagcttagaggttttaacactgttaagatggaaatacctgcagagtgatctacagattgaaagcaattactttcaaaatcccagctgacttccttgtaaaaactgacaagctgaccttaaaattcaaatgacatacaagggacctagaatgatcaaaacaaacttgaaaaagaaaa

SEQ ID NO: 27529 - DNA, 2802 bp, Homo sapiens
tgattgaggtgcagagcaaagtgaagggctgcccaggtgaggccaggctgactgaaaaagatggatactactatgctgaatatgcggaatctgtttgagcagcttgtgcgcggggcggagattctcaaggaaggaaacgaactccaatttatccagttggtgaaggactttgaggatttctttaaaaagtgggagaggactgactatgagctggggaaatacaaggatcttttgataaaagcagagactgagcgaagtgctctggatgttaagctgaagcatgcacataatcaggtggatgcagacatccaacggagacggagagctgaggctaactgcgaaaagctggagcaacagattcagctgattggagagatgttcctgtgtgacatatctggcagcattcaactaagcggggagcaaaaatcagctttggcttttctcaacagaggccaaccatccagcagcaatgctgggaacaaaagactttcaattagcgatgaatctggttccattttatcaggtatcagctttgacaagactgatgaatcactggattgcgactcttctttggtgaagactttcaagcggaagcagagagaaaagaggtgctctagtagccgacagtttgttgatggtccctctggacctgtaaaggaaactcgttccattggctccacagtagaccaggggaatgaatccatagttgcaaaaactacagtgactgttcccaaggatggcgggcccatcaaagctgtgcccactattgagactgtgccatactggaccaggagccaaaggaaaacaggtactttacaaccttggaacagtgaccccaccctgaacagcaggcagctggagccaagaactgagacagacaatgtgggcacgccacagagtaacagagggatgtgcctgaatgactttgtctctaagacggttattaaacctgaattctatgttccatgtggaaagcagataaaatttgggaaactatctctgaagtgtcaggactgttgtgtgatctctcgtccagaatgtcgggaccactgtccccttccctgcattcctaccctgataggaacacctgtcaagattggagagggaatgctggccgactttgtgtcccagacttttccaatgatcccccgcattgttgtgcattgtgtaaatgagattgagcagagaggtcttactgagacaggcctgtataggatcttgggctgtgacagcacagtaaaactgaaagagaaattcctcagagtgaaaactgtacccctcgtcagcaaagtggatgatatccatgctatctgtagccttcttaaagactttcttcgaaacttcaaagaacctcttctgacctttcgcctaaacaaagcctttatggaagcagcagaaatcacagatgaagacaacagcatatctgccatgtaccaggctgttggtgaactgccccaggccaacagggacacattggttttcctcatgattcacttgcagagagtggctcagagtccatatactaaaatgaatgttgccaatctggctgaagtctttggctctacaatagtggcccatgctgtgcccaatccagaaccagtgacgatgttacaggacatcaagtgtcaacccaaggtggtcgagcgcctgccttccttgcccctggagtactggagtcagttctcaatagtggagcagaagaacattgaccccctacatgtcactgaaaactcaaatgccttttcaacaccagatattaaagtgagtttactgggacctgtgaccactcctgatcatcagcttctcaagactccttcatctagttccctgtcacagggagtctgttccaccctcacaaagaacactcccagatttgggagcaaaggcaagtctgccactaacctaggaaggcaaggcaacctttttgcttcttcaatgctcaagtgaagtcacatctacctattactcccagcattgattgactataagaaaggatgcacctgtactctctgctctacagcctcctcttctcattactatttttagcattctccaggcttttactcaagtttaattttgcatgagggttttactaaaattttatatatctccccttccttctcctcgagtcacataatatcagtaccttgttctggtcactgttgggagcttttagatgagacatctttccaggagtagaagggttagtatggaattgattgtgattcttttgggggaagggggttactatccctttggcttaaagccaaatgctgctcatggaatgaacgatctttctctagtttcattcaactgatttccatgagacaatgacagaaaccctacctatctgataagattggcttgtctcagggtgggaagtgggagggtggggcgaagaaaggattacaccagaagatttaggatgcctccttctaagaactggaagttctcattccccattatgaactgagctataatatggagctttcataaaaatgggatgcattgaggacagaactagtgatgggagtatgtgtagctttgatttggatgattaggtctttaatagtgttgagtggcacaaccttgtaaatgtgaaagtacaacgcatatttatctctgatgtgccattggctgaaccttgggttaatttggggtcaaagtcagtttttcttttaaaattgaattcattctgatgcttgacccccatactcccaaccttgtccagtggagcccaacttccaaaggtcaatatgtcgtcctttggcatcccaactaacaataaagaataggctataa

SEQ ID NO: 27530 - DNA, 330 bp, Homo sapiens
ttcaagatgaggaatgagttgtttctggattgatgccttcactggctagaaatgccagcgggtggtgggaagagtacatggcaggatgatgaggagtttcgcattcattcattcatttattcatctgtgtattcattttacaaaaattcatatcagatttgcaaaattcactcacaatacactcagagataataaaaaatgtaacaactttttttattaactggtggaatatttctctcaaatttccaccactggaccccagagtgggaattcaattttagcccaatcttgtaaacttagttccaatgtaattatctaggttgagctaaa

SEQ ID NO: 27531 - DNA, 472 bp, Homo sapiens
gggaactccagtcagagtcaggcagtgtctgtgagcacaagttaggaagtttctcggcatccgggagcgttcccgtctgatgtcccagtgttagtcctcccggccgccctcccctcctctcctccagggacggctgggaaaacagtcctgcgggatgaagacttcaccgcctccgatttgaatttgaaagtaactccttccgtggcatatttcgctgggcagatagaacaaaccatgtcgttttcccccgtctctaaaatagacatattattatcattcacacttttgcacccggtcgttttgcgggagttcgggaaactgactttcttcattggggacattgtaattttctgatgatgccacgaggagaaaaaaaatacgggtttgttttaattggaaggaccttccgcttttatgatttcggtttaccttggaaaactgaatcttctgtgttttatttctttcctctagt

SEQ ID NO: 27532 - DNA, 427 bp, Homo sapiens
gcatgccacctgggctccagccccgaggtctcctctggttcctctctgttaattcctgctcatctttcagggagatgttcaggcgtgggctcctcagggaagcctgccactgcacacacttcccatagctttctgtatgcttccttcatagctctgaccagggttgtcatggtatacactggggatgtgtggactcgagtggccgatgtctctgcccacagttgggtaagcttcaagaggccaggcctgtgtcagtttcccttactgtattcccagcagccaactccttgactggcatgcagctgctcagttagtatttactgaaggagagaagggagggaagaagaaaaagagaatttgatgctcctcttgctgtatctaccttcatgtctccatcgtagtcttctctcttagagaaaaaaaaaaa

SEQ ID NO: 27533 - DNA, 390 bp, Homo sapiens
cacagagaggttaaataatgtgcccaaaatcacacagctttaaagtgaaggagccctatctggctccagaactcactctcttaatcacgattctatattgcatccctgtatctgtattttgctcctttttctactatactagtccagtcaagaatggaatggaagctgggagactttagtggctactaacactgaagtgatataggattagactaaagtggtagtaatggagacagggaattggagagatctggtaatatgccttcaagacagagctagtaagacttaatggatcagagattggatgtgaggtatgagggaaagagaggaatgatggcaaccaggttttttggcctacccatagcctggtatttaagactctgtttctca

SEQ ID NO: 27534 - DNA, 343 bp, Homo sapiens
aaaataactaagaacagtaatttgtgtatatataaacatttaccattcagaaggagtgtgtaagtctattgtctcttatctttacagcagtttagtaaaaggtggaaagaagtggtgaccactttctcagataaagaaagtaaagattagaaaggttaagcaaactgcctgcccttatatagcttagagtcagcctaaagatttgaccgaactctgttctttgagttggacttcatccctagcctttggaaggctggatagtcttcaaggcttttagcatttctggacatgtttatgatcaatggtaataccaaccaccagataaaatcaaatctaatcagta

SEQ ID NO: 27535 - DNA, 834 bp, Homo sapiens
  misc_feature (1)..(1): n is a, c, g, or t
  misc_feature (11)..(11): n is a, c, g, or t
  misc_feature (13)..(13): n is a, c, g, or t
  misc_feature (15)..(15): n is a, c, g, or t
ntttcggcacngngnaaatctaagaagctcatacataagaaacacacaaaacataagaaacacacacaaaaacccgacaccatgcctggcctaggcgggctcattttcgctgggagtgtctgctttctggtcattatcggtgcctgctgttcctgaatcactgctgcctggagacatcttcctgttctatctggaaaacttcctggtcctacagcctgtgaatggctgatcagggctcatgagccaagtagaactctgggacccaatccaattaaacaatggtggaggtcactgtgcaccgtgtgccccacaaactctgctccacgccctgtggcagccttctcctctggcctcagcccaccctgcaccacactccccaaggcccatccgccttccccttatcagggaaacatgaccgtgattttgggcttcttgcctccagaactgagggaatacacttctgttactttataccaccttcgttcatgtcctgtgtcagtgcagccccgtaacatgagcccagctggagaaaggaccactcgctagggttagagggaacaatccccagagctcacacaaggctgggaatagggcgtctagccatcagtcagaggcaaacacctcctcattcgtggggcgtggcatagagcacccagaaggacttttcctcaccaccgaggaatgctctgctttcctacctaacaaagcaaggtccccaaggatgaaactgttaagtgacgtgatagtgtcccacagcaaagctcaagaatgtttggaatacagaaacatccaacacccagaaacgtaacagtcacaatgtatggcattcaatta

SEQ ID NO: 27536 - DNA, 430 bp, Homo sapiens
ctgatggtagtggaggagccgagtatcttgattgtatcaatgtcaatatcctggttgtgctattgaactaaattttgcatgtctatgtactgatatggaactgagttcaaatatgcatgttaatgataaaacaaaaggtgcaaaaccatgtaaatatattgttaccatttgtgttaaggggagagagcgagttttatattcatttgccttcatttgtaaagtttctttttgttttatcttatgtgtaatattcaaaagctcccaaataataaaatataaattgggtaaatctgggttgtttggggggtagtaaatcaagccaaattaaaaatggggtgcaaaggagacattttgttccacgtcttttgtagtgtttgattcttgtaccaatgtaaattttaaggcaaaaacctaaaataatacaaattca

SEQ ID NO: 27537 - DNA, 374 bp, Homo sapiens
ttcactgttctatccccaggacttagaagaataaccgaaatacagcaggcactcaataaatatgactgggtagggtgcatagttcacacccataatcccagtgctttgagaggctgaggcaggagattgcttgagcccaggagtttgaggctgtggtgagctatgctaaccccactgcactccagcctgggcaacagagtccctgtctccaataaaggaaaacaaataaataaataaataaataataaacatgtctgtactttgtgatctcaccagagagtctgcagagatgagcaaaactcatatcctcaccagctgtgacaaacactgcagtgacctcctcaaaaacacactgtcctcttccttatccacct

SEQ ID NO: 27538 - DNA, 3091 bp, Homo sapiens
  misc_feature (1474)..(1474): n is a, c, g, or t
cttcatggacacccacacagattcactggagagcaaagcctaccagagtccctgtcagcagcactgtttctagaagcttccacatgagcagacagcatggagtcctgggggctaatgaagcagcaatgtcagcatgagcacaggcagggagaggcaagaggagcagagtaaaggggaacgttctcttcattcttccacctgcctgtcccccagccgacacgtcccttccgttccctgcaaggccatttccagggaggcttacgaagacagcagatgatggtgatggaaggagtctgggtgctgagctgtgccatggacctggagagaaactgagtccgagggatgtcaacatgccaagtccatggaaatatcagtgggctggaattctagctgcctgaaagaagacattcctcacacaagacctcacaatcatatccatggaattatagcactgggctctccagatggtgctacaggaagacctccagaaatttgacgatcctctattcaaggccctaccacagagacacacaggaacggaactcagaatcacaaacaaagaaactttgatccaagaaagaaaatgatctttaaaaagaccctcgtttcatgctggccgatgctgagaaaatctgctctgaaggatatttggagacactgattaaaaggtagtaccatcaccacatatttaacttccccctctttttcctctgcttctaggagtagagaaaccaacaaaaccaaccggagagagatggtttcaaacaatctgtcccccaccccaccactattcacacctttcacaagggcccagccacaaagccagtgcaacatgacatcaatcatcagcaaagtggagatggttgtcccagtggagggggattcttcgtgttacgtagataggaagcacgatgcaaaagtgttgaagcaggagtgtaaagaataattaaaacacctgcccaagacccaagcaaggataggatttcccagacattcgcgagggagaaaatgccatgtcctttccttctggtgtcacatcagaatctgaaggctgctagagaagggagagaaacatgaaagtgagtcccatgctgattgttgttgaaatacctggaaagaaactggcaaagactatccaagggatgctaagacatgtccgaacttacaaaacagtagaacctgaataggaatttgaagttgtctatactctcctcagccacaccctgccattttacagattgtcttctctggggaagttagctgtcatgttgtgaggatactcaagcagtttataaagaggttcatgtcgcaaggaatggaggcctcctgccaacagccatgtaaaggagccatctaggaaatagattctccagccccagtcagaccttcagatgattacagcccctaccaaccttctgactgcggtggaaggaaggttccggaaccagaaccacccaggttaatgtgggtaagnctcatccaatcctttgaaggcctgaagaacaaagagtgaggtttctggaagaagaaaattttacctcaagcctgcaatgtagaaattctgcttgagtttcccgcctgctggcctgccctgtggaattcggagtcaagaaggagtcttgtaagcattaactgagatagtatatgaagagtgcttttgcaccgagtgaaccttcaatcaactgtactagtttgtatgcctggaagagctgctatatgggatcagaaagaaaaataaggtgcatacgccagaaaaaaaatacttgcatatgagtactaggagatgcatgacaatgttcacggcagcagtattcatggcagtgaaaaatgaaaagaactgaaatgcccattgataaaaacgtctacttatttgtgtcatctttgcacagtggaattgtgcgagtggaaatgattgatctacagctaggagaagcagcagagctcaatctcaaaaacataacgttgtgtggaaaaagctaacctcagaacactttgcggctctatcttagcaaaccaggagagaaattctcctgatggccttgaagaagcaaacagccacctggttaagcccctgtggatagtgccaagtggcaggaaagtgggagccacctctaggacctgaggattaaagtcagtaagagctgggacctcactcatgcagactcgaggacatgaattcgaccaacaacttgaatgagcttggaagtggattcttccctagtccagtcttcagaaattaagaatgttcccaaagaatgatggagacatttcaaaaggatacggaagccagattgtgggcgcttctactggccaactctgggacatcgtggacatcaaaataaatttgtaataataaaggattatagcctattagttaaatcagaaaaatctgatttaactaaatgagtaggaggaaaagaaagctcttccttatattagaaagtcaattaataaatgcagaaaggaatgaaaaaattagaaaagccaccatttggcaaccatggcaggcagaatggggagtatgcctccagacagtaattcctttcaaactggtttataggaactcactgagcttgctgatcgacctctgagaggcaaagtttctgaattatgaagtactgattatataaacttagacagagacatgcttcattatttaataggactgtgtcaaaagcctactattaggatgatgtgttgggtgtggaacagggtctcttcctgccaggaacactggtgaattttcactccgtgttcaggctgatctttgaagttgaagacaagcagaagaatccttctaaaatttagccatgcccataggctgggagggacactgctccattcagaggcagcaaagcacattactgtatctcctatagagctttgagcagtccagtgtacatggagaaacttagtaaatgttgttgaattaatgaatgaacaaatcaatggaccaagtcaggggtaagtcttacatttgtcatctaggtgattaagaaaggaaaaagtatctgtttcaagaggattacaatctaactgtactccaatagtaaaatttactcttttggaatctgaagacattcatgagtct

SEQ ID NO: 27539 - DNA, 1047 bp, Homo sapiens
taaggatactgaggacctttggaggtcctcatccaaaggtcttgctgtattcctcattggaagatgtaagtgagacagagaaaggacagaggcagggagccatgacaaggcaacttcagggccaagaagaaactgtcatgaaaagagtgataggatggagaatattggaggatgagctacagttcccaaaaattaagaatgttcccaaagaatgatggagacatttcaaaaggatacggaagccagattgtgggcgcttctactggccaactctgggacatcgtggacatcaaaataaatttgtaataataaaggattatagcctattagttaaatcagaaaaatctgatttaactaaatgagtaggaggaaaagaaagctcttccttatattagaaagtcaattaataaatgcagaaaggaatgaaaaaattagaaaagccaccatttggcaaccatggcaggcagaatggggagtatgcctccagacagtaattcctttcaaactggtttataggaactcactgagcttgctgatcgacctctgagaggcaaagtttctgaattatgaagtactgattatataaacttagacagagacatgcttcattatttaataggactgtgtcaaaagcctactattaggatgatgtgttgggtgtggaacagggtctcttcctgccaggaacactggtgaattttcactccgtgttcaggctgatctttgaagttgaagacaagcagaagaatccttctaaaatttagccatgcccataggctgggagggacactgctccattcagaggcagcaaagcacattactgtatctcctatagagctttgagcagtccagtgtacatggagaaacttagtaaatgttgttgaattaatgaatgaacaaatcaatggaccaagtcaggggtaagtcttacatttgtcatctaggtgattaagaaaggaaaaagtatctgtttcaagaggattacaatctaactgtactccaatagtaaaatttactcttttggaatctgaagacattcatgagtct

SEQ ID NO: 27540 - DNA, 2677 bp, Homo sapiens
  misc_feature (1060)..(1060): n is a, c, g, or t
tgtctgtactctggattgttttgagcgtgtctttgcagggcttgcttgtgcctgccaagttcagctgcctgcagaagcacagctcagagccgtccctataggcctagtccttgcacaggtctggccaatcagagctctgttaccaggcagagcctctctctccagctctggtcactgtcagcctagctgtccaggcacccttctgcaattttcgtttgaattgatttttttaaaagcacctgatatacacttttcttcttattcttctccttctagtcctctattcaaggccctaccacagagacacacaggaacggaactcagaatcacaaacaaagaaactttgatccaagaaagaaaatgatctttaaaaagaccctcgtttcatgctggccgatgctgagaaaatctgctctgaaggatatttggagacactgattaaaagatggttgtcccagtggagggggattcttcgtgttacgtagataggaagcacgatgcaaaagtgttgaagcaggagtgtaaagaataattaaaacacctgcccaagacccaagcaaggataggatttcccagacattcgcgagggagaaaatgccatgtcctttccttctggtgtcacatcagaatctgaaggctgctagagaagggagagaaacatgaaagtgagtcccatgctgattgttgttgaaatacctggaaagaaactggcaaagactatccaagggatgctaagacatgtccgaacttacaaaacagtagaacctgaataggaatttgaagttgtctatactctcctcagccacaccctgccattttacagattgtcttctctggggaagttagctgtcatgttgtgaggatactcaagcagtttataaagaggttcatgtcgcaaggaatggaggcctcctgccaacagccatgtaaaggagccatctaggaaatagattctccagccccagtcagaccttcagatgattacagcccctaccaaccttctgactgcggtggaaggaaggttccggaaccagaaccacccaggttaatgtgggtaagnctcatccaatcctttgaaggcctgaagaacaaagagtgaggtttctggaagaagaaaattttacctcaagcctgcaatgtagaaattctgcttgagtttcccgcctgctggcctgccctgtggaattcggagtcaagaaggagtcttgtaagcattaactgagatagtatatgaagagtgcttttgcaccgagtgaaccttcaatcaactgtactagtttgtatgcctggaagagctgctatatgggatcagaaagaaaaataaggtgcatacgccagaaaaaaaatacttgcatatgagtactaggagatgcatgacaatgttcacggcagcagtattcatggcagtgaaaaatgaaaagaactgaaatgcccattgataaaaacgtctacttatttgtgtcatctttgcacagtggaattgtgcgagtggaaatgattgatctacagctaggagaagcagcagagctcaatctcaaaaacataacgttgtgtggaaaaagctaacctcagaacactttgcggctctatcttagcaaaccaggagagaaattctcctgatggccttgaagaagcaaacagccacctggttaagcccctgtggatagtgccaagtggcaggaaagtgggagccacctctaggacctgaggattaaagtcagtaagagctgggacctcactcatgcagactcgaggacatgaattcgaccaacaacttgaatgagcttggaagtggattcttccctagtccagtcttcagaaattaagaatgttcccaaagaatgatggagacatttcaaaaggatacggaagccagattgtgggcgcttctactggccaactctgggacatcgtggacatcaaaataaatttgtaataataaaggattatagcctattagttaaatcagaaaaatctgatttaactaaatgagtaggaggaaaagaaagctcttccttatattagaaagtcaattaataaatgcagaaaggaatgaaaaaattagaaaagccaccatttggcaaccatggcaggcagaatggggagtatgcctccagacagtaattcctttcaaactggtttataggaactcactgagcttgctgatcgacctctgagaggcaaagtttctgaattatgaagtactgattatataaacttagacagagacatgcttcattatttaataggactgtgtcaaaagcctactattaggatgatgtgttgggtgtggaacagggtctcttcctgccaggaacactggtgaattttcactccgtgttcaggctgatctttgaagttgaagacaagcagaagaatccttctaaaatttagccatgcccataggctgggagggacactgctccattcagaggcagcaaagcacattactgtatctcctatagagctttgagcagtccagtgtacatggagaaacttagtaaatgttgttgaattaatgaatgaacaaatcaatggaccaagtcaggggtaagtcttacatttgtcatctaggtgattaagaaaggaaaaagtatctgtttcaagaggattacaatctaactgtactccaatagtaaaatttactcttttggaatctgaagacattcatgagtct

SEQ ID NO: 27541 - DNA, 437 bp, Homo sapiens
tgaagaagtctggttgaggagaaaataggttaaaggaactcataagttgctgataagagtttgctttggaaaacaatttgtcattccttgtaaagttgaatatttgcataccctaagactcagtgattttacttttaggtgcatacgccagaaaaaaaatacttgcatatgagtactaggagatgcatgacaatgttcacggcagcagtattcatggcagtgaaaaatgaaaagaactgaaatgcccattgataaaaacgtctacttatttgtgtcatctttgcacagtggaattgtgcgagtggaaatgattgatctacagctaggagaagcagcagagctcaatctcaaaaacataacgttgtgtggaaaaagctaacctcagaacactttgcggtatgtgatgccattattatagttcagaagttagcaatagc

SEQ ID NO: 27542 - DNA, 989 bp, Homo sapiens
  misc_feature (883)..(884): n is a, c, g, or t
  misc_feature (891)..(891): n is a, c, g, or t
  misc_feature (893)..(893): n is a, c, g, or t
  misc_feature (896)..(896): n is a, c, g, or t
  misc_feature (901)..(901): n is a, c, g, or t
  misc_feature (908)..(908): n is a, c, g, or t
  misc_feature (915)..(915): n is a, c, g, or t
caggcgccggcgtaattaaatataactgagtttacgcagacgcagaaaacgcaggcaaacctgaggtcctcagaatggcgggcacaggtttggtggctggagaggttgtggtggatgcgctgccgtattttgatcaaggttatgaagcccctggtgtgcgggaagcggctgcagcgctggtggaggaggaaactcgcagataccgacctactaagaactacctgagctacctgacagccccggattattctgcctttgaaactgacataatgagaaatgaatttgaaagactggctgctcgacaaccaattgaattgctcagtatgaaacgatatgagcttccagccccctcctctggtcaaaaaaatgacattactgcatggcaagaatgtgtaaacaattctatggcccagttagagcatcaagcagttagaattgagaatctggaactaatgtcacagcatggatgtaatgcctggaaagtatacaatgaaaatctagttcatatgattgaacacgcacagaaggaacttcagaagttaagaaaacatattcaagatttaaactggcagagaaagaacatgcaactcacagctggatctaaattgagagaaatggagtcaaattgggtatccctggtcagtaagaattatgagattgaacggactattgttcagctagaaaatgaaatctatcaaattaagcagcaacatggagaggcaaacaaagaaaacatccggcaagacttctgaaaagacaatttagcaggtagaagaaaagttgggctttcacagtgggttcccaaaggcttgactttatgactgtgaggacacagatttccaaaccatgtgttagtgtttgaatctgagggtgcgcgggatcnntggtttncngantaagntcggggntttaccnaaaaattggtaaaggggttcacatggggtaatggggatttggagggtaaccacaggggatggggagaaaaaatg

SEQ ID NO: 27543 - DNA, 889 bp, Homo sapiens
caggcgccggcgtaattaaatataactgagtttacgcagacgcagaaaacgcaggcaaacctgaggtcctcagaatggcgggcacaggtttggtggctggagaggttgtggtggatgcgctgccgtattttgatcaaggttatgaagcccctggtgtgcgggaagcggctgcagcgctggtggaggaggaaactcgcagataccgacctactaagaactacctgagctacctgacagccccggattattctgcctttgaaactgacataatgagaaatgaatttgaaagactggctgctcgacaaccaattgaattgctcagtatgaaacgatatgagcttccagccccctcctctggtcaaaaaaatgacattactgcatggcaagaatgtgtaaacaattctatggcccagttagagcatcaagcagttagaattgagaatctggaactaatgtcacagcatggatgtaatgcctggaaagtatacaatgaatcccagacttggaacttgaacttcatcctctggttatttctgtatgagagctaaaacaagaaggcaaagcacctccttgttcatcctcagctgaaaatgtgcatgctcagctgctcagatttttcaccactgtgcacatgtccatgaatgactgcaaaacactacaagtagtaattttgggattacaaataaatttgagcaagtatttgttgtcaaaacaagccactgacatcctgtttctgttccatgtaactagctctagctttagtatttattgtctatctagaattcagattccttgcttgcaaaattccgtggttagattatctgcatggcccctttgtgccctaaaatttcctgagtgtctattcacaatttaagagaaaaaggccact

SEQ ID NO: 27544 - DNA, 742 bp, Homo sapiens
caggcgccggcgtaattaaatataactgagtttacgcagacgcagaaaacgcaggcaaacctgaggtcctcagaatggcgggcacaggtttggtggctggagaggttgtggtggatgcgctgccgtattttgatcaaggttatgaagcccctggtgtgcgggaagcggtgagtgcggggtgtctttgtagctgactcactgctagctggctcggtactgaaagaaacatgttacaatttgccacttctaccctggtccctattctctttcttaggctgcagcgctggtggaggaggaaactcgcagataccgacctactaagaactacctgagctacctgacagccccggattattctgcctttgaagtaagtatgtcttgagcctaggtgtgaacgagaattcctgtgaacctttattttggattgagagctttaaattccagttttaaccattgcctgcatagctactacttacctactgtataggtgtcagtctattgaaaacaactagatagataagtcttctccgaggttcttattctaagatccataggaagactttctggggctccacaactcacttaatgcaaaaatttgtggctaccattctttgagataggatccatgcgtaaattctcaaagggaccctctcctgccaagattcactctacagcaagtgatctagggttttcaatatgtataagcctaattacctaagctctttagaaccactggagagtg

SEQ ID NO: 27545 - DNA, 635 bp, Homo sapiens
caggcgccggcgtaattaaatataactgagtttacgcagacgcagaaaacgcaggcaaacctgaggtcctcagaatggcgggcacaggtttggtggctggagaggttgtggtggatgcgctgccgtattttgatcaaggttatgaagcccctggtgtgcgggaagcggctgcagcgctggtggaggaggaaactcgcagataccgacctactaagaactacctgagctacctgacagccccggattattctgcctttgaagtaagtatgtcttgagcctaggtgtgaacgagaattcctgtgaacctttattttggattgagagctttaaattccagttttaaccattgcctgcatagctactacttacctactgtataggtgtcagtctattgaaaacaactagatagataagtcttctccgaggttcttattctaagatccataggaagactttctggggctccacaactcacttaatgcaaaaatttgtggctaccattctttgagataggatccatgcgtaaattctcaaagggaccctctcctgccaagattcactctacagcaagtgatctagggttttcaatatgtataagcctaattacctaagctctttagaaccactggagagtg

SEQ ID NO: 27546 - DNA, 1143 bp, Homo sapiens
caggcgccggcgtaattaaatataactgagtttacgcagacgcagaaaacgcaggcaaacctgaggtcctcagaatggcgggcacaggtttggtggctggagaggttgtggtggatgcgctgccgtattttgatcaaggttatgaagcccctggtgtgcgggaagcggctgcagcgctggtggaggaggaaactcgcagataccgacctactaagaactacctgagctacctgacagccccggattattctgcctttgaaactgacataatgagaaatgaatttgaaagactggctgctcgacaaccaattgaattgctcagtatgaaacgatatgagcttccagccccctcctctggtcaaaaaaatgacattactgcatggcaagaatgtgtaaacaattctatggcccagttagagcatcaagcagttagaattgagaatctggaactaatgtcacagcatggatgtaatgcctggaaagtatacaatgaaaatctagttcatatgattgaacacgcacagaaggaacttcagaagttaagaaaacatattcaagatttaaactggcagagaaagaacatgcaactcacagctggatctaaattgagagaaatggagtcaaattgggtatccctggtcagtaagaattatgagattgaacggactattgttcagctagaaaatgaaatctatcaaattaagcagcaacatggagaggcaaacaaagaaaacatccggcaagacttctgaaaagacaatttagcaggtagaagaaaagttgggctttcacaaaaggcatctgaacttttaatgaactgtgaaggacaacagcatcttcccaaaaccattgatgtttaagtgtttagaaatcatagaaggtgtaggctgctgtggtaattctatttgtatatctcaacagaattaaaatgtctagcttggtggtatttttatagccataaaagaaaatctttaggctttcaaaataaggatgactttagaataatattgtgtcatagaattaattttcagccatgtggaccatattttgtatccaaggatccttatttaaagctttcaacatgtacaggaagttggaaatttttggtttatgactttgtctaataaagagatagttctaaac

SEQ ID NO: 27547 - DNA, 1803 bp, Homo sapiens
gcttgaattgggaggggggcagctggagcctcaggcggcagcgcttctagaaatgctgagccgattatcaggattagcaaatgttgttttgcatgaattatcaggagatgatgacactgatcagaatatgagggctcccctagaccctgaattacaccaagaatctgacatggaatttaataatactacacaagaagatgttcaggagcgcctggcttatgcagagcaattggtggtggagctaaaagatattattagacagaaggatgttcaactgcagcagaaagatgaagctctacaggaagagagaaaagctgctgataacaaaattaaaaaactaaaacttcatgcgaaggccaaattaacttctttgaataaatacatagaagaaatgaaagcacaaggagggactgttctgcctacagaacctcagtcagaggagcaactttccaagcatgacaagagttctacagaggaagagatggaaatagaaaagataaaacataagctccaggagaaggaggaactaatcagcactttgcaagcccagcttactcgggcacaggtttggtggctggagaggttgtggtggatgcgctgccgtattttgatcaaggttatgaagcccctggtgtgcgggaagcggctgcagcgctggtggaggaggaaactcgcagataccgacctactaagaactacctgagctacctgacagccccggattattctgcctttgaaactgacataatgagaaatgaatttgaaagactggctgctcgacaaccaattgaattgctcagtatgaaacgatatgagcttccagccccctcctctggtcaaaaaaatgacattactgcatggcaagaatgtgtaaacaattctatggcccagttagagcatcaagcagttagaattgagaatctggaactaatgtcacagcatggatgtaatgcctggaaagtatacaatgaaaatctagttcatatgattgaacacgcacagaaggaacttcagaagttaagaaaacatattcaagatttaaactggcagagaaagaacatgcaactcacagctggatctaaattgagagaaatggagtcaaattgggtatccctggtcagtaagaattatgagattgaacggactattgttcagctagaaaatgaaatctatcaaattaagcagcaacatggagaggcaaacaaagaaaacatccggcaagacttctgaaaagacaatttagcaggtagaagaaaagttgggctttcacaaaaggcatctgaacttttaatgaactgtgaaggacaacagcatcttcccaaaaccattgatgtttaagtgtttagaaatcatagaaggtgtaggctgctgtggtaattctatttgtatatctcaacagaattaaaatgtctagcttggtggtatttttatagccataaaagaaaatctttaggctttcaaaataaggatgactttagaataatattgtgtcatagaattaattttcagccatgtggaccatattttgtatccaaggatccttatttaaagctttcaacatgtacaggaagttggaaatttttggtttatgactttgtctaataaagagatagttctaaacacattcttgatcaccaaacaacttcagaaagacagtgactgtacagttatcattatcatcatcatcgtcatcatcataggtaacagttatatcaagcttaatatgtgctgaacattgttctgaacactttaggtagatgaactagatgtatgtgaataaaaattatttggtcctcacaaaaa

SEQ ID NO: 27548 - DNA, 1053 bp, Homo sapiens
ggtggcgttcagaggtcccctgacaggcgcgacaccaatggaatgctcagtatgaaacgatatgagcttccagccccctcctctggtcaaaaaaatgacattactgcatggcaagaatgtgtaaacaattctatggcccagttagagcatcaagcagttagaattgagaatctggaactaatgtcacagcatggatgtaatgcctggaaagtatacaatgaaaatctagttcatatgattgaacacgcacagaaggaacttcagaagttaagaaaacatattcaagatttaaactggcagagaaagaacatgcaactcacagctggatctaaattgagagaaatggagtcaaattgggtatccctggtcagtaagaattatgagattgaacggactattgttcagctagaaaatgaaatctatcaaattaagcagcaacatggagaggcaaacaaagaaaacatccggcaagacttctgaaaagacaatttagcaggtagaagaaaagttgggctttcacaaaaggcatctgaacttttaatgaactgtgaaggacaacagcatcttcccaaaaccattgatgtttaagtgtttagaaatcatagaaggtgtaggctgctgtggtaattctatttgtatatctcaacagaattaaaatgtctagcttggtggtatttttatagccataaaagaaaatctttaggctttcaaaataaggatgactttagaataatattgtgtcatagaattaattttcagccatgtggaccatattttgtatccaaggatccttatttaaagctttcaacatgtacaggaagttggaaatttttggtttatgactttgtctaataaagagatagttctaaacacattcttgatcaccaaacaacttcagaaagacagtgactgtacagttatcattatcatcatcatcgtcatcatcataggtaacagttatatcaagcttaatatgtgctgaacattgttctgaacactttaggtagatgaactagatgtatgtgaataaaaattatttggtcctcacaaaaa

SEQ ID NO: 27549 - DNA, 1254 bp, Homo sapiens
caggcgccggcgtaattaaatataactgagtttacgcagacgcagaaaacgcaggcaaacctgaggtcctcagaatggcgggcacaggtttggtggctggagaggttgtggtggatgcgctgccgtattttgatcaaggttatgaagcccctggtgtgcgggaagcggctgcagcgctggtggaggaggaaactcgcagataccgacctactaagaactacctgagctacctgacagccccggattattctgcctttgaaatatgagcttccagccccctcctctggtcaaaaaaatgacattactgcatggcaagaatgtgtaaacaattctatggcccagttagagcatcaagcagttagaattgagaatctggaactaatgtcacagcatggatgtaatgcctggaaagtatacaatgaaaatctagttcatatgattgaacacgcacagaaggaacttcagaagttaagaaaacatattcaagatttaaactggcagagaaagaacatgcaactcacagctggatctaaattgagagaaatggagtcaaattgggtatccctggtcagtaagaattatgagattgaacggactattgttcagctagaaaatgaaatctatcaaattaagcagcaacatggagaggcaaacaaagaaaacatccggcaagacttctgaaaagacaatttagcaggtagaagaaaagttgggctttcacaaaaggcatctgaacttttaatgaactgtgaaggacaacagcatcttcccaaaaccattgatgtttaagtgtttagaaatcatagaaggtgtaggctgctgtggtaattctatttgtatatctcaacagaattaaaatgtctagcttggtggtatttttatagccataaaagaaaatctttaggctttcaaaataaggatgactttagaataatattgtgtcatagaattaattttcagccatgtggaccatattttgtatccaaggatccttatttaaagctttcaacatgtacaggaagttggaaatttttggtttatgactttgtctaataaagagatagttctaaacacattcttgatcaccaaacaacttcagaaagacagtgactgtacagttatcattatcatcatcatcgtcatcatcataggtaacagttatatcaagcttaatatgtgctgaacattgttctgaacactttaggtagatgaactagatgtatgtgaataaaaattatttggtcctcacaaaaa

SEQ ID NO: 27550 - DNA, 1438 bp, Homo sapiens
  misc_feature (1332)..(1333): n is a, c, g, or t
  misc_feature (1340)..(1340): n is a, c, g, or t
  misc_feature (1342)..(1342): n is a, c, g, or t
  misc_feature (1345)..(1345): n is a, c, g, or t
  misc_feature (1350)..(1350): n is a, c, g, or t
  misc_feature (1357)..(1357): n is a, c, g, or t
  misc_feature (1364)..(1364): n is a, c, g, or t
gcttgaattgggaggggggcagctggagcctcaggcggcagcgcttctagaaatgctgagccgattatcaggattagcaaatgttgttttgcatgaattatcaggagatgatgacactgatcagaatatgagggctcccctagaccctgaattacaccaagaatctgacatggaatttaataatactacacaagaagatgttcaggagcgcctggcttatgcagagcaattggtggtggagctaaaagatattattagacagaaggatgttcaactgcagcagaaagatgaagctctacaggaagagagaaaagctgctgataacaaaattaaaaaactaaaacttcatgcgaaggccaaattaacttctttgaataaatacatagaagaaatgaaagcacaaggagggactgttctgcctacagaacctcagtcagaggagcaactttccaagcatgacaagagttctacagaggaagagatggaaatagaaaagataaaacataagctccaggagaaggaggaactaatcagcactttgcaagcccagcttactcgggcacaggtttggtggctggagaggttgtggtggatgcgctgccgtattttgatcaaggctgcagcgctggtggaggaggaaactcgcagataccgacctactaagaactacctgagctacctgacagccccggattattctgcctttgaaactgacataatgagaaatgaatttgaaagactggctgctcgacaaccaattgaattgctcagtatgaaacgatatgagcttccagccccctcctctggtcaaaaaaatgacattactgcatggcaagaatgtgtaaacaattctatggcccagttagagcatcaagcagttagaattgagaatctggaactaatgtcacagcatggatgtaatgcctggaaagtatacaatgaaaatctagttcatatgattgaacacgcacagaaggaacttcagaagttaagaaaacatattcaagatttaaactggcagagaaagaacatgcaactcacagctggatctaaattgagagaaatggagtcaaattgggtatccctggtcagtaagaattatgagattgaacggactattgttcagctagaaaatgaaatctatcaaattaagcagcaacatggagaggcaaacaaagaaaacatccggcaagacttctgaaaagacaatttagcaggtagaagaaaagttgggctttcacagtgggttcccaaaggcttgactttatgactgtgaggacacagatttccaaaccatgtgttagtgtttgaatctgagggtgcgcgggatcnntggtttncngantaagntcggggntttaccnaaaaattggtaaaggggttcacatggggtaatggggatttggagggtaaccacaggggatggggagaaaaaatg

SEQ ID NO: 27551 - DNA, 259 bp, Homo sapiens
gttatatcaagcttaatatgtgctgaacattgttctgaacactttaggtagatgaactagatgtatgtgaataaaaattatttggtcctcacaaaaacctcaggaggcggttactgtttttctcatatgtggacatgtaacagacaccagttaaataacataacttgccagagttttatagctgaaagtgtcagcttttttatagaaagttgtcagtcaggttttgaacccaatagtccagctccagagttaatgttct

SEQ ID NO: 27552 - DNA, 1325 bp, Homo sapiens
caggcgccggcgtaattaaatataactgagtttacgcagacgcagaaaacgcaggcaaacctgaggtcctcagaatggcgggcacaggtttggtggctggagaggttgtggtggatgcgctgccgtattttgatcaaggttatgaagcccctggtgtgcgggaagcggctgcagcgctggtggaggaggaaactcgcagataccgacctactaagaactacctgagctacctgacagccccggattattctgcctttgaaactgacataatgagaaatgaatttgaaagactggctgctcgacaaccaattgaattgctcagtatgaaacgatatgagcttccagccccctcctctggtcaaaaaaatgacattactgcatggcaagaatgtgtaaacaattctatggcccagttagagcatcaagcagttagaattgagaatctggaactaatgtcacagcatggatgtaatgcctggaaagtatacaatgaaaatctagttcatatgattgaacacgcacagaaggaacttcagaagttaagaaaacatattcaagatttaaactggcagagaaagaacatgcaactcacagctggatctaaattgagagaaatggagtcaaattgggtatccctggtcagtaagaattatgagattgaacggactattgttcagctagaaaatgaaatctatcaaattaagcagcaacatggagaggcaaacaaagaaaacatccggcaagacttctgaaaagacaatttagcaggtagaagaaaagttgggctttcacaaaaggcatctgaacttttaatgaactgtgaaggacaacagcatcttcccaaaaccattgatgtttaagtgtttagaaatcatagaaggtgtaggctgctgtggtaattctatttgtatatctcaacagaattaaaatgtctagcttggtggtatttttatagccataaaagaaaatctttaggctttcaaaataaggatgactttagaataatattgtgtcatagaattaattttcagccatgtggaccatattttgtatccaaggatccttatttaaagctttcaacatgtacaggaagttggaaatttttggtttatgactttgtctaataaagagatagttctaaacacattcttgatcaccaaacaacttcagaaagacagtgactgtacagttatcattatcatcatcatcgtcatcatcataggtaacagttatatcaagcttaatatgtgctgaacattgttctgaacactttaggtagatgaactagatgtatgtgaataaaaattatttggtcctcacaaaaa

SEQ ID NO: 27553 - DNA, 764 bp, Homo sapiens
caggcgccggcgtaattaaatataactgagtttacgcagacgcagaaaacgcaggcaaacctgaggtcctcagaatggcgggcacaggtttggtggctggagaggttgtggtggatgcgctgccgtattttgatcaaggttatgaagcccctggtgtgcgggaagcggctgcagcgctggtggaggaggaaactcgcagataccgacctactaagaactacctgagctacctgacagccccggattattctgcctttgaaactgacataatgagaaatgaatttgaaagactggctgctcgacaaccaattgaattgctcagtatgaaacgatatgagcttccagccccctcctctggtcaaaaaaatgacattactgcatggcaagaatgtgtaaacaattctatggcccagttagagcatcaagcagttagaattgagaatctggaactaatgtcacagcatggatgtaatgcctggaaagtatacaatgaaaatctagttcatatgattgaacacgcacagaaggaacttcagaagttaagaaaacatattcaagatttaaactggcagagaaagaacatgcaactcacagctggatctaaattgagagaaatggagtcaaattggggttctgggcagttagaatatgagattgaccggcttttttcagttgaaatgaatctatcaattaagcgcacatgggaggcaacaagaaacatccggagaattttaaaacatttacaggtgacttgtgtttaaggt

SEQ ID NO: 27554 - DNA, 1834 bp, Homo sapiens
  misc_feature (1834)..(1834): n is a, c, g, or t
caggcgccggcgtaattaaatataactgagtttacgcagacgcagaaaacgcaggcaaacctgaggtcctcagaatggcgggcacaggtttggtggctggagaggttgtggtggatgcgctgccgtattttgatcaaggttatgaagcccctggtgtgcgggaagcggctgcagcgctggtggaggaggaaactcgcagataccgacctactaagaactacctgagctacctgacagccccggattattctgcctttgaaactgacataatgagaaatgaatttgaaagactggctgctcgacaaccaattgaattgctcagtatgaaacgatatgagcttccagccccctcctctggtcaaaaaaatgacattactgcatggcaagaatgtgtaaacaattctatggcccagttagagcatcaagcagttagaattgagaatctggaactaatgtcacagcatggatgtaatgcctggaaagtatacaatgaaaatctagttcatatgattgaacacgcacagaaggaacttcagaagttaagaaaacatattcaagatttaaactggcagagaaagaacatgcaactcacagctggatctaaattgagagaaatggagtcaaattgggtatccctggtcagtaagaattatgagattgaacggactattgttcagctagaaaatgaaatctatcaaattaagcagcaacatggagaggcaaacaaagaaaacatccggcaagacttctgaaaagacaatttagcaggtagaagaaaagttgggctttcacaaaaggcatctgaacttttaatgaactgtgaaggacaacagcatcttcccaaaaccattgatgtttaagtgtttagaaatcatagaaggtgtaggctgctgtggtaattctatttgtatatctcaacagaattaaaatgtctagcttggtggtatttttatagccataaaagaaaatctttaggctttcaaaataaggatgactttagaataatattgtgtcatagaattaattttcagccatgtggaccatattttgtatccaaggatccttatttaaagctttcaacatgtacaggaagttggaaatttttggtttatgactttgtctaataaagagatagttctaaacacattcttgatcaccaaacaacttcagaaagacagtgactgtacagttatcattatcatcatcatcgtcatcatcataggtaacagttatatcaagcttaatatgtgctgaacattgttctgaacactttaggtagatgaactagatgtatgtgaataaaaattatttggtcctcacaaaaaaaaaaaaaaaaaaaaaaaaaaaaaaaaaaataaaaaaaaaaaaaaaaacaaaaaaaaaacaaacaagaagtgtgcgtgcgccgcgcggcgcccgcgcgcgccccgcaaagaagaagttcttcctacagcaccccgctgcggtgggggcgcgaccgagcggcggcccagagagggagatgagtgagcgacagcaggggggaactacaaacgcgggtgcgtccccaagaagaagcaacaccccccgggcaagagagaaacctaggcggcttggtgtgtgtgtctctcccaaccccagaattaaaaagagagacacgcgcgccgcggggggagacacacgagaggcgtgttcttagaacgacaaacaaactcaccgagagggggagcgcctatgcaagaaagacagccacaaagagggggagggtatctacaacaaagcaagggggggcggccaaaaagaggggacgcataagaataaaaaaaaaatcacccccgcgcggctgctcgtgcgn

SEQ ID NO: 27555 - DNA, 999 bp, Homo sapiens
caggcgccggcgtaattaaatataactgagtttacgcagacgcagaaaacgcaggcaaacctgaggtcctcagaatggcgggcacaggtttggtggctggagaggttgtggtggatgcgctgccgtattttgatcaaggttatgaagcccctggtgtgcgggaagcggctgcagcgctggtggaggaggaaactcgcagataccgacctactaagaactacctgagctacctgacagccccggattattctgcctttgaaactgacataatgagaaatgaatttgaaagactggctgctcgacaaccaattgaattgctcagtatgaaacgatatgagcttccagccccctcctctggtcaaaaaaatgacattactgcatggcaagaatgtgtaaacaattctatggcccagttagagcatcaagcagttagaattgagaatctggaactaatgtcacagcatggatgtaatgcctggaaagtatacaatgaaaatctagttcatatgattgaacacgcacagaaggaacttcagaagttaagaaaacatattcaagatttaaactggcagagaaagaacatgcaactcacagctggatctaaattgagagaaatggagtcaaattgggtatccctggtcagtaagaattatgagattgaacggactattgttcagctagaaaatgaaatctatcaaattaagcagcaacatggagaggcaaacaaagaaaacatccggcaagacttctgaaaagacaatttagcaggtagaagaaaagttgggctttcacatttatgatttgcaggcacgcctctccaaaccctgagttagtgttagaatcttcagggtggtgcgggtatctattgtatccacgaatagagtcgcggggttttagcaaaaaatcggttcacaagggacttaaatggtctaaataggtgtacatgtacgcctactcgctcgaggccgtactctagacttctccacaaggactattgca

SEQ ID NO: 27556 - DNA, 1270 bp, Homo sapiens
caggcgccggcgtaattaaatataactgagtttacgcagacgcagaaaacgcaggcaaacctgaggtcctcagaatggcgggcacaggtttggtggctggagaggttgtggtgctgcagcgctggtggaggaggaaactcgcagataccgacctactaagaactacctgagctacctgacagccccggattattctgcctttgaaactgacataatgagaaatgaatttgaaagactggctgctcgacaaccaattgaattgctcagtatgaaacgatatgagcttccagccccctcctctggtcaaaaaaatgacattactgcatggcaagaatgtgtaaacaattctatggcccagttagagcatcaagcagttagaattgagaatctggaactaatgtcacagcatggatgtaatgcctggaaagtatacaatgaaaatctagttcatatgattgaacacgcacagaaggaacttcagaagttaagaaaacatattcaagatttaaactggcagagaaagaacatgcaactcacagctggatctaaattgagagaaatggagtcaaattgggtatccctggtcagtaagaattatgagattgaacggactattgttcagctagaaaatgaaatctatcaaattaagcagcaacatggagaggcaaacaaagaaaacatccggcaagacttctgaaaagacaatttagcaggtagaagaaaagttgggctttcacaaaaggcatctgaacttttaatgaactgtgaaggacaacagcatcttcccaaaaccattgatgtttaagtgtttagaaatcatagaaggtgtaggctgctgtggtaattctatttgtatatctcaacagaattaaaatgtctagcttggtggtatttttatagccataaaagaaaatctttaggctttcaaaataaggatgactttagaataatattgtgtcatagaattaattttcagccatgtggaccatattttgtatccaaggatccttatttaaagctttcaacatgtacaggaagttggaaatttttggtttatgactttgtctaataaagagatagttctaaacacattcttgatcaccaaacaacttcagaaagacagtgactgtacagttatcattatcatcatcatcgtcatcatcataggtaacagttatatcaagcttaatatgtgctgaacattgttctgaacactttaggtagatgaactagatgtatgtgaataaaaattatttggtcctcacaaaaa

SEQ ID NO: 27557 - DNA, 1384 bp, Homo sapiens
  misc_feature (285)..(285): n is a, c, g, or t
ggcaggcaaacctgtaggtcctcagaaaatggcggggactagcaggttgggatggcttggtagagggttgtggtggtatgcgcttgccaggtacttattgattcaagggttatgatagccccttgtgatggtgcgggaacgcggcatgcagctgcatggtgggaggaggagaagcgtcgtcagcattgaccgagccgtcactgaagaacgttactctgcaggctaactcgtgcacaaggccccggaatatcatatcttgacctatcggaaactggacattaatgnagggaaatgtaatttagaaagagatctgggctggactcgcacgagacctagagttgtacactgtggctcgagatatgaaaaacgtataatgacgcttaccgagcaatatgagcttccagccccctcctctggtcaaaaaaatgacattactgcatggcaagaatgtgtaaacaattctatggcccagttagagcatcaagcagttagaattgagaatctggaactaatgtcacagcatggatgtaatgcctggaaagtatacaatgaaaatctagttcatatgattgaacacgcacagaaggaacttcagaagttaagaaaacatattcaagatttaaactggcagagaaagaacatgcaactcacagctggatctaaattgagagaaatggagtcaaattgggtatccctggtcagtaagaattatgagattgaacggactattgttcagctagaaaatgaaatctatcaaattaagcagcaacatggagaggcaaacaaagaaaacatccggcaagacttctgaaaagacaatttagcaggtagaagaaaagttgggctttcacaaaaggcatctgaacttttaatgaactgtgaaggacaacagcatcttcccaaaaccattgatgtttaagtgtttagaaatcatagaaggtgtaggctgctgtggtaattctatttgtatatctcaacagaattaaaatgtctagcttggtggtatttttatagccataaaagaaaatctttaggctttcaaaataaggatgactttagaataatattgtgtcatagaattaattttcagccatgtggaccatattttgtatccaaggatccttatttaaagctttcaacatgtacaggaagttggaaatttttggtttatgactttgtctaataaagagatagttctaaacacattcttgatcaccaaacaacttcagaaagacagtgactgtacagttatcattatcatcatcatcgtcatcatcataggtaacagttatatcaagcttaatatgtgctgaacattgttctgaacactttaggtagatgaactagatgtatgtgaataaaaattatttggtcctcacaaaaa

SEQ ID NO: 27558 - DNA, 609 bp, Homo sapiens
tttaccatttagtcctacttactgccccatccttctcgctcatacttctcctacacagattctttcccatactgtacatgtttacccacaatgtgtaaatgccactatcctgtctgcatctgtacatgccaagccccttctcctagcataccttttccattatcctagcactccaggaacaccttcaatttccagttccaaacctgcccctctggcagccttccccagttgctttaattcatgagtatctttcatatacctctgaatggctctagtgcttacagtctttgtctgtaatggcctcaccatgtagttattttacctttttatctcctccagtgtaccgtcagctcctggagcgcagggcacttggtttattgatggtgtcgagaaaagcctcagagatggtgagaatctgtgaacaagctggaaaccaaacgcacctccttcaggtcagggtgggagtatattccccatgaaatagtccggaaagatggagtagcattgcttaaatttcttggtgttccggtcagctcttcagatagtttccaaaagaagtccctggctgaaataattccccgcaactccagctgtgagcaatgaattaaa

SEQ ID NO: 27559 - DNA, 1303 bp, Homo sapiens
agattgtctctaaaattgtggtttaactcacgcaggaagtaaaattcctatagcaagacatagtttcattttagaggacccccaaaatcccgtgaattctctggtgatgattctagcctaaccttcaacataaaataatgaagagaacttttaaacttttttatgaattcctaaacattaccatttatgtggcagaagttctgttccctataatctgcaatgctgaagtatctctattcaattcccttccttatctgttaaatttaatgtctttatactaaaaatataggctcttgggattggagaggaaaaattagaggtgattttcagatttcttgttctatggaagaggaagctgagctcagggagatatgagctccacagccacagctggttaggggcggctgcagtagaacagggcagatgcctggactcccaactcagtaggccttctgttacacctcaaaatgtgttacatgggaagaaaaagattaagaaaaagcaagataattttgaagaaggacgagaggaagaggcatgaacttgtcctaacaatgtcaaagaatattttaaaggtataccagttaaagtagtgtgtggctggtgccagtagaggtcagtcaagggatccctgacgagaataaagagcccagaaacaggtccatgtttatatgggaacttgatttttgacagatacggcaagctctatggggaaaacaatatgtactaccttatacccttccccaaaaacaaagggattaaagacctaaatatgaagacaaaacttttaaatgagaatctataaggttattttcatgattttgcaaatgggaaggatttctttaaagcaagacacaaaagcatacacaggaaaaaatgatgcataaaaacatggcttctgtagaacaatagagactgtaaaagaacaagctacagacaaggaaatgtttgcaatgcatggaactgtcaaaggattcgtatctggaatacattaaagaagcaaaagaacctcatacaaaagtcattgagtaaatgacagccatgcattagaacagcaattctcaaaacttttggtctcaagatccctttacactcttcaaaagtgagaaccccaaagagttttcatgtatgtgggttaaatctattgatattttctgttagaatttaaaaattatgttaaaaaaataagaagaatgactatttttcaaaacaaaaaatgagaagagtggtattgttttacatttttacaaatctctttaacatttagcttaataaaagatagctggcctctcaaaaaaaaaaa

SEQ ID NO: 27560 - DNA, 550 bp, Homo sapiens
  misc_feature (85)..(85): n is a, c, g, or t
ggcgtgcccacttctcccgcgaattgcccgaggagacgcgcgaggcctacgagcgtctcctgaagaggcaaaaccagcgtggcgnccgcgctctcttccaggacatcaagaagccaaccgtggactagtactagtccacggttggctccggtagcttttgcctcctggagcccacagtccagatggggacaaaaaaagagatagggacacaaagagtgatcactgagccagagggtggaaaggtgcttaggagacatgagctgcttggaggcagagtcctgcttggaagctgttggttgattcctgggcaagccacttcccctcctgggcctgggttttcatctgtaaatgaaggcgtggatccagatctccctctaagactactccacgcctcacgtgccatttgttctctgagtttcccatgttctcgcctcctactacctagccctatgctaggactctcccctccaggacacagtagccaaccgtggactagtagccaaccgtggactagtagccaaccgtgactagtagccaaccgtggactagt

SEQ ID NO: 27561 - DNA, 715 bp, Homo sapiens
gtctggaggtggccaggtggggctggggccatcttcacagggcaagataatccccaaggagcctggccacttccaagattctatgattctactctgctatcatctttaattattttaaaaaatatgtcactgacacataacaaatgagggcagaaatggcattgttcccatctggggaagagcctcaagggtgggcagtatacaaaacatgaccctttgccagattctaactggtccagtgcccaatcccattgatagaaactcaaccaatgcaaacctcagcctgcaagctccgaaggggcagagtgcaagccggtagcttttgcctcctggagcccacagtccagatggggacaaaaaaagagatagggacacaaagagtgatcactgagccagagggtggaaaggtgcttaggagacatgagctgcttggaggcagagtcctgcttggaagctgttggttgattcctgggcaagccacttcccctcctgggcctgggttttcatctgtaaatgaaggcgtggatccagatctccctctaagactactccacgcctcacgtgccatttgttctctgagtttcccatgttctcgcctcctactacctagccctatgctaggactctcccctccaggacacagtagccaaccgtggactagtagccaaccgtggactagtagccaaccgtgactagtagccaaccgtggactagt

SEQ ID NO: 27562 - DNA, 482 bp, Homo sapiens
ctctaccagatattaaaatgtcacaaagccacagtaattaaaacagtgtaatgatacacagagagataaccagaccaatggaataaaaaagaaagtctaaaagtagaatcagcattttatggaaatccagtgtatgatgaaagtgagatttcataacactgagcctttttaaaaatggtgttggggctcggtacagtggcttatgcctataatcccagcactttggaaggccaaagaggaggattgcttgaagccacgagtttgagaccagcctgggtcacaaagtgagaccccagtctctataaaaattaaaaagaagaaaattagttagccagatgtggtggtatgcacctgtagtcatagctacctggaaggctgaggcaggagcatctcttgagcccaggagttcaaggctgcagtcagctatgatcatacccctgcactccatcctggatgatacagtgagatcctatccctaaaaa

SEQ ID NO: 27563 - DNA, 231 bp, Homo sapiens
ccaatagatgaaaaaagattcaaggaagacacatttgctttttattcactcatcacttcccatcactatgctgaccagagtcaatgtgagcagagttgagaatagcagttttctggcaggagagccacttctcagcgaaaaatgacacactcaaagtataaatctttcatggaaggctcacatattttcagcaaattaagcatatgcatgaataaaattcttgtggtgaaa

SEQ ID NO: 27564 - DNA, 646 bp, Homo sapiens
ggagtcaggtctcttgaatacaagatgcaaatttatgcaacatatgcaaatcactcatgttctcaaattccatgaacaaaatctggtagccttgagataaaaaagcccctgccaagcatcatctctcctaattattgcttaatttcctcctccccccaccctttaacattgaacactttcaggcttggcagaaactggaagaaaacacaatgagagctggttaataaacaggaagttcctcaggggcaaagaccctgcaatctatttattttatgctctccagtggctcctaatatactgctgagcacacacagtcttgcatagggaacaccaccagtcctgactatcaaattatggatatttcaagatgaacaagttgagagccccgaaagctttgcaaaacatgccatttaagactagaaacaggaaactgatgacctgtactatataatgcatgtagctattaatttatttaaattaaataacatttaaaaattttgttcttggctgggtgtggcggctcatgcctgtaatcctagccctttgggagaccgaggcaggaggatcccttgagcccaggagtttgagaccagcctgggcaacatagggaaaccctgtctctattaaattaaaaagaaaaaaaaaa

SEQ ID NO: 27565 - DNA, 281 bp, Homo sapiens
agagtttcagttttacaagataaaaagttttggagtctgattgcacaacaatggaaatatacttaacactcttcaacggtgcacttaaaatagtgaagatggttaattttatgttatgtatattttatccactatgacagaattttaaaaataaactgttggaatctaatagcaatagggagactgaattactaatataaccatggtacaaaatgataaatctaaatcagggtgtagataacatcaaattccctatttgggtctccacttcagtagacatt

SEQ ID NO: 27566 - DNA, 348 bp, Homo sapiens
tgttccgatgagtggcatcatttgtagcttagtcctgttaggacagacttttttaaaaaatctgatccttagccttactatgaaaaacatcagaataacatctcagtaatcagaaaaaatggttttctttcaggcaccgaatttaagatcaagtccagcttcctcctataaggagacatatacactagaagaattaggatttttctcaaatatgttagtcttctgaagatattcacaatctttcaaaccagaaattgctccccttctcctctctccgaaaagaataatagtgtttttcttttgagagaaggagaagtgtttgcattttccctttattttgtttattta

SEQ ID NO: 27567 - DNA, 372 bp, Homo sapiens
cagggtcccaggacacaggaagaccccgagggtagatcctggaccctggaaagtcagtagcctaagggaagtgaagatgcagaaaactgagagtgcagatatggggaacgcatctggaaattagctggcacagaggaggaagcctgagagccagggtgggctgtggagttctgggtacacgtgctgacagctggaaacatggggctgaggctgcatggggcagtgggagctcaagacacaaatctggccaggtgtggtggctcacgcctgtcatcctagcactttgggaggccgaggctggagaattgcttgtggccaggtgttcgagaccagtctgggcaacatgatgaaatctcgaaacctcgtctctac

SEQ ID NO: 27568 - DNA, 436 bp, Homo sapiens
tgaaaataaatggagctctagtaaatgttagagtttttgctagtagagttttgatgctttttgtctttgttctactactgagcttgcacctaggatgccttcttatagtgccattcaacatgcaagtttctttttctggggctgtgtgtccaggtgactttatgagttaggctttggcaaatgccagacttgttcatcctaacactagaatgtagggatcctgcattcagcatgacctgaaatttgctcaaagtataaaattgtagatgttcagtttttatacagaattcaatcttttgaagacttaaattagttcatatttaactttggacttacctggagaatcgcttgaaccaagaagtcagaggttgcagtgagctgagatctcgccacagcactccagcctggtgagagagtgagagtccatctaaaaaaa

SEQ ID NO: 27569 - DNA, 408 bp, Homo sapiens
tgagaattgcttgaacctgggagtggaggttgctgtgagccaagatcgtgccactgtactccatcctgggcaacagagtgtgactcagtctcaaaagataataaagataatatttttttaaaagtttgaaaaaaaaggtgatagctatcaacaggtattattttggggggctcctgctgtttgctaagtactgtgtcaagggctttacttgcataacctcattaattattcctaaccctaagaaatgagtacaattattcccattttatagttgaagaaatcaaggagcagaaatattcaggaatatttagtcagtaatggagctaggattggcttccaggtcttcctgacggcaaagcccatgttattcattccattgtgttggatcaaaattttaggatgggattt

SEQ ID NO: 27570 - DNA, 778 bp, Homo sapiens
gtgggatatgaagcatgagacggaatgaggtcaccaagagagtgaatgtatataaagcaaagagggtgtccaagggctgagttctgagatacttcaatagcagaagatgatgctgagaagcagaagccagctaaagagactgagaaagtgctggtggtgaagcaccaggaaaatcaacagatcatgctctgtgttagtggattcacaagcaacctgtactcctcaaagaaagatgataagatgaaggagatctctagaaccagcaactggggctcttccttcagtgaaaaaagtgggtgtatgcagactcatccatccatgaatctagattgcagggatgtgacctatgtaatgaacttgctacttattgcctcatcatcatcttcttcaatgacaaaaaagaaaatagtaacaatgaatacgtctcttgggcaaaataaataatgagattgttacagcaacctgatttttgaaaagaaaaaaggaacttcctcgaactaaagcagttaagacctcgacatttgctcacagaaaaagtcgctgagtcgtttctagttgtgaaggtgcaaaagatgcagttatcccttatggaaaattccaagaacttgtgcctaatttgagtcatgcaaacctgagttctgcatgactgagctctgtcactcaatggttgggaaatttgtgatcatctctacgccttgctttctgcatctgtaaagtggaaatgataatatctaccttgtgtgattcctggaagaattaaatacattatattcaaaat

SEQ ID NO: 27571 - DNA, 387 bp, Homo sapiens
aaaagggaggaggagcaggaaaaggaggagaaggatgagggagatgaagagaaggaagaagcaaaagcaacctgatttttgaaaagaaaaaaggaacttcctcgaactaaagcagttaagacctcgacatttgctcacagaaaaagtcgctgagtcgtttctagttgtgaaggtgcaaaagatgcagttatcccttatggaaaattccaagaacttgtgcctaatttgagtcatgcaaacctgagttctgcatgactgagctctgtcactcaatggttgggaaatttgtgatcatctctacgccttgctttctgcatctgtaaagtggaaatgataatatctaccttgtgtgattcctggaagaattaaatacattatattcaaaat

SEQ ID NO: 27572 - DNA, 405 bp, Homo sapiens
tgagttctgagatacttcaatagcagaagatgatgctgagaagcagaagccagctaaagagactgagaaagtgctggtggtgaagcaccaggaaaatcaacagatcatgtaagatgtctcagatgccaagtgaagaaagcattttaaggacaaggaggcagtcaactgtattatatgttgctaatcagcaaaccaagatgagaattgatgtttgacttttgtgtttagcaatgtgggtgtcaatcattataataattaggtttatatataataaccttgataacaacaattttggtggagagtgaaggtgaaactgtgatttaagagtgatgaagagaaaatgagtagaaagcttattcatcagctatgggttttatacaagttacagaacctcaaatcctccct

SEQ ID NO: 27573 - DNA, 292 bp, Homo sapiens
ataaaatattttctacatttctgtttatttcccttagattcccagcagtggaatttccaagccaaaagcttttggtacatgttataaattgcttttaagaatgtgtatcaattataatgtccagtgtttgctttaaaacattctagcaaagaaaaaagtataggggattagatgaggagaaactggcaaaatggtaacagttgaagctaggtgaggtgcctggagattcattttgctattattctcttttgtgtatgtctgaaaattacaaagatttctaaattgaattgaa

SEQ ID NO: 27574 - DNA, 410 bp, Homo sapiens
ttaaaaagttcttactatgcatataaaaactagtttcattgtattccaaaaacacctaaacataatctatgtagatggttcttgaaagaattaagaaaaaaaattgtttaaaaaaagatagactaagaaaagtgaaaagatggagagagagatataagaaaacaggctgcctttaaaacaacaacaaaatatgttgtctgaacttggctttgcaggggtattaaacagaaaacaggagcataattttcacagactttgaggataagatgacatggcaagacatcaacccagtaatcattaataaaataaagcaacagaagggtaagttaagttactctatgactcacgatataccatgtttatctgcttatgtttaaaaatgttctctaagatttactacagacagtctt

SEQ ID NO: 27575 - DNA, 388 bp, Homo sapiens
tctgagacaggatctcactctgtcccacaggcttgagggcagtagctccatcttggctcaccgcaacctctgcctcctaggttcaagcgattctcctgcctcagcctcctgagtagctgggactacaggtgcccaccactatacctggctattttttgtatttttagcagagatggggttttgccatgttggccgggctggtctcgaactcctggcctcatgtgatctgcctgtctgggcctcccaaagtgctgggattacaggtgtgagccaccgtgtccagccgggatcactgtctttattcttcatccgtgtctcctgggtgatcattaattgggctctcccagtgtgctggccactgtcttttctgggtttgattgattgagtc

SEQ ID NO: 27576 - DNA, 583 bp, Homo sapiens
gcaacatgttggcactgaaaacgtttcaaattttggagcacttaggattttgggttttcagatttgggatactcaacgtgtatgtagctattctcccatccaggtggtggagtttaattcccctctcttgagtgtggacttagtaactctatttcaaagaatagagaatgggaaggaaaaataaggcctttactgaggaaatatggcaagtgccagtgaggaaccaagtgagaaaggttggcatgaccagtgataagccacgtgcatatcgtgagcccctgataggatgcatggaggcatcttgcctccatgggatcgtaccaaaaaaccacagttcagtctaatcataggaaaactcacaatcccaggtcaggggacattctataggatacttggccagtactcttcaaacatggcaaggccttgaaaaacacaaaagaccgaggaactgtcactgataagagactaaggacccaggatgaaaatgcaaagtggactcccagatcagttcctggaacagaaatctggagtttgtgggaaaactggtgaagcccaaataaagtccgtagccaagttcatggta

SEQ ID NO: 27577 - DNA, 402 bp, Homo sapiens
ttctatttttatatcctcaagctcagagattgtttcctcggccatgtccagtctactaatgagcccatcaaaggcattctttatttctgttgcagtgtttttgatctctagcacttttctgtgattctttcttaggcttttcatctcctaacttacattatctacctgttcttatatcttgtctactttttccattagagcccttagcatattaatcatacttttaaattcctggtgtgataattccaacatttgtgccctatctgactctgattctgatgctcgttgggtctcttcaaactgcgttttttgccctttagtatgctttgtgcttttttgttgaaatgtgaatattttgtagagatgaaaagaatgtggggctgggtgtggtggcttacacct

SEQ ID NO: 27578 - DNA, 164 bp, Homo sapiens
agtctgaacacaactaccaaccgctaagtggaagctcttagcagaggtcagccgagttttcaagtgaggctataactgctgaagagtagcccttcaacctatggtacttggttgcccattataaaggaaagctgtgtagtaatttgactttttataccttaaga

SEQ ID NO: 27579 - DNA, 560 bp, Homo sapiens
cgcaacgcacctggtgcgctttggcaaacaagccccgcggcgggctggggcaggatttaagaaatgtttaatgaagactgggaggcctggagcaacgctctttgggatgcagaaaagggtcgtgcagctcggtggcctctcctccggccccctggccctggctgtaagtttcctcggctctgcagggcgcggggcactcagggatggaggagaccacaccgcgcggctgggttcgcggaatggcggtccctgcggcctccaaaggcgggacctcagacccctcccactcctttcctgctcgacatctcaatccagctcctaatatctcaatagggtttttaaacaaatcgatcctaagggctcagttcagcccacccagggattcttggaggacgcacgccgaactcagggtagtgagaagagtttggggggccctggggcgcagggagaagaccccacactccacggccaccagctcccttccggagacggcgctcggacgtcgcgggtcacgggcggggaatttagcccaggtgctcgttgggccgcgagcggccgct

SEQ ID NO: 27580 - DNA, 219 bp, Homo sapiens
tttgccatgttgcccaggctggccttgaactcctggtctcaatccatccatctaccttggccttccaaagtgctgcaattacaggcgtgagtcactgtgccctgctattacactctattcttacaatcaagtatgctagagaaaacattattaatcataaggaagagaaaatatacttactacttgttaaatggaagtggatcatcataaaggtcttca

SEQ ID NO: 27581 - DNA, 211 bp, Homo sapiens
gcatgcggttactcccaaattggtatctttagcctgtacttacctcttcatagatccaactgtcatttccaatttggtgtctaagagaaaattcaaacttagtttgtcgaaactgaactcctgacctcctcctatcccatccaagcttagttgtccttatgcttttccaggtttatttaatagcaactttattggtatagttgcttagctc

SEQ ID NO: 27582 - DNA, 454 bp, Homo sapiens
ttctgcgctgtggagcctctggggctcagctgggcggtggtcgggtcgtggggcggtagggcgggagcgggggaagggaaaagcaaaagctggaaaagaagcaggggagttgtgaaccagacatccagacctcctgaagggctcgtgcagacgtacaggcgggatcttctggaagtgagaattgtttttgtttgtttatctattgtagcagaatggggaaatggagagagaacctgaaagagccccaaactcgaggacctattgctccccaagaataacatcttccagaactagacagaaaactaggcgtctgggaaccctgaaatccttggaggagtagatcatcatgaccctctgtgttccttttggcaaatgacttgcttccattgtttgtttgttcaattgtctgtttgttaaataaataaaacccttttcatgtatctttaaaattaca

SEQ ID NO: 27583 - DNA, 391 bp, Homo sapiens
tgggtcattaacaaggcaggccagacttggcctgccagaatgtggggcttgagattgtggaggagagaacaaatggaatgtgagtcagtaaggctgctagctacagaaaccaacccaagaagaggtttactggaaggtgtatcagtaggattagcttcagctgtggttaagagtcccaactacaatagggaaaatacaggggttaattctgtcacacaaaacccagaggcagaaagaagagaactgatctggaggctccattagtgtatcagagccccagactctgtgcttttgctccaccaaacatgacttccattctcaagatcatctcaagatctaggatggctgctagagctccggccattgcttccacgttccatgcagcaggaag

SEQ ID NO: 27584 - DNA, 354 bp, Homo sapiens
tgtaatcaaaggtgtaggaaagggatgctggctgcacagaaaaagtgttgttcaccaccaggaggaaggagggaaacaagaagacctgaggatcaggtggtacaccacttcagtgttcaggtggcacaaacaaacactagaagaaaataatcatcaccagcctgggaaacatggcaaaatccaatctctacaaaaaataacaacaacaaaagaaaaccacacacacacacaaaagtaaattagccaggcatggtggcatgcacctgtaatcccagctgcttgagaggctgaggtgggaggattcattgaacccaggagattgaggttgcagtgaggtgtgattgcaccactgtg

SEQ ID NO: 27585 - DNA, 688 bp, Homo sapiens
tccccagacttgccctttagttccctggggcaccctttttccgctgagtcacatccccagagtgctcccaggtaaacaagcccctgggggctgggggatgagcctggctcatcctatctaccattccttccccaccccacccccgccccacttctagtccttttacctcccctggcagcagctgcagcgggcccaaaccgatgtgacaccatataccagggcttcgccgagtgtctcatccgcttgggggacagcatgggccgcggaggcgagctggagaccatctgcaggtcttggaatgacttccatgcctgtgcctctcaggtcctgtcaggctgtccggaggaggcagctgcagtgtgggaatcactacagcaagaagctcgccaggccccccgtccgaataacttgcacactctgtgcggtgccccggtgcatgttcgggagcgcggcacaggctccgaaaccaaccaggagacgctgcgggctacagcgcctgcactccccatggcccctgcgcccccactgctggcggctgctctggctctggcctacctcctgaggcctctggcctagcttgttgggttgggtagcagcgcccgtacctccagccctgctctggcggtggttgtccaggctctgcagagcgcagcagggcttttcattaaaggtatttatatttgtagta

SEQ ID NO: 27586 - DNA, 1110 bp, Homo sapiens
ggctctgtcgggacattttatccgtctgtttacaacatgaaatagacacctccgaaatgtgtgtgtgttccgtaaatgaaggagcagagggaccccttcggagcatctcagaggccaggaagcctggcttctggccgccctgcccgctcctcacgtgtgaggggaactggggaagtcgagtcagcccgctggggttcctgattctctgcggttctgggaagagcttgcagtggaaggcctcccagccatttcctcttctcccccaactgtgactcactgattgattaatgtttggaaattgtgactcatcttgttagagaaggaaaaggaaattttattctcttcattctccctccctttcaaataagtaataaataaaaagtggctgatcttccacttggtgcggtaagaagcatttaaatacattcccggccctcataattggtggcttcttggagaaaggtacttattagaagaaaaacacttccctatgtgttgttgttcggccttctcgttgatgaaattacacggtgagttggtgagcgaatttaccttgcccctttttaaaggtatttgtggcagctcttgttgtaggaatcaggggagaggagccacttctcttttagtaagaaatgcgaagagtggcctctccatcttcagagtttcaaaatgagttcactctggtggtgagtaatgatgtcttaagctggcttattaaaggcggaggaataagatgttcttgctttacctcacgtaccaaatatagataaggcgctggatcagcagagcctcaggcccgtgccaggacacagtcgggcctggcgatgtctgttttgtctcacgactggagggttgaaggggaagcacagcctttgcttttaagggttttcttctgggaaatccacaaaaaaaaaaaaagcatttgttcacttctcacgttgtgatgttgaaattatggcttggagttttacatttgccttttaattctctttatgggcagcatgtctgtatgtcttaggctcttggttctggaagaccaagtaaattcagtatcttttcaaattgtaaccctctggtctgggtaacacagcaagacccccatctctacaa

SEQ ID NO: 27587 - DNA, 1521 bp, Homo sapiens
  misc_feature (46)..(46): n is a, c, g, or t
ctgaaaaggaccagctgtccttttccgtgtccgcccccactctgtngaaccagctcccccccaacatccgctgtcctcctagtctctctacctggggcccatcttgaagtttggctccaaggagcagaagcaggcgtgggtcacgcctttcaccagtggtgacaaaattggctgctttgccctcagcgaaccagggaacggcagtgatgcaggagctgcgtccaccaccgcccgggccgagggcgactcatgggttctgaatggaaccaaagcctggatcaccaatgcctgggaggcttcggctgccgtggtctttgccagcacggacagagccctgcaaaacaagggcatcagtgccttcctggtccccatgccaacgcctgggctcacgttggggaagaaagaagacaagctgggcatccggggctcatccacggccaacctcatctttgaggactgtcgcatccccaaggacagcatcctgggggagccagggatgggcttcaagatagccatgcaaaccctggacatgggccgcatcggcatcgcctcccaggccctgggcattgcccagaccgccctcgattgtgctgtgaactacgctgagaatcgcatggccttcggggcgcccctcaccaagctccaggtcatccagttcaagttggcagacatggccctggccctggagagtgcccggctgctgacctggcgcgctgccatgctgaaggataacaagaagcctttcatcaaggaggcagccatggccaagctggccgcctcggaggccgcgaccgccatcagccaccaggccatccagatcctgggcggcatgggctacgtgacagagatgccggcagagcggcactaccgcgacgcccgcatcactgagatctacgagggcaccagcgaaatccagcggctggtgatcgccgggcatctgctcaggagctaccggagctgagcccgcggcggactgccccaggactgcgggaaggcgcgggagccaggggcctccaccccaaccccggctcagagactgggcggcccggcgggggctccctggggaccccagatgggctcagtgctgccacccagatcagatcacatgggaatgaggccctccgaccattggcagctccgcctctgggcctttccgcctcctcaccactgtgcctcaagttcctcatctaagtggccctggcctcctgggggcggggttgtgggggggctgagcgacactcagggacacctcagttgtcctcccgcgggccctggtgccctggcatgaaggcccagtgcgacaggcccttggtggggtctgtcttttccttgaggtcagaggtcaggagcagggctggggtcaggatgacgaggcctggggtcctggtgttgggcaggtggtggggctgggccatggagctggcccagaggcccctcagccctttgtaaagtctgatgaaggcaggggtggtgattcatgctgtgtgactgactgtgggtaataaacacacctgtccccca

SEQ ID NO: 27588 - DNA, 1701 bp, Homo sapiens
  misc_feature (7)..(7): n is a, c, g, or t
  misc_feature (17)..(17): n is a, c, g, or t
  misc_feature (21)..(21): n is a, c, g, or t
cacgggnaggtcgcganctgnggaactgtgtctgtcgcccatggccgccgcgctgctcgcccgggcctcgggccctgcccgcagagctctctgtcctagggcctggcggcagttacacaccatctaccagtctgtggaactgcccgagacacaccagatgttgctccagacatgccgggactttgccgagaaggagttgtttcccattgcagcccaggtggataaggaacatctcttcccagcggctcaggtgaagaagatgggcgggcttgggcttctggccatggacgtgcccgaggagcttggcggtgctggcctcgattacctggcctacgccatcgccatggaggagatcagccgtggctgcgcctccaccggagtcatcatgagtgtcaacaactctctctacctggggcccatcttgaagtttggctccaaggagcagaagcaggcgtgggtcacgcctttcaccagtggtgacaaaattggctgctttgccctcagcgaaccagggaacggcagtgatgcaggagctgcgtccaccaccgcccgggccgagggcgactcatgggttctgaatggaaccaaagcctggatcaccaatgcctgggaggcttcggctgccgtggtctttgccagcacggacagagccctgcaaaacaagggcatcagtgccttcctggtccccatgccaacgcctgggctcacgttggggaagaaagaagacaagctgggcatccggggctcatccacggccaacctcatctttgaggactgtcgcatccccaaggacagcatcctgggggagccagggatgggcttcaagatagccatgttcaagttggcagacatggccctggccctggagagtgcccggctgctgacctggcgcgctgccatgctgaaggataacaagaagcctttcatcaaggaggcagccatggccaagctggccgcctcggaggccgcgaccgccatcagccaccaggccatccagatcctgggcggcatgggctacgtgacagagatgccggcagagcggcactaccgcgacgcccgcatcactgagatctacgagggcaccagcgaaatccagcggctggtgatcgccgggcatctgctcaggagctaccggagctgagcccgcggcggactgccccaggactgcgggaaggcgcgggagccaggggcctccaccccaaccccggctcagagactgggcggcccggcgggggctccctggggaccccagatgggctcagtgctgccacccagatcagatcacatgggaatgaggccctccgaccattggcagctccgcctctgggcctttccgcctcctcaccactgtgcctcaagttcctcatctaagtggccctggcctcctgggggcggggttgtgggggggctgagcgacactcagggacacctcagttgtcctcccgcgggccctggtgccctggcatgaaggcccagtgcgacaggcccttggtggggtctgtcttttccttgaggtcagaggtcaggagcagggctggggtcaggatgacgaggcctggggtcctggtgttgggcaggtggtggggctgggccatggagctggcccagaggcccctcagccctttgtaaagtctgatgaaggcaggggtggtgattcatgctgtgtgactgactgtgggtaataaacacacctgtccccca

SEQ ID NO: 27589 - DNA, 1839 bp, Homo sapiens
  misc_feature (7)..(7): n is a, c, g, or t
  misc_feature (17)..(17): n is a, c, g, or t
  misc_feature (21)..(21): n is a, c, g, or t
cacgggnaggtcgcganctgnggaactgtgtctgtcgcccatggccgccgcgctgctcgcccgggcctcgggccctgcccgcagagctctctgtcctagggcctggcggcagttacacaccatctaccagtctgtggaactgcccgagacacaccagatgttgctccagacatgccgggactttgccgagaaggagttgtttcccattgcagcccaggtggataaggaacatctcttcccagcggctcaggtgaagaagatgggcgggcttgggcttctggccatggacgtgcccgaggagcttggcggtgctggcctcgattacctggcctacgccatcgccatggaggagatcagccgtggctgcgcctccaccggagtcatcatgagtgtcaacaactctctctacctggggcccatcttgaagtttggctccaaggagcagaagcaggcgtgggtcacgcctttcaccagtggtgacaaaattggctgctttgccctcagcgaaccagggaacggcagtgatgcaggagctgcgtccaccaccgcccgggccgagggcgactcatgggttctgaatggaaccaaagcctggatcaccaatgcctgggaggcttcggctgccgtggtctttgccagcacggacagagccctgcaaaacaagggcatcagtgccttcctggtccccatgccaacgcctgggctcacgttggggaagaaagaagacaagctgggcatccggggctcatccacggccaacctcatctttgaggactgtcgcatccccaaggacagcatcctgggggagccagggatgggcttcaagatagccatgcaaaccctggacatgggccgcatcggcatcgcctcccaggccctgggcattgcccagaccgccctcgattgtgctgtgaactacgctgagaatcgcatggccttcggggcgcccctcaccaagctccaggtcatccagttcaagttggcagacatggccctggccctggagagtgcccggctgctgacctggcgcgctgccatgctgaaggataacaagaagcctttcatcaaggaggcagccatggccaagctggccgcctcggaggccgcgaccgccatcagccaccaggccatccagatcctgggcggcatgggctacgtgacagagatgccggcagagcggcactaccgcgacgcccgcatcactgagatctacgagggcaccagcgaaatccagcggctggtgatcgccgggcatctgctcaggagctaccggagctgagcccgcggcggactgccccaggactgcgggaaggcgcgggagccaggggcctccaccccaaccccggctcagagactgggcggcccggcgggggctccctggggaccccagatgggctcagtgctgccacccagatcagatcacatgggaatgaggccctccgaccattggcagctccgcctctgggcctttccgcctcctcaccactgtgcctcaagttcctcatctaagtggccctggcctcctgggggcggggttgtgggggggctgagcgacactcagggacacctcagttgtcctcccgcgggccctggtgccctggcatgaaggcccagtgcgacaggcccttggtggggtctgtcttttccttgaggtcagaggtcaggagcagggctggggtcaggatgacgaggcctggggtcctggtgttgggcaggtggtggggctgggccatggagctggcccagaggcccctcagccctttgtaaagtctgatgaaggcaggggtggtgattcatgctgtgtgactgactgtgggtaataaacacacctgtccccca

SEQ ID NO: 27590 - DNA, 1729 bp, Homo sapiens
  misc_feature (7)..(7): n is a, c, g, or t
  misc_feature (17)..(17): n is a, c, g, or t
  misc_feature (21)..(21): n is a, c, g, or t
  misc_feature (1527)..(1527): n is a, c, g, or t
  misc_feature (1532)..(1532): n is a, c, g, or t
  misc_feature (1541)..(1543): n is a, c, g, or t
  misc_feature (1546)..(1546): n is a, c, g, or t
  misc_feature (1561)..(1561): n is a, c, g, or t
  misc_feature (1583)..(1583): n is a, c, g, or t
  misc_feature (1585)..(1585): n is a, c, g, or t
  misc_feature (1632)..(1632): n is a, c, g, or t
  misc_feature (1725)..(1725): n is a, c, g, or t
cacgggnaggtcgcganctgnggaactgtgtctgtcgcccatggccgccgcgctgctcgcccgggcctcgggccctgcccgcagagctctctgtcctagggcctggcggcagttacacaccatctaccagtctgtggaactgcccgagacacaccagatgttgctccagacatgccgggactttgccgagaaggagttgtttcccattgcagcccaggtggataaggaacatctcttcccagcggctcaggtgaagaagatgggcgggcttgggcttctggccatggacgtgcccgaggagcttggcggtgctggcctcgattacctggcctacgccatcgccatggaggagatcagccgtggctgcgcctccaccggagtcatcatgagtgtcaacaactctctctacctggggcccatcttgaagtttggctccaaggagcagaagcaggcgtgggtcacgcctttcaccagtggtgacaaaattggctgctttgccctcagcgaaccagggaacggcagtgatgcaggagctgcgtccaccaccgcccgggccgagggcgactcatgggttctgaatggaaccaaagcctggatcaccaatgcctgggaggcttcggctgccgtggtctttgccagcacggacagagccctgcaaaacaagggcatcagtgccttcctggtccccatgccaacgcctgggctcacgttggggaagaaagaagacaagctgggcatccggggctcatccacggccaacctcatctttgaggactgtcgcatccccaaggacagcatcctgggggagccagggatgggcttcaagatagccatgcaaaccctggacatgggccgcatcggcatcgcctcccaggccctgggcattgcccagaccgccctcgattgtgctgtgaactacgctgagaatcgcatggccttcggggcgcccctcaccaagctccaggtcatccagttcaagttggcagacatggccctggccctggagagtgcccggctgctgacctggcgcgctgccatgctgaaggataacaagaagcctttcatcaaggaggcagccatggccaagctggccgcctcggaggccgcgaccgccatcagccaccaggccatccagatcctgggcggcatgggctacgtgacagagatgccggcagagcggcactaccgcgacgcccgcatcactgagatctacgagggcaccagcgaaatccagcggctggtgatcgccgggcatctgctcaggagctaccggagctgagcccgcggcggactgccccaggactgcgggaaggcgcgggagccaggggcctccaccccaaccccggctcagagactgggcggcccggcgggggctccctggggaccccagatgggctcagtgctgccacccagatcagatcacatgggaatgaggccctccgaccattggcagctccgcctctgggcctttccgcctcctcaccactgtgcctcaagttcctcatctaagtggccctggcctccttntttcnttttttttnnnttncttagctatactcanggacacctcatttttcctcccncnttccctttttccctttcattaattcccatttctacattccctttttnttttctttcttttcctttatttcagatttcattatcattttttttttcattattactattctttttttccttttttttttcattttttttttntttt

SEQ ID NO: 27591 - DNA, 404 bp, Homo sapiens
ttttgagacagggtctcactccgtctcccaggcgggagtgcagtggtgtgatcatggctcactgaagcctccaactcctgggctcaagtgatcccctcacctcagcctttcgagtagctgagactattgctacgaatggcaaaagccgcaattacctttgcaccaacctaatataagcgtgcgccaccacaccctgctgtaaaaaaaaaaaaaaaaaaggtttttttgtagagacagatttctttacattgcccaggctagtcttgaactcctgggttcaagcaatcctcccacctcggcctcccaaagtgctgggattacaggtatgagccactgtagctggcctatattgaaatttttgatccatctagaatttgtttgcatataagatgtgaggaaagaat

SEQ ID NO: 27592 - DNA, 450 bp, Homo sapiens
gcagaattgattctacacttgtaacacgggcatatttggctgttattgcctacgttatccattttgacacctcccctactctcaaagcccctgcatgtcactcgcttcctctgcttttccccttcagattatttcacccatgttctatttggtcatgacctgtatgtgtacctcatctaagtgatgctttatgaattccataaagccactcatctttgaggtctccaagaacagagactattccctaatgatccttttgtgcagtgttagttgttaaatgtgctaacggatgccagcgtttgaaaatggtgctgatccatgacctcttctgacaatgttagattcctatccttcagagtgagaattttaggcatgaggctgcttgaggtactgggttgcccaagacaaacctgatctccagggctgaagtatgggcatctatgaatcaat

SEQ ID NO: 27593 - DNA, 315 bp, Homo sapiens
gcatctttaaaataatcaaatgtccacctccaccttgccccattgtttactagatttagacttatgagatggagcagagaaaagcctcactgggatgggtggagggtcttggtcttgtcttttggccttgagactttaggtactttccatacccaccaatatgtctagactcagaggctaacatgactgctagtgctcaccttggccctttagttcctgtctaagcatggatagacatgagttagtataaaccctttaaaagtcacaaagctaaatctggttctacttgcttgggtccttatcggagctccactc

SEQ ID NO: 27594 - DNA, 378 bp, Homo sapiens
gtctatctctcttgaccagtgctgtggggccctcaactctgaccttctcagcaatggggatccactgattatcccctcccagtgaaacagtgaatctgccccttgcccatcagactataggcttgcccaagggtctcatgttaaaaataaataaataaaattcttcctcagcccctctctgggttctgctctgtatatcaatctttctacctagctaaacttcgtggaagccatgtctatcccaccattgccaattcttcacctcctgtccttcaaccccagcagtctgacttccaaactactactcccctgaaagtgctctccaaggtgacttttgtcttagtctgcttgggctactgtaacaaaataccatagact

SEQ ID NO: 27595 - DNA, 439 bp, Homo sapiens
tttttcaacctaatggcaagtgtgtgtgtgtgttcttggagtagttctgctggctatgaagagtatgtagtaatatgctaaagctttgtaaactcttcttttgttgttttggaagatggagtgttgctctgttgcccaggctggagtgcagtgatgtgattttggctcactagagtctccaccttctgggctcaagcagtcctctcacctcagcctccctggtttgtggaactacaggggcatgccagcatgcccggataatttttgtattttttttcttttgtagatacagagtctcactatgttgcccaggctagtctcaaactcctgagctcaagcagtcctcctgcctcagcttcctgaagtgttgggattacaggcatgagccattgcacctggccctaaattttaacagatacaaaactataagtttatactt

SEQ ID NO: 27596 - DNA, 440 bp, Homo sapiens
aattataaaaccaggaaactgacaatacaatccacagactacattcagatgtcaccagtgttacatgcattcatatgtgatcgcatgcatgtacagttctaagcaattttatcacatgctccatcacacgcagcaaaaccacaaaccccccccccacccccccaacaacccccaaaccacccccaacatgatagactttttctggtggcatctctttctcctccacttgccccttaaaccttggtgacagtactttgtttctatctctataattttgtccactacgaaaatattacagagatggaactgtacagtacacatctttttgagatcggcttttttctttttttctttttttttgagacggagtctcactctgttgcccaggctagagtgcagtggtgcggtctcggctcactgcaagctccgcctcctgggtt

SEQ ID NO: 27597 - DNA, 391 bp, Homo sapiens
aagatggaatctcactgtcacccagcctggagtacagtggtacgatttttagctcgttgcaacctccgcctcccaggctcaggtgatcctcctgccttagcctcctgagtaactgggaccacaggtgctcactacacccggctaattattttttgtatttttggtaaagatggggtttcgccatgttgatcaggctgttcttgaactcctgagctcaggtgatccagccccccttgacctccccaagtgctgggattacaggtgtaaacactacaccggcctgacttacttaaatgttatgtcttgaaaagctttatactattctttatattcaggcccatctctccctaactttattacttttgagacagtctcactctgtccccaggct

SEQ ID NO: 27598 - DNA, 328 bp, Homo sapiens
  misc_feature (26)..(26): n is a, c, g, or t
ctactactactaaattcgcggccgcntcgacgacagggtattggtatgttgccaggctggtctcaagcccctaggctcgggtgatcctcccgcctcagcctcccagagtgctgggattacaggtctgagccactgtgcctggccagactttgtaatgtaagaaagtgttgcctagatcctccatggactccagcctgtctagattattcctgctcttcagtgattagagtggtttctaggcttcttgatggcgcaaggatcacaaaaaattatttttatgctaacagtgaaaagattacagcaagaatggtttggagtaaaaaaaaaa

SEQ ID NO: 27599 - DNA, 465 bp, Homo sapiens
caccactccttgctaatttttgatttttttttgtagagatgggggggggtctcactatgttgcccaggctggtcttgaactcgtgggctcaagtgatcctccagcctcagtctgccaagtagctgggataacagacgtgtgccaccatgcccagctaatttatttttattttttgtagagacagggtattggtatgttgccaggctggtctcaagcccctaggctcgggtgatcctcccgcctcagcctcccagagtgctgggattacaggtctgagccactgtgcctggccagactttgtaatgtaagaaagtgttgcctagatcctccatggactccagcctgtctagattattcctgctcttcagtgattagagtggtttctaggcttcttgatggcgcaaggatcacaaaaaattatttttatgctaacagtgaaaagattacagcaagaatggtttggag

SEQ ID NO: 27600 - DNA, 333 bp, Homo sapiens
tttttccaaacactgaagtacggtttcttcttttgttatttttattttactttttttggagacagggtctttctctttcacccaggctgaagtgcagtggagccatcataactcattacaggttcaaattctcaaattcctaggcttaagtgatcctctcatataagcctcctgaatcactaggactacaggcacacactgccacgcccggctaatttttctctacgttttggagagacggggttttgccatgttacccaggctggtattgaactcctagcctcaagcaatccttccatctcagtctcccaaactgctgggattataggcgta

SEQ ID NO: 27601 - DNA, 381 bp, Homo sapiens
ttttgagacagagtctccctatgttgcccagactgcggaaatgcttttctttctctgccacatggccaggttgcaaattttccaaacctctatgttctgcttcccttttaaaaataaggtccaactttaagtcatttttttactcccacatctgagtgtaggctgttagaagcagccaggcgacatcttgaatgctttgctgcctagaaatctctgccagatatcctaaatcatcactctcaagttcaaacttccacagatccctggggtgtgaacacaatgcagccaagatctttgctaaggcataacacatgtgaactttgctccagtcccaataagttcctcatttccatctgagaccttttcagcctgaacttcact

SEQ ID NO: 27602 - DNA, 401 bp, Homo sapiens
ctactactactaaattcgcggccgctcgactttttttttgagacggagtctcgctctgtcgcccaggctggagtgcagtggcgggatctcagctcactgcaagctccgcctcccgggttcacgccattctcctgcctcagcctcccaagtagctgggactacaggcgcccgccactacgcccggctaattttttgtatttttagtagagacggggtttcaccgttttagccgggatggtctcgatctcctgacctcgtgatccgcccgcctcggcctcccagagtgctgggattacaggcgtgagccaccgcgcccggcccagagctcttcttgagtgactccgcagtgtatctcctaggctgaaataaagcatctttcacaaatatatgacatttcatgg

SEQ ID NO: 27603 - DNA, 643 bp, Homo sapiens
attttgttactggattattcaagtgacataatattctcaatgtttatcttaaaatgtgacaagattgttttatttaaggtggaataatattccattttatgtatatgttatattttttgacgtatttttaaatcaagagacttctgggttcaagcgattctcctgcttcagcctcccaagtaactgggattttaggcgcccacgaccatgcccagctagttttttgtatttttagtagagacagggacagcctggtctcaaactcctggcctcaggtgatctgcccctaccttggcctcccaaattgctaggattacgggcttgagccactgtgcctggctttttttacgtattttggatatagatttataaatgagaaacatttataactttttaaaataatgactgcacctttgttatccaccaacattcaacttaggtttcatttttattgcatcatcaacagatttggtgtttttaaaaaaatttatagtggccattctaatgtgtgtgaggtgattttgtttgtcattgtgtttttttttttcatttctctataaactagtaattttctgtgtcctttcaaatgctttttctcatttgtgtacttttctaataaaaatttcatttgtccatttctaaa

SEQ ID NO: 27604 - DNA, 407 bp, Homo sapiens
gaagaatatagctggcaaagacaattccaaaaatatagtgtatacccatttttactttctgggtagagtatctaaggaactataaaatggccctagaaacaacaggaatgaagaatgggcctggtaattgttttcacccagtgaccagcttctgaataagtaacagttatagactgcaaatttaaacctagagtgactgattttacccacagcattttctttctccttacgattattgccttcacactaagaatttattatttattgaaatcatctgtatcaagtagcatcaaatttattttatcttgccagtttttatagatccacttttagtgtacactcttaagtagaaaatagaattttcttgcagttttaaaaatcctttatactgtggaatctctaataat

SEQ ID NO: 27605 - DNA, 427 bp, Homo sapiens
aaaaagaaatgccacagtgcttcagggaaccaggctgtgttcacacctgggttttcacaggacagagatttttagctttaaggctttggagatttggagaaaggagatttcagaaatcattagccatgttcctgccagcctcagcaggccagctaagaacagtgtgttccttaagggcaggaacaaattccttccacatgttttggtgtttttgtttcttcttaacgtgctatcagtgatgccatgggccaattaactttgggacttaaaatgtgacgatatctcatttattctacaccgttgctaaataagatgatcatgggataaaattttccaggtaactggactgtcatcctttgagaactgtattttaaaaatggaaatgtatctggactccattcagtgaataaaaacaataaagactgtt

SEQ ID NO: 27606 - DNA, 400 bp, Homo sapiens
cggagatgcagaattgtagatacccttcagtgtggttcaggacagtgtgttcagcgtttggccgccgttcagtaaattctgcatgaagcagtttgagctcgtggttttggatttacttttcaggagtatgttttccagtggaataaggcttactactgaatgggagctttctttgcctctctgagtgtagacaggagtgtttattttcattgtcttcccattttgttagattgtggacaagggaaaagttaaagcatattttggttaagtatttttaatagtctgggattctatccacctcctccataagggtttttactttagagaattataaagtaattttctaaagggagctgcttctcttggtgtttgaatcaaaagccaagaatcgacttgaaaa

SEQ ID NO: 27607 - DNA, 5458 bp, Homo sapiens
cggctcggccgcggggcgcgcaggcggctgctgggcggcctcggtgcgcgcctcccgccttcccagagacgtggcgcgaggcccgggccctgagcacctatcgcggggatccccggcgccaggagggggtgcagccggtgggcagcgccgcgcagggaggggccgcagcatcctcgccccccagcgcgcccgggcccgagaggaggaggccggggctctccgggcctcccgccgcttagcctgatgctggaaggacgaaggtgagtgaagatggcagagaggacgtgaccagcactcacccttgtccacctgcccagtggcaccgccatgcagaagcccagcggcctgaagccccccggccgtggggggaagcactccagccccatgggccggacatctactgggtcagcttcatcctcggcggcggtggccgctagctccaaggaaggctccccactgcacaaacagtcatctggaccctcctcctccccggccgcagctgctgcccccgagaagccgggccccaaggcggcggaagtgggggatgacttcctgggggactttgtggtgggcgagcgggtgtgggtgaacggcgtgaagccaggcgtggtgcagtatctgggagagacgcagttcgcaccgggccagtgggctggcgtggtgctggacgacccggtgggcaagaatgatggcgcggtgggcggcgtgcgctacttcgagtgcccggccctccagggtatcttcacgcggccctccaagctgacccggcagcccacggccgagggctcggggagtgatgcccactccgtggagtcgctgactgcccagaacctgtcattgcattcgggcacggccacgcccccgctgaccagccgcgtcatccccctgcgggagagcgtcctcaacagctccgtgaagaccggcaacgagtcgggatccaacctctcagacagcggctctgtgaagcggggcgaaaaggacctgcgcctgggggaccgcgtgctggttggcgggacgaagactggcgtggtgcggtacgtgggggagacagactttgccaagggcgagtggtgtggcgtggagctggacgagccccttgggaagaatgatggggcggtggcgggcaccaggtacttccagtgcccacccaagtttggtctcttcgcgcccatccacaaagtgatccgtatcggcttcccatctaccagcccagccaaggccaagaagaccaagcgtatggccatgggtgtgtcagcactgacccacagtcccagcagttcctccatcagctccgtcagctctgtggcctcctccgtggggggtcggcccagccgcagtggcctgctcacggagacctcttcacgctacgcccgcaagatctcgggcaccacggccttgcaggaggcactgaaggagaagcagcagcacattgagcagctgctggctgaacgagacctggaacgggctgaggtggccaaggccacaagccacatctgcgaggtggagaaggagattgccctgctcaaggcacagcatgagcagtatgttgcagaagccgaggagaagctgcagcgagcccggctgctcgtggagagcgtgcggaaagagaaggtggacctgtccaaccagctggaggaggagaggaggaaggtggaggatctgcagttccgcgtggaggaggagtccatcaccaagggagacctggagctgaccacagtggccgagaagtcgcgcgtgctgcagctggaggaggagctcaccctgcgccgaggtgaaatcgaggagctccagcagtgcctgttgcactcgggtcccccacctccggaccacccagacgccgccgagatcctgcggctacgggagcggctgctctcggccagcaaggaacaccagagggagagtggggtgctgcgggataaatacgagaaggccctgaaggcctaccaggcggaggtggacaagctccgcgcggccaacgagaagtacgcacaggaggtggcgggcctgaaggacaaggttcagcaggccaccagcgagaacatggggctaatggacaactggaaatccaagctggactcgctggcctcggaccaccagaagtccctggaggacctcaaagccaccctgaactcgggcccaggcgcccagcagaaggagatcggcgagctgaaggcagtgatggagggcatcaagatggagcaccagctggagctgggtaacttgcaggccaagcatgacctggagaccgccatgcacgtgaaggagaaggaggccctgcgagagaagctgcaggaggcccaggaggagctggctgggctgcagcggcactggcgggcccagctggaggtgcaagccagccagcaccggctggagctgcaggaggcccaggaccagcgccgggatgccgagctgcgtgtgcacgagctggaaaaactggacgtggagtaccggggccaggcgcaggctatcgagttcctcaaggagcagatctcgctggccgagaagaagatgttggactacgagcggctgcagcgggcagaagcccagggcaaacaggaggtcgagagtttgcgggagaagctcctggtggctgagaacagactccaggcggtcgaggccctgtgctcctcccagcacacccacatgattgagtcgaatgacatttcagaggagacgatcaggacgaaggaaactgtggagggcctgcaggacaagctgaacaagagggacaaagaggtgacagccttgacctcccagaccgagatgctcagggcccaagtaagtgcgctggagagcaagtgtaagtcaggcgagaagaaggtggacgccctcctgaaggagaagcggcgcctggaggcagagctggagaccgtgtcccggaagacccatgacgcctcgggccagctagtcctcatcagccaggagctgctgcggaaggagcggagcctgaacgaactgcgggtgttgctgctggaggccaatcgtcactccccagggccggagagggacctgagccgtgaggtacacaaggctgagtggcggatcaaggagcagaaactcaaggatgacatccggggcctgcgtgaaaagctgaccgggctggacaaagagaaatccctgtcggatcagaggcgctactccctcatcgacccgtcctcggcgcccgagcttctgcggctgcagcaccagctgatgagcacggaggacgccctgcgggatgcgctggaccaggctcagcaggtggagaagctgatggaggccatgaggagctgccctgacaaggcccagaccatcggcaattccggttctgcaaacggcatccaccagcaggacaaagctcagaaacaagaggacaagcactgatcctgaggggatactgtggagcagcccagtccacaccagagccccacgcggctgcccggcagtacctcctccaggcaggagccgggactgtcactttggagacaaaacagtgtttgtaacaataacgtactcaccgccgcggacaatcccccaccccgatccctcgccagaccaggacgcttcctcaagcccagccttctacagagagtgtgaacggtacagccctggcctgacccggggaccttcagcctggacacccggcagcttctggagtttgtcagtggaggcagaggggatccggccaggcccctctgtccagaaggagctgccctgaggaccatcttagcggccctgtcctctttttccgcccattctccctcgggtctccccagaggggccggcgggggctggggagggggtaagtttatccatgcagacaccaagggggagcatccagtctttaagagccaagtgggggccccttttccgaagccacttccaggccaaggcagtcgccagggcttcttgtccccaccttctgaaccttcttcaaacagtagtacaagctcccctcagccagcctgcctgcccagcgaggcccccaggttcaaggtgttggcgggggcggagggcaggggaacgggatccttctcccgctgcccaccaacaccaacacacacacacctctaagctgctggccgaagatgtcaccaaggccaaagacacagtattatgaaggtttggaaacccctctcctcacctcccaccgtgaccttgggcaaaccctggctcggagcccagggcagaggcagctcagagtggaggctctaggcaggtttgacaaaggtcagtaatacggtttcccctggggttgaccagatgttccaaaatatctgcatccacctggagatgcagctaagtgggtccttatgtacacaccacgttcacacacacacagagggaccacgtgtgcacgcatgaccgtgtgggtggcggcgtttgctgtgaaccatgctcaggccacacagagacacatacttggtttctgggactgagacccaggcctggcaggaccgtgcctacagatactgcaaacgttcctacagcctagaggtgcgtatacacacccaagtacacgcagccaggcattcaggggtgtgtttgccacatggagcatcccttcctggtcttgccaggcacctgcacagagcgtctccagccccatctcctaacgggggctgggggtaagagaaatctaactgcgctcccccaacccctcgccctgccatcttcccctcaagcctgctaagttatcccaggcctgtgcgtggtggaaaaagccagccttggccctgcagcctccacctcgccgctgggggaccaacaggttgcttacagctttgcaccccggcatcagcacaggggtccctgccccaccctccggcagctcagggagtgttttcctgtgaggcctcccccatcagtggaccagagggagaagcccgatgccccatcccggctttcccgtaacgcacaggacacgtgtgcaattcataggaacggcccagatcgccctcatgagtgccacctggtacaggtaggtggcgctcacgttcctgcccaaatgcagcccatcggggagtcacagtcagtccccccggcccccctcccagtccctgttggctttcggtagctctcgcatgcagttctattaacagccgtctagaagcgatgctttagtggcctaacccagggtcaaatacagctctttctagcaaaatcaggcagctctgccccatcggtaggggcaccgattagtctactaacagccagaggtccatctaggagggtgccgggaggagctgagcccccggaggtgggctcctggtgacgggtgtccaagaagcggtttccttgggagcttctgcctccgtgggcctctcagcccgccccgtgtggccgcccgggtgtggctcagccatgtcccctccccaggtccttcattcacccctcccctccccacagtggaattgttgaagtgtggcgagtctgtgctcgggacaataaagcttgtgacaggtccaggaaaaaaaaa

SEQ ID NO: 27608 - DNA, 362 bp, Homo sapiens
gggggaaaaaaaaaaagaatatatttttgtactggggtgtggtaaaagtatacagttcattttagtatttaatttattgaaaacatgagtcatcatacaaagcctagcataaaattatcatttgaaacatgtagaacccagaatttgctaatttttatgaatatgcattcacaaatagaacttaacataatctgttaagacattcactattattttgattttctgaaatattgacttaaaatgtaagagaatgcattttgcttaaaagtggctgctgtatttcagatgctggattatgaatgaattactgtgttgttagttcaaaatctcaaagcaaatgtaataaatttgtgtttaaaagt

SEQ ID NO: 27609 - DNA, 394 bp, Homo sapiens
tacttttcaaatcatatccatcaatttgcaaactctgtgaactccaacattactggcacaccaaaacccactttatcttaatacttaaaaattccagttcatgttgcttggataactttgaatgaaagacgttgtcttgtttcatgttacagtgaaagagcttatctcatattatagtgaaataatactgacaatgaatgaagattaagctgattccacacattacagaaaatacacaaaactgcacaaaaatttttctcaaatggttttgcaaggagagaggataaaataagtgccagaaagcagtttgccaatatcatttgtcattctgtgttcttgtgatattcatatgtaaaatacatgcagtttgtaaggaaataatgggttatattcc

SEQ ID NO: 27610 - DNA, 253 bp, Homo sapiens
aaatcagtgaaagtcctcagggcgaagtcaggtatctgagtagctcccttgagtacctcactagattttggcctagcacttcctcataatttgttctcttttttttctgaaatgttttgcttattttatttaacatttttagttttagttttcttctctaagtgggttcaattgaggccgggtgcagtggttcctgcctgtaatcccagcactttgatatgctgaagtggaaggattgcttgcggccaggagc

SEQ ID NO: 27611 - DNA, 2260 bp, Homo sapiens
attgattggagagatgcctcaagaagatctgcacgcggtggtgaagaattgcttcgcggtggtgaatagctctgtctctgaaggcatgtcagctgcaattttggaggcaatggatttagaagtaccggtattggccaggaacatccccgggaatgctgccgtggtgaagcatgaagtcacagggctactgttttccaatcctcaggagtttgttcatctggcaaagagactggttagtgatcctgcattagaaaaggaaatcgtagtgaacggaagggaatacgtgagaatgtatcattcatggcaggtggaaagagacacctaccaacagctcatcaggaagctggaaggaagcactgaagattgagggccccgcctcatcagacacctgctctctgacacacagctctgggtgcacactcagagacagagttctggatcacgtgggcccagtgcagttcaaataaaaccagcctcagcggaatcctagaaaatgttagtcgtgagtccccagagccactgcattcatcccatatccttctgtgcgttcagatgctgtcccaggcgtgttcaccagccagtcctgatggaggtgcatgagtgactgggttgactgggacagggaaaggggaactggttttcagggaatttgggagagaatttgattacctgccttagggctttggtgtggacaatagaggcttattttcaagcagtcatggttcagactcctcccgcctgccttctgaccaacctctccccatcgttgccagtttgaaaggcaaaagcaaaacagacgtgtcagctgagccgagtcctcgcaggatttttgttgtgatctcaggactctgacaggcacgtgggtgacccgaggcttctctgaacactagaaagcgctgtgagtgagctcacgcccggcacagctcacttttcaatggtggaattgaaagttgtgctttttagaaaagtggccaggctgcccgcaggccccgcccacctcttggctgaatttgagtggaaaaccaggaaggaacaagcgccacgtcacgcatagcctgcaaatcgcccgcgtgaccctgagatggaggcctgaggctttgggtccagggtgggctcttccccttcccacatcagggacccggggatggatgtcggaagggtcaccagcctccagcctttggcaggatggagcttgggtctgcagggctttgcagccacacagcgaggtcagtccggggccagccgcgccatcatggtaatggtggcctcgccccatccatgtcatccatgtcacatgaggacgtgcagtcttccttgtcctctcctagtggaatttgcctgggagaacctccactgaatactgaaattgttgcatgcctgtggattccttacgacaatggggaacgcggtgtttcccacctcttgtgggtagaaagcagtctgctttgaggaggcgagaaggcaaagccagggcagggcgttgctgtgggaagcgttcggtgaaagcgggtttcgacgcttaggagggccgagggagaagattccaccagcattgtccttgcttcaagttttaggatgtctgaactttcagctttcatgttttcaaccatcatttttttaatggcacaacctacatcttgtttttaaaagaagtagcctcaaattaaactccttaaactctgatgccctggggatgagaacaactagcttggatctcgtgccgtgtaattcaatgtttcattccgctgcctccatcatgtaatagaatcgctttccagaaaggcagttaactggaagcagcagaggctcccagccgtgagaggactgctcaacaatgccccccatcgccgcccccccacccctcgcaccccttgtgttttccctctgaggggcccaagggttatggctttcatgtctaggtgtggggacagaggagggagaggcagatcctgggccgggagaggatggcctggtctgaatctggagtaattaatgccacccaaagaaaaggccctgccaggtccaatgttgtcttagatctgatgatgctgctatttacaaaacactgatcgtccgaaagcttgaatctgttcctcctcgaatgaccctgtagatgcctgacctccaccgtacctccacatcactattcatgtccttctaggaaaatgtgcacatgcctcacgcactatgtgggaagggcgtgtttttaaattaataaagtgtgtcaccattaacaaaaaaaaatagcctctctttcttc

SEQ ID NO: 27612 - DNA, 521 bp, Homo sapiens
ggacatgcccatgacgaggctgttgatggccacatgtatagcacatacccacagtgaggacaacggtcacacgtaatgggacagtcccatgaagaggctactgactgtcacgtcaggacatgatcaagtatatctggacgtgcacatgacaaggttgttaatggacacatatataagacctgcccatgaagaggctgttgatggtcaaccagggcttgtgcccagaacatgccccatcaaaccccaacacactcctgctcccctcctgccgcgctcgaggccctgccccatcatcccaccgacagtactcctgtggcctgtggggtcagcagggccacctgtcaatgagtgcacagtcaccaagagggtaaaataaacacagagctgacacagccagtgcctggcagagccagcagcagaccctggtcacctcactaccgctctctcctcacttggatgaaatgcaggagtaaagtcaaagtggagacgtggaaaaccagaggcagcacacgcacacacat

SEQ ID NO: 27613 - DNA, 235 bp, Homo sapiens
cttggctgggattccctgggggcagagaggtgagatgtgttcacagccaggaggtcacagccctcctgactcaggtagggtggaacagactgggtaggtggcatcttggattctgactttgctctcttaatctatggtcttatttacggctggcttcatggacattcacctgtacaatcacacagaagtgccatcttaaaattccttgtaatattgaacaaggaactctgtgttt

SEQ ID NO: 27614 - DNA, 567 bp, Homo sapiens
ctctgtgttccgcccacccagatcctggtccacatcggcttcctgacggaggagtccggggacgtgttcagccctcgggtcctgaagggcgggcccctaggggagatggtgcagtgggcggacattctgactgcactctatgtcctgggccatggcctgcgggtcacagtctccctgaaggagctgcagagtaacttaggggtaccgccaggccggggaagctgcccgctcaccatgcccctgcccttcgacctcatctacaccgactaccacggcctgcagcagatgaagcggcacatgggactctccttcaagaagtaccggtgccgaatcagggtcatcgacacctttgggacggaacctgcgtacaaccacgaggagtacgccacgctgcacggctaccggaccaactggggctactggaacctcaaccccaagcagttcatgaccatgtttcctcatacccccgacaactccttcatgggcttcgtgtccgaggagctcaacgagacggagaagcggctcatcaaaggcggcaaggccagcaacatggccgtggtgtacggc

SEQ ID NO: 27615 - DNA, 2797 bp, Homo sapiens
  misc_feature (2756)..(2756): n is a, c, g, or t
tccctgaaggagctgcagagtaacttaggggtaccgccaggccggggaagctgcccgctcaccatgcccctgcccttcgacctcatctacaccgactaccacggcctgcagcagatgaagcggcacatgggactctccttcaagaagtaccggtgccgaatcagggtcatcgacacctttgggacggaacctgcgtacaaccacgaggagtacgccacgctgcacggctaccggaccaactggggctactggaacctcaaccccaagcagttcatgaccatgtttcgggaaggagaagttcctgggcatcctgaacaaatacatggagatccatggcaccgtgtactacgagagccagcggccccccgaggtgccagcctttgtgaagaaccacggcctcttaccgcagcctgagtttcagcagctgctgcgcaaggccaaactcttcatcgggtttggcttcccctacgagggccccgcccccctggaggccatcgccaatggttgcatcttcctgcagtcccgcttcagcccgccccacagctccctcaaccacgagttcttccgaggcaagcccacctccagagaggtgttctcccagcatccctacgcggagaacttcatcggcaagccccacgtgtggacagtcgactacaacaactcagaggagtttgaagcagccatcaaggccattatgagaactcaggtagacccctacctaccctacgagtacacctgcgaggggatgctggagcggatccacgcctacatccagcaccaggacttctgcagagctccagaccctgccctaccagaggcccacgccccgcagagcccctttgtcctggcccccaatgccacccacctcgagtgggctcggaacaccagcttggctcctggggcctggccccccgcgcacgccctgcgggcctggctggccgtgcctgggagggcctgcaccgacacctgcctggaccacgggctaatctgtgagccctccttcttccccttcctgaacagccaggacgccttcctcaagctgcaggtgccctgtgacagcaccgagtcggagatgaaccacctgtacccggcgttcgcccagcctggccaggagtgctacctgcagaaggagcctctgctcttcagctgcgccggctccaacaccaagtaccgccggctctgcccctgccgcgacttccgcaagggccaggtggccttgtgccagggctgtctgtgaatccgcctctgccgccctgcctggcacccacgctggctctctcctgccgcgggagaaagcaccagcaggttctgagccctggctgcttgtcctcctcgcaacccccccaggccggagcttccttccttagccgggaagctggcagaggagagccgtgcccgggaataggaggaggcagcatgccgagcccctgggacctcccaggcaggctccggttctctcctggggactcacagcagcatcgtggccaagcaggtgtcggactgctcagagtccgcatggcccaggagcaggtggtcggaggcccctggctttgtgcaaggccggatctgggccaggtggcgaaaggggcccagtcgttcttgggcccaggatggggcctctagacttgcaagggagaggaacagggaccaggctgccccacggtccctgaagggtccaaggaggggccctccccatggccctggagagtgggcctgggtggtacctgctccaggcagggaaactgggggctcgcccttctcctgtgaggggagccaggcacacagggcccattggtgtttgggatgtggacagaggggcagggggctgggagaaggctaagccgaggggtcctgtttgtgcctccccttagtcccttccctcccgatttcccgattcccccaccctccctctacacttgaggaccacagttgggggtgtagggaccacccagaccctggttgaattgtttctctctcctgcttgttccaacccttttcactctgggcttctcccaaaacccatcctggcatgacctgcaactccaggtggtggatttgttccaaagcctcaatccctaccccctccaaggggcaggtttccagtccagcctcagagatcaggctctgggacccctgcctggggggtggccttcatgcaccagccacttccgcaggtgctgactcccgcactccctggcattttttgcagacaagggcttgggatggaccctcagccccatggtacgccctgcccagtttccagatgccctgtccacttaccctaggtagccccccaccccatcagtgccgagtccttgtccctacctccagcttcctccagcctcaaaccgcctctggatctagctgtccttctccgagtggcacgcctgccccaggatgccccctttccctcccccccatgcccagagccccgcctgcctcagcgggtcaggccttcagaacactgccacccacccagttttataatcccgctccctctccaggcaaccccacccaccagcctaggcctgctcctccacccttcccgggaggcagccccgggatgctgagagttggtggaggggccaggctggacgcttcctgtgggagtcccctccagacctggctggcccctgcagccacagaaaccacgatggcaaaaaatctcattggttctcaaggactaacctgtgggggaaagcaatagagacactctttttctctctttttttaaagatttatttcatcacctgagnatatttactggatgtggtcagttttctgcccgcgtcttggt

SEQ ID NO: 27616 - DNA, 2214 bp, Homo sapiens
cggctccctgggcatggcacaggatgtgagagcccaccagacctccacccccaatgccgagcatggcagggcccccgacggctgggccttctcccgccccatgtgtctgcccatccctcccacaggtagacccctacctaccctacgagtacacctgcgaggggatgctggagcggatccacgcctacatccagcaccaggacttctgcagagctccagaccctgccctaccagaggcccacgccccgcagagcccctttgtcctggcccccaatgccacccacctcgagtgggctcggaacaccagcttggctcctggggcctggccccccgcgcacgccctgcgggcctggctggccgtgcctgggagggcctgcaccgacacctgcctggaccacgggctaatctgtgagccctccttcttccccttcctgaacagccaggacgccttcctcaagctgcaggtgccctgtgacagcaccgagtcggagatgaaccacctgtacccggcgttcgcccagcctggccaggagtgctacctgcagaaggagcctctgctcttcagctgcgccggctccaacaccaagtaccgccggctctgcccctgccgcgacttccgcaagggccaggtggccttgtgccagggctgtctgtgaatccgcctctgccgccctgcctggcacccacgctggctctctcctgccgcgggagaaagcaccagcaggttctgagccctggctgcttgtcctcctcgcaacccccccaggccggagcttccttccttagccgggaagctggcagaggagagccgtgcccgggaataggaggaggcagcatgccgagcccctgggacctcccaggcaggctccggttctctcctggggactcacagcagcatcgtggccaagcaggtgtcggactgctcagagtccgcatggcccaggagcaggtggtcggaggcccctggctttgtgcaaggccggatctgggccaggtggcgaaaggggcccagtcgttcttgggcccaggatggggcctctagacttgcaagggagaggaacagggaccaggctgccccacggtccctgaagggtccaaggaggggccctccccatggccctggagagtgggcctgggtggtacctgctccaggcagggaaactgggggctcgcccttctcctgtgaggggagccaggcacacagggcccattggtgtttgggatgtggacagaggggcagggggctgggagaaggctaagccgaggggtcctgtttgtgcctccccttagtcccttccctcccgatttcccgattcccccaccctccctctacacttgaggaccacagttgggggtgtagggaccacccagaccctggttgaattgtttctctctcctgcttgttccaacccttttcactctgggcttctcccaaaacccatcctggcatgacctgcaactccaggtggtggatttgttccaaagcctcaatccctaccccctccaaggggcaggtttccagtccagcctcagagatcaggctctgggacccctgcctggggggtggccttcatgcaccagccacttccgcaggtgctgactcccgcactccctggcattttttgcagacaagggcttgggatggaccctcagccccatggtacgccctgcccagtttccagatgccctgtccacttaccctaggtagccccccaccccatcagtgccgagtccttgtccctacctccagcttcctccagcctcaaaccgcctctggatctagctgtccttctccgagtggcacgcctgccccaggatgccccctttccctcccccccatgcccagagccccgcctgcctcagcgggtcaggccttcagaacactgccacccacccagttttataatcccgctccctctccaggcaaccccacccaccagcctaggcctgctcctccacccttcccgggaggcagccccgggatgctgagagttggtggaggggccaggctggacgcttcctgtgggagtcccctccagacctggctggcccctgcagccacagaaaccacgatggcaaaaaatctcattggttctcaaggactaacctgtgggggaaagcaatagagacactctttttctctctttttttaaagatttatttcttgaaataataaatattttattgggatgtgaggtgcagaagaggaactgt

SEQ ID NO: 27617 - DNA, 2795 bp, Homo sapiens
tccctgaaggagctgcagagtaacttaggggtaccgccaggccggggaagctgcccgctcaccatgcccctgcccttcgacctcatctacaccgactaccacggcctgcagcagatgaagcggcacatgggactctccttcaagaagtaccggtgccgaatcagggtcatcgacacctttgggacggaacctgcgtacaaccacgaggagtacgccacgctgcacggctaccggaccaactggggctactggaacctcaaccccaagcagttcatgaccatgtttcgggaaggagaagttcctgggcatcctgaacaaatacatggagatccatggcaccgtgtactacgagagccagcggccccccgaggtgccagcctttgtgaagaaccacggcctcttaccgcagcctgagtttcagcagctgctgcgcaaggccaaactcttcatcgggtttggcttcccctacgagggccccgcccccctggaggccatcgccaatggttgcatcttcctgcagtcccgcttcagcccgccccacagctccctcaaccacgagttcttccgaggcaagcccacctccagagaggtgttctcccagcatccctacgcggagaacttcatcggcaagccccacgtgtggacagtcgactacaacaactcagaggagtttgaagcagccatcaaggccattatgagaactcaggtagacccctacctaccctacgagtacacctgcgaggggatgctggagcggatccacgcctacatccagcaccaggacttctgcagagctccagaccctgccctaccagaggcccacgccccgcagagcccctttgtcctggcccccaatgccacccacctcgagtgggctcggaacaccagcttggctcctggggcctggccccccgcgcacgccctgcgggcctggctggccgtgcctgggagggcctgcaccgacacctgcctggaccacgggctaatctgtgagccctccttcttccccttcctgaacagccaggacgccttcctcaagctgcaggtgccctgtgacagcaccgagtcggagatgaaccacctgtacccggcgttcgcccagcctggccaggagtgctacctgcagaaggagcctctgctcttcagctgcgccggctccaacaccaagtaccgccggctctgcccctgccgcgacttccgcaagggccaggtggccttgtgccagggctgtctgtgaatccgcctctgccgccctgcctggcacccacgctggctctctcctgccgcgggagaaagcaccagcaggttctgagccctggctgcttgtcctcctcgcaacccccccaggccggagcttccttccttagccgggaagctggcagaggagagccgtgcccgggaataggaggaggcagcatgccgagcccctgggacctcccaggcaggctccggttctctcctggggactcacagcagcatcgtggccaagcaggtgtcggactgctcagagtccgcatggcccaggagcaggtggtcggaggcccctggctttgtgcaaggccggatctgggccaggtggcgaaaggggcccagtcgttcttgggcccaggatggggcctctagacttgcaagggagaggaacagggaccaggctgccccacggtccctgaagggtccaaggaggggccctccccatggccctggagagtgggcctgggtggtacctgctccaggcagggaaactgggggctcgcccttctcctgtgaggggagccaggcacacagggcccattggtgtttgggatgtggacagaggggcagggggctgggagaaggctaagccgaggggtcctgtttgtgcctccccttagtcccttccctcccgatttcccgattcccccaccctccctctacacttgaggaccacagttgggggtgtagggaccacccagaccctggttgaattgtttctctctcctgcttgttccaacccttttcactctgggcttctcccaaaacccatcctggcatgacctgcaactccaggtggtggatttgttccaaagcctcaatccctaccccctccaaggggcaggtttccagtccagcctcagagatcaggctctgggacccctgcctggggggtggccttcatgcaccagccacttccgcaggtgctgactcccgcactccctggcattttttgcagacaagggcttgggatggaccctcagccccatggtacgccctgcccagtttccagatgccctgtccacttaccctaggtagccccccaccccatcagtgccgagtccttgtccctacctccagcttcctccagcctcaaaccgcctctggatctagctgtccttctccgagtggcacgcctgccccaggatgccccctttccctcccccccatgcccagagccccgcctgcctcagcgggtcaggccttcagaacactgccacccacccagttttataatcccgctccctctccaggcaaccccacccaccagcctaggcctgctcctccacccttcccgggaggcagccccgggatgctgagagttggtggaggggccaggctggacgcttcctgtgggagtcccctccagacctggctggcccctgcagccacagaaaccacgatggcaaaaaatctcattggttctcaaggactaacctgtgggggaaagcaatagagacactctttttctctctttttttaaagatttatttcttgaaataataaatattttattgggatgtgaggtgcagaagaggaactgt

SEQ ID NO: 27618 - DNA, 359 bp, Homo sapiens
ctcccaagtagttgggattacaggcccgcatcaccatgcccagctaatttttgtatttttagtagaggcggggtttcaccgtgttagccaggatggtcttgatctcctgaccttgtgatctgcccgcctcagcctcccaaagtgctaggattacaggcttgagccaccgcacccagccaacagtcactcttaatacctcagcccagaagtgacactgattgattcttctcacaggccgttggccaaaactagtcacatgacctatctcaccatcaggggcgggaaagaattcactgagttcacgttcttgcagcacaagccctgacctgccgctggcagtgctggggagccaggggtcc

SEQ ID NO: 27619 - DNA, 398 bp, Homo sapiens
actccatctcagaaaaaaaaaaaagcccggcacagtggctcacgcctgtaatcccaacactttaggaggccgagacaggcagatcacaaggtcaggagattgagaccatcctggctaacatgatgaaaccccatctctagtaaaaatacaaagaattagctgggcgtggtggcaggcgcctgtagtcccagctactcgggaggctgaggcaggagaatggcatgagctggaaggcggagcttgcagtgagccaagattgcaccactgcactccagcctgggggacaaagcgagactccgtctcaaaataaaaaaaaattgtatcgccaccaaatgctgaggagatcactcatacacgtgaaatgttcctgcttagaaaaacagtttggcagattaaaa

SEQ ID NO: 27620 - DNA, 279 bp, Homo sapiens
actgttaacttcccagttgtggacatagacgagagctagaaaatgaaaattaagtcaattaaaacattccctctggatatcacagacaagcttctttctcaaaagattttctgttcacactttgttgacttgcaaggtttggatgggtaacacccagcatgacagatgataaaaaaacgacagttttcttcacttgttcacaaagtttgcactgtgattttgcatcagactcccatttgggaaaactttgatgttgctttatacctcccccttaacaca

SEQ ID NO: 27621 - DNA, 751 bp, Homo sapiens
tgttcttaagagacccaacattttccttttttttctctggaatcaaatggagtcaccttagatgaccatttaccctctagcagtggtaaacctagtcttttggatacttgaaagaatacccctttatgctggctggagggaggatgaaatttggaaaagactaaattagattcaaacttgttagggtatttagttactaggagcaccagaaaggcttatttataaatcgccataccgtacctaagccgccagggagtgggtcaggctgatgctgctgcacgttttactgccccaggctggggcgtcccatggtgcggccgtcggtaacccacaacagggcttgacagtgctgtctcaggaaatgcttccatctgaccagacatctttcgttgaggggcaaaaattagatatgactactgttctctctgatgtggatatggagaatgattgatcatactttacatgatacatagctgtatattaacagttcatcagtaggttgcttctgagccttctcgtttatacactattcgatctgtattgtgatttattatttgtttcattattattgttattaatttattattgaagtttattttaattataatattgtgtaagtctatgttatagtagcatggcatggtggcaccctcctgtatttccagctattcgggaggctgaagtgggaggatcgcttgagcccaggagtttgagtccagcctaggcaatgtatcgagaccctaaaaaaaaa

SEQ ID NO: 27622 - DNA, 614 bp, Homo sapiens
  misc_feature (76)..(76): n is a, c, g, or t
cagtactatgttttgctcatcatcactgatgggggtcatttctgacatgacgcagaccaaggaggccatcgtcagngcctcctcattgcccatgtctatcattatcgtcggtgtaggaccagccatgtttgaggcaatggaagagttggacggtgatgatgtgcgcgtgtcctctaggggacgctacgcagagcgggacatcgttcagttcgtcccattccgagactatgttgaccggtcggggaaccaggtgttgagcatggcccgactggccaaggatgtgctggccgagatcccggagcagctgctgtcctatatgcgcaccagagacatccagcctcggcccccaccccctgccaaccccagcccgatcccagctccagagcagccctgaggattccacatatccaatgcctcacagtctgcaagcctgctcacccactgcttctgctttaagccagaggcacctggaaccctggacttcactgggagggccaacttggaggatcagtgctggctgacaagccctccgcctccttgcctgcagagggcctggcactatcaccacctctctgccttcatgccaataataaagctgatctttattccaaaaa

SEQ ID NO: 27623 - DNA, 356 bp, Homo sapiens
gagcactgcggtaccgtggaaggggtttcggcgttttttttttgaaaattttttttaaatgttttttttttaagacagggtcgtactttcacccaggccggagtgcagtggcgtgatctcagctcactgcaacctccacctcctgtgctcaaggaatcctccaacctcagcctgctgagtaactgggactacaggcacatatcaccacaacagctaatttttgtattttttgtagagatgtggttttgtcatgttgcccaggctgcagtatttttttttttttaatttttaaatgttacatatttaggctaggattggtggctgaaggccataatcccagctctctgggaggccaa

SEQ ID NO: 27624 - DNA, 271 bp, Homo sapiens
gaaagcaaagttctttttcaactggacacccaaggtaggggagaacatcctccttacctacaaaggaattcttaacaacttgaggtccaggcccacgtcaggtatttagcaatggttttagacttacagtatgccaatttgcaaaatggagaaggttaactttttgcataagaggttttcttttctgctttgtcaacttttctctacctgaagaatggtatcttacagacagccttgttcctataaccaaacactctcatatgaactaatt

SEQ ID NO: 27625 - DNA, 442 bp, Homo sapiens
ccctgaatttagactttgctctgtgttctcccggtaactgtcagacaaaaagtttattggctctgaggaactgagaaatgttgggaacctggtttctgctgtacacaggaaagatttgtaagtgagctctctctttgaaaacaggacccaggctgggcacagcagctcatgcctgtaatcctagtattataggaggcagaggctcgggaggattgcttgagcccaggagttcaagatcagcctaggcaacatagggagaccctatccctacaaaaaatttctgaaaaattacctgggcattgtggggcacacctgttgtcccagctactctggaggctgagtccggaggaacgtttgagcctgggagtttgagtttgcagcttgcagtgagctgtgattgcaccactgtactccagattaataaagatgtttgcaaaaaaaa

SEQ ID NO: 27626 - DNA, 4081 bp, Homo sapiens
ccctgaatttagactttgctctgtgttctcccggtaactgtcagacaaaaagtttattggctctgaggaactgagaaatgttgggaacctggtttctgctgtacacaggaaagatttgtaagtgagctctctctttgaaaacaggacccaggctgggcacagcagctcatgcctgtaatcctagtattataggaggcagaggctcgggaggattgcttgagcccaggagttcaagatcagcctaggcaacatagggagaccctatccctacaaaaaatttctgaaaaattacctgggcattgtggggcacacctgttgtcccagctactctggaggctgagtccggaggaacgtttgagcctgggagtttgagtttgcagcttgcagtgagctgtgattgcaccactgtactccagcttgggcaacagagcaagatcctgtctcaaaaggaaaaagaaaacaggacctaggtgtttggggtacactgccacccagggagtggatcaaaaatatacatagaaagagaatgagcatgtctctataattgtcttctaggaccatattgctgttagaagtcctaaaagaggatgggttgtaatttagcataatattctgaattcattccaagtttaaaatcctgtcattctctggctcttcttttttcacatcaaaatgatgctgttggacttagaggcttccgaactgttttattgagggctactatctgcctccacaattttattaaaaccactccacctttagacaaaggtgacttttgtctgattttacaaatcagattttattcaagctttctaaatatctgtgaagtagaccctagaaaattgtctcgtttattttaaatagaatctatgcttccaccaataaaccatcgggagctaagaaacaacataatgttgacaaatcaggaacctaacagattattttgtctctcattattaatttgaaagagcctctaaacttttgagaaatcaatgtgtcttcttaagaaagttaagcaccctctcttaactttcccctctatttgctctcctttttctttcttcttaagagtatttatattattttgttaagcaaaaatggctaagattgctctaaaatttgcaaaatgaggagtggattgcaaataattgagggatttatttctttaactttataagactttaaaaaaaaaacccaaattctaagcactgacatgaaagttgcctttgagaagcttgttattcattatacaaaaagtatttgcccattcctattctaagatttgcagaatatgtcaccctatctagcttttgagtttgctatctggtttaatgttgtatttataatttaaagtggaaatcagaaactgtttcaagaacctgtattctattccttactgagtgtcccttctttaaatagtgtttgctgaattaagccgatgggggcagtggcgttaagtggtggaaaaaggaaagtatatatgttagagttttgaatgagggataaatagaaagcagaatgaattaatggaaaagaactcggctgttaggccattctctaaattctagtttagccaaaagtttatgtgtggtttggggcttcatttatttatctcatgagtaaaatggaataatacctaacaggcaggctctggaagttggaaatcacatacacacacacacacacagacacacacacacacgatcaatcatgtagctcatattagatgttcaataaataacagctactacagatgcctatcagttgagtaagtagttcattaaattgagctcccaaaggtctcttctcttcacatccatatccgtttctgcagcaatcaaatagatacatgattgtttttctgtaagaaattactgcaaagagaatctttttctcctactaactgttccttctacctggtataggagataaatgtacgtttcttaattagctgactttttagtgtgtcatttctgaaggaaaaataaattaaccttaaagtggcatgtaggtccaattcagttttcctacatgttccaaaattttatttaaattactgtgtccaaaattatgaggacagtgtcattcattcaccatagtttatatttttagttatatatcaaacttccttggcacctaggataagaacatttcttttgaagttatccaatttttttttatttttacttgacttgaaggaaagttggaaaatatggtggaaaaaatcttccgcattaaaagggggaaaaaacacaaccatttacgatctcagtcagcagatttactctactcaaggaaaaaaagaaacaatcttattggaagcagatgttgacactgtgtcagttattgaagacggaaggagttcacttgagccattgcagttacaaaggggtattgatggcagtttggattcctgattgatcacctttgcagccaagggaaagacagcagaaactgtatgggatcagaaatgaaatcagcctgccagtttaatggagaggctcctagaaactcattttttttctttcctgtaagataaaagacatctttcagaataagaaaggcttgtttgagagagaaattacagtttattctctgaaaatatttaaaggccaaagtgccctttaaatctattattaaagcattgaaactgttattaaaatcattatagaaaaattaggtaaaaattttagcctaactttcaacatccattcaaaaacgaatgttgaaaacaaacatataacctataaaaaagtgaatggctctggcaagtgggggcatgggtggagtccataaggaaacctcagtctcaataacttcaaaatgttacttttcatggtaacttggtcatggagattggtcacagcacagacatttagaattttttagcaggttttttttttcttttgaatcttgtagtgctctctgggaattgcaccatgtacacttttacaacctacagaaatcgtcattattgttaaagtatctcaacttttctatttcttttatggtctattgtgcttttttgtttaaaaatacttttatagttttaaagtattggtcaaagtagtattctcttgaagttctagtcaatttaatttgatccaataagtttttctgaatctcctttttaagttccaagaaattctattataaataagtgtacttttaccaattccattgtataagcaaacagacaccttttagaaaaggataagtaatcatcaatttgttttttttaaaaaaaaaacaatttctagactactaaatttggcataagaataattcttttaaaatgcaacatactttaattagtttttttggtatatgcataagatgtgaactttcctattgatatcactttatattaatagagatgtacatttctttctatgccgtggctagagcaaaagttaataatgattatttacacaattgatttaatttcttaggatatgtataatattgggatattatatctgatttaaaaatactattccatacattttttttttcaggagataaaacataggggaaaggttttcatgtgaattctttgtatcactttgaagtacatatatttaaagggaagatggatacaatttgtttttattatataaatctaggtaaggtgaaatgcttttgtcaacaaaaatacagtgtagtgaattttatatttgtcacttgattaggtaaactgaaaactaacaatagaaatattattttactgcattgaaataccatgaactttcagacttgttagttctacaagcagttgtgctaccttaattttgtgtttccagaaataaaaattaaccttagttatgctgtcatttttaactaataaaaaaagtataattcataaaacttttggctttataagataattataaaattatatatttttttctgtttttgtggggttgggaaaacattttcttatttctattcactcttcaaatgcaggtctcataatatgtgtcaatgatataagatgatggaagactttgtaataaaaacatatgtcattatcttcaatttgttcaataaataatttaatgtgaatttgaatgtttgtatt

SEQ ID NO: 27627 - DNA, 4147 bp, Homo sapiens
ccctgaatttagactttgctctgtgttctcccggtaactgtcagacaaaaagtttattggctctgaggaactgagaaatgttgggaacctggtttctgctgtacacaggaaagatttgtaagtgagctctctctttgaaaacaggacccaggctgggcacagcagctcatgcctgtaatcctagtattataggaggcagaggctcgggaggattgcttgagcccaggagttcaagatcagcctaggcaacatagggagaccctatccctacaaaaaatttctgaaaaattacctgggcattgtggggcacacctgttgtcccagctactctggaggctgagtccggaggaacgtttgagcctgggagtttgagtttgcagcttgcagtgagctgtgattgcaccactgtactccagcttgggcaacagagcaagatcctgtctcaaaaggaaaaagaaaacaggacctaggtgtttggggtacactgccacccagggagtggatcaaaaatatacatagaaagagaatgagcatgtctctataattgtcttctaggaccatattgctgttagaagtcctaaaagaggatgggttgtaatttagcataatattctgaattcattccaagtttaaaatcctgtcattctctggctcttcttttttcacatcaaaatgatgctgttggacttagaggcttccgaactgttttattgagggctactatctgcctccacaattttattaaaaccactccacctttagacaaaggtgacttttgtctgattttacaaatcagattttattcaagctttctaaatatctgtgaagtagaccctagaaaattgtctcgtttattttaaatagaatctatgcttccaccaataaaccatcgggagctaagaaacaacataatgttgacaaatcaggaacctaacagattattttgtctctcattattaatttgaaagagcctctaaacttttgagaaatcaatgtgtcttcttaagaaagttaagcaccctctcttaactttcccctctatttgctctcctttttctttcttcttaagagtatttatattattttgttaagcaaaaatggctaagattgctctaaaatttgcaaaatgaggagtggattgcaaataattgagggatttatttctttaactttataagactttaaaaaaaaaacccaaattctaagcactgacatgaaagttgcctttgagaagcttgttattcattatacaaaaagtatttgcccattcctattctaagatttgcagaatatgtcaccctatctagcttttgagtttgctatctggtttaatgttgtatttataatttaaagtggaaatcagaaactgtttcaagaacctgtattctattccttactgagtgtcccttctttaaatagtgtttgctgaattaagccgatgggggcagtggcgttaagtggtggaaaaaggaaagtatatatgttagagttttgaatgagggataaatagaaagcagaatgaattaatggaaaagaactcggctgttaggccattctctaaattctagtttagccaaaagtttatgtgtggtttggggcttcatttatttatctcatgagtaaaatggaataatacctaacaggcaggctctggaagttggaaatcacatacacacacacacacacagacacacacacacacgatcaatcatgtagctcatattagatgttcaataaataacagctactacagatgcctatcagttgagtaagtagttcattaaattgagctcccaaaggtctcttctcttcacatccatatccgtttctgcagcaatcaaatagatacatgattgtttttctgtaagaaattactgcaaagagaatctttttctcctactaactgttccttctacctggtataggagataaatgtacgtttcttaattagctgactttttagtgtgtcatttctgaaggaaaaataaattaaccttaaagtggcatgtaggtccaattcagttttcctacatgttccaaaattttatttaaattactgtgtccaaaattatgaggacagtgtcattcattcaccatagtttatatttttagttatatatcaaacttccttggcacctaggataagaacatttcttttgaagttatccaatttttttttatttttacttgacttgaaggaaagttggaaaatatggtggaaaaaatcttccgcattaaaagggggaaaaaacacaaccatttacgatctcagtcagcagatttactctactcaaggaaaaaaagaaacaatcttattggaagcagatgttgacactgtgtcagttattgaagacggaaggagttcacttgagccattgcagttacaaaggggtattgatggcagtttggattcctgattgatcacctttgcagccaagggaaagacagcagaaactgtatgggatcagaaatgaaatcagcctgccagtttaatggagaggctcctagaaactcattttttttctttcctgtaagataaaagacatctttcagaataagaaaggcttgtttgagagagaaattacagtttattctctgaaaatatttaaaggccaaagtgccctttaaatctattattaaagcattgaaactgttattaaaatcattatagaaaaattaggtaaaaattttagcctaactttcaacatccattcaaaaacgaatgttgaaaacaaacatataacctataaaaaagtgaatggctctggcaagtgggggcatgggtggagtccataaggaaacctcagtctcaataacttcaaaatgttacttttcatggtaacttggtcatggagattggtcacagcacagacatttagaattttttagcaggttttttttttcttttgaatcttgtagtgctctctgggaattgcaccatgtacacttttacaacctacagaaatcgtcattattgttaaagtatctcaacttttctatttcttttatggtctattgtgcttttttgtttaaaaatacttttatagttttaaagtattggtcaaagtagtattctcttgaagttctagtcaatttaatttgatccaataagtttttctgaatctcctttttaagttccaagaaattctattataaataagtgtacttttaccaattccattgtataagcaaacagacaccttttagaaaaggataagtaatcatcaatttgttttttttaaaaaaaaaacaatttctagactactaaatttggcataagaataattcttttaaaatgcaacatactttaattagtttttttggtatatgcataagatgtgaactttcctattgatatcactttatattaatagagatgtacatttctttctatgccgtggctagagcaaaagttaataatgattatttacacaattgatttaatttcttaggatatgtataatattgggatattatatctgatttaaaaatactattccatacattttttttttcaggagataaaacataggggaaaggttttcatgtgaattctttgtatcactttgaagtacatatatttaaagggaagatggatacaatttgtttttattatataaatctaggtaaggtgaaatgcttttgtcaacaaaaatacagtgtagtgaattttatatttgtcacttgattaggtaaactgaaaactaacaatagaaatattattttactgcattgaaataccatgaactttcagacttgttagttctacaagcagttgtgctaccttaattttgtgtttccagaaataaaaattaaccttagttatgctgtcatttttaactaataaaaaaagtataattcataaaacttttggctttataagataattataaaattatatatttttttctgtttttgtggggttgggaaaacattttcttatttctattcactcttcaaatgcaggtctcataatatgtgtcaatgatataagatgatggaagactttgtaataaaaacatatgtcattatcttctaactggagcaacttatgcatggcggcggattggagctccttggccaatgagcctttagggagtgggttacttgattggcgggggtaggacacagagggatggagcctggg

SEQ ID NO: 27628 - DNA, 1788 bp, Homo sapiens
ccctgaatttagactttgctctgtgttctcccggtaactgtcagacaaaaagtttattggctctgaggaactgagaaatgttgggaacctggtttctgctgtacacaggaaagatttgtaagtgagctctctctttgaaaacaggacccaggctgggcacagcagctcatgcctgtaatcctagtattataggaggcagaggctcgggaggattgcttgagcccaggagttcaagatcagcctaggcaacatagggagaccctatccctacaaaaaatttctgaaaaattacctgggcattgtggggcacacctgttgtcccagctactctggaggctgagtccggaggaacgtttgagcctgggagtttgagtttgcagcttgcagtgagctgtgattgcaccactgtactccagcttgggcaacagagcaagatcctgtctcaaaaggaaaaagaaaacaggacctaggtgtttggggtacactgccacccagggagtggatcaaaaatatacatagaaagagaatgagcatgtctctataattgtcttctaggaccatattgctgttagaagtcctaaaagaggatgggttgtaatttagcataatattctgaattcattccaagtttaaaatcctgtcattctctggctcttcttttttcacatcaaaatgatgctgttggacttagaggcttccgaactgttttattgagggctactatctgcctccacaattttattaaaaccactccacctttagacaaaggtgacttttgtctgattttacaaatcagattttattcaagctttctaaatatctgtgaagtagaccctagaaaattgtctcgtttattttaaatagaatctatgcttccaccaataaaccatcgggagctaagaaacaacataatgttgacaaatcaggaacctaacagattattttgtctctcattattaatttgaaagagcctctaaacttttgagaaatcaatgtgtcttcttaagaaagttaagcaccctctcttaactttcccctctatttgctctcctttttctttcttcttaagagtatttatattattttgttaagcaaaaatggctaagattgctctaaaatttgcaaaatgaggagtggattgcaaataattgagggatttatttctttaactttataagactttaaaaaaaaaacccaaattctaagcactgacatgaaagttgcctttgagaagcttgttattcattatacaaaaagtatttgcccattcctattctaagatttgcagaatatgtcaccctatctagcttttgagtttgctatctggtttaatgttgtatttataatttaaagtggaaatcagaaactgtttcaagaacctgtattctattccttactgagtgtcccttctttaaatagtgtttgctgaattaagccgatgggggcagtggcgttaagtggtggaaaaaggaaagtatatatgttagagttttgaatgagggataaatagaaataaaaattaaccttagttatgctgtcatttttaactaataaaaaaagtataattcataaaacttttggctttataagataattataaaattatatatttttttctgtttttgtggggttgggaaaacattttcttatttctattcactcttcaaatgcaggtctcataatatgtgtcaatgatataagatgatggaagactttgtaataaaaacatatgtcattatcttcaatttgttcaataaataatttaatgtgaatttgaatgtttgtatt

SEQ ID NO: 27629 - DNA, 929 bp, Homo sapiens
  misc_feature (611)..(611): n is a, c, g, or t
  misc_feature (616)..(617): n is a, c, g, or t
gctggaggggcgaggaccgggtataagaagcctcgtggccttgcccgggcagccgcaggttccccgcgcgccccgagcccccgcgccatgaagctcgccgccctcctggggctctgcgtggccctgtcctgcagctccgctgctgctttcttagtgggctcggccaagcctgtggcccagcctgtcgctgcgctggagtcggcggcggaggccggggccgggaccctggccaaccccctcggcaccctcaacccgctgaagctcctgctgagcagcctgggcatccccgtgaaccacctcatagagggctcccagaagtgtgtggctgagctgggtccccaggccgtgggggccgtgaaggccctgaaggccctgctgggggccctgacagtgtttggctgagccgagactggagcatctacacctgaggacaagacgctgcccacccgcgagggctgaaaaccccgccgcggggaggaccgtccatccccttcccccggcccctctcaataaacgtggttaagagcaaaaaaaaaaaaaacaaaaaaaaaaaaaacaaaaaaaaaaaaaaaataaacacaataaaaaaaaaaaaaaaaaaaagggggggngcccnnaaaaaaatccccccgagggaggaggccccaccaagttagtagagccacccgacccgtttttgtgttgaacaacacgaggggggcccccacaaaagagagggcagcagcctaataattaaccacgcgaacgcacacgccgccgccgtttaaaaaccaacccgatcggagatgagtgaaaacaaccagatcgacccgccgcgcgaacacacgtgggcagaagcaaacacccacacctcgtggggggggggcaacaacaaatctgcgggcgcaaccacccacaagagaaaaatacaccccccgagagcgacaaaa

SEQ ID NO: 27630 - DNA, 566 bp, Homo sapiens
gctggaggggcgaggaccgggtataagaagcctcgtggccttgcccgggcagccgcaggttccccgcgcgccccgagcccccgcgccatgaagctcgccgccctcctggggctctgcgtggccctgtcctgcagctccgctgctgctttcttagtgggctcggccaagcctgtggcccagcctgtcgctgcgctggagtcggcggcggaggccggggccgggaccctggccaaccccctcggcaccctcaacccgctgaagctcctgctgagcagcctgggcatccccgtgaaccacctcatagagggctcccagaagtgtgtggctgagctgggtccccaggccgtgggggccgtgaaggccctgaaggccctgctgggggccctgacagtgtttggctgagccgagactggagcatctacacctgaggacaagacgctgcccacccgcgagggctgaaaaccccgccgcggggaggaccgtccatccccttcccccggcccctctcaataaacgtggttaagagcatcacccttaaacgctgagaccaaaccacttgcgggcga

SEQ ID NO: 27631 - DNA, 577 bp, Homo sapiens
gctggaggggcgaggaccgggtataagaagcctcgtggccttgcccgggcagccgcaggttccccgcgcgccccgagcccccgcgccatgaagctcgccgccctcctggggctctgcgtggccctgtcctgcagctccgctgctgctttcttagtgggctcggccaagcctgtggcccagcctgtcgctgcgctggagtcggcggcggaggccggggccgggaccctggccaaccccctcggcaccctcaacccgctgaagctcctgctgagcagcctgggcatccccgtgaaccacctcatagagggctcccagaagtgtgtggctgagctgggtccccaggccgtgggggccgtgaaggccctgaaggccctgctgggggccctgacagtgtttggctgagccgagactggagcatctacacctgatgtctgtgccaggcctggtcacgatggctgtgaggttagaagcgcagatagtggtccagcagggtggtggcagagccaacgtcatgattgatgtgtccgtctcactcatgtgagtctttgaatgcagcctcagcgtcttgtacagccta

SEQ ID NO: 27632 - DNA, 390 bp, Homo sapiens
gctggaggggcgaggaccgggtataagaagcctcgtggccttgcccgggcagccgcaggttccccgcgcgccccgagcccccgcgccatgaagctcgccgccctcctggggctctgcgtggccctgtcctgcagctccgctgctgctttcttagtgggctcggccaagcctgtggcccagcctgtcgctgcgctggagtcggcggcggaggccggggccgggaccctggccaaccccctcggcaccctcaacccgctgaagctcctgctgagcagcctgggcatccccgtgaaccacctcatagagggctcccagaagtgtgtgactctgagcctcgggcagaccggacagcactcgcctcgggattcgcccgggaagttcctgcctcac

SEQ ID NO: 27633 - DNA, 464 bp, Homo sapiens
gcgcgggcatcccttcccggccagcctcaaaactgcaccagaggtgtcccggccctacgtcagggctgtttcccgtcctgcccctccaagccctgtccctgggagaagcccgggtctccgggtgggaactgggtggggcgcatccgagctgcaggggcggggaaggcggaggtggccccgcgcgggtgcgcgtcccccggagacgccagcggaaccgccccgctcccgctccccacagagccggccgctgccgcgcccccgcctgagttcttggtggcagggctgggggcactcaagctcggcttctgctttccagggggccctgacagtgtttggctgagccgagactggagcatctacacctgaggacaagacgctgcccacccgcgagggctgaaaaccccgccgcggggaggaccgtccatccccttcccccggcccctctcaataaacgtggttaagag

SEQ ID NO: 27634 - DNA, 327 bp, Homo sapiens
aaataaaccttctgaactgacaacttctattatacggtttttccatttggactctgcatgcttaaatgggccattaatcacagcaggcacatgtatgtggaagagctttgtaaactgcaaaacatacaaatcctgttcccttcttattttctaaaatagccatgtttaatctactttttagctgcttccttttatgaattataaagaattatattgtaatttttttttcctccctttcagtatttagtgtctctgatccgggacaagctaggatggatgtgggttttctactttttcattctcatggtaagtgtgtgcccctttaaa

SEQ ID NO: 27635 - DNA, 2332 bp, Homo sapiens
cgcattcagtatcctgtccccaaatccagggcactgtaattgaaggcagcttccaccacccgtactccaggcagctgtcctcttgctgtggtcaaggagccccaggatagtccagctccaggaataccttggagctttcatctaattcccatctagcttctaaagactgggcccatgtaacttgtgttccatttctgacatccatgctaagtagcgggaagtatctggtgatgaactttctgatgtgatcatactaggaactgtagtagaaagaaaacttttatctattataaggatcactgttgttcatctgagcctctggtctcagttctctgctccgcctatggcaaattatttgtatgtattgttctttttttgggaactgaaatgtgatgttgagtgttttgtaatattagccataattttcaaaatcattttctaattcattgaagattaaacattatctttgtatgaagtcaaaatgaatgtaattgtccaaatccattattatgttcaaaacatgacactctaacagaagtaaactgttgctgcatatttaatactattttctctttacagacaagttgtacaattgtgtttatctcgccattaatagtgagggaaatattctctctcgtgctaaggagacaggctcacatattgagggagtgaccggtgcccgcgagacagaaagaacaatgtcagccacatcaggaccgctggggcttcgagtctgccctaatttgggtttgtctaggagctccagcctgatcttggattgtcaggcgtctctcaacactgccagccacctgagatgctgaccagcagtgaaggctgcactagttttctacactacaggaattactgttgatgatttttgctgttgtttcatgaatgtgccgagtgacttctgactctgccagcatctttgacctctgactctgcccgcgtctttgtttggcctattgaggtttagcgttttaaccttaactgttgttttggacttgaactttctctagccttgaaaatggagtgaacaggaggcaaagccacgcgtggtttgtgttggtggtatgttccacaaatggaagagatcattgcattttgctttggtaatgagtttacagagagtgggtcatctttgaagcatcaaatcctgatcaaatgctcaagctggaccgagctgcaagcctgccttggacaaagaatccctctgttcactgtggtgggaaagatcacactacatgcctgttgattggctcagtcactctgtgtctgatctaaacgtcattcagccctagaagcatgaattgcttcaaattattgtcaacttgttctcttccattttcattcaaattaactttgactcctggaagtattgagtcttcctttcaaggaccataaggtacatcagttatcttgaacattctgacgtgtaaaggaccataaggtacatcatttatcttgaacattccgacgtgtaactcacagccgaagcactccatcccagatttgttgtctgggaactttaggatcctctaggaagctaatctgcttagtctatttttagaggattgatctctggcacaaccagcttcctggagttacctcagcagaagactagaattagagaaaagggaaagaccttttcttctagtaagtgtcaagtacagatgctctttgacttatgatggggttatgtcccagtaaacccattggaagtcaaatgcatttaatacccctgactggacaccacagcttagcctcgtccaccctaaatgtactcagaacacttagaattgcccacagttgggcagaatcatctaacacaaactctattttataatcgagtgttgaatatatcatgtaatttattgaatattgtacattatgttgaaattgcaaccatttcacaccattgtaaagtccaaaaatcagaagctgaggactgtctgtacatgacattgaatcacatgaatggattactagggcctgaggggtgtccgttctttagaaaaatgtagagtatatatatcttcagggctgtgaattccatactagttatcaatattttaagatcattctgtatatacatattttaaattatgcaagcaaactaggaggagaatgtgcaattttgagggatacctaatttgcattcggttaggggatatttttcaacctcttgctttatactctgatatggggtgtgtttatgaacttgttaatgttatttaatcatgcagatttccaatcagtgtattgctcatttactgacaaaaagggaaaatacgaaacacagaaagggaaaataaactgacttttataatga

SEQ ID NO: 27636 - DNA, 2278 bp, Homo sapiens
cgcattcagtatcctgtccccaaatccagggcactgtaattgaaggcagcttccaccacccgtactccaggcagctgtcctcttgctgtggtcaaggagccccaggatagtccagctccaggaataccttggagctttcatctaattcccatctagcttctaaagactgggcccatgtaacttgtgttccatttctgacatccatgctaagtagcgggaagtatctggtgatgaactttctgatgtgatcatactaggaactgtagtagaaagaaaacttttatctattataaggatcactgttgttcatctgagcctctggtctcagttctctgctccgcctatggcaaattatttgtatgtattgttctttttttgggaactgaaatgtgatgttgagtgttttgtaatattagccataattttcaaaatcattttctaattcattgaagattaaacattatctttgtatgaagtcaaaatgaatgtaattgtccaaatccattattatgttcaaaacatgacactctaacagaagtaaactgttgctgcatatttaatactattttctctttacagacaagttgtacaattgtgtttatctcgccattaatagtgagggaaatattctctctcgtgctaaggagacaggctcacatattgagggagtgaccggtgcccgcgagacagaaagaacaatgtcagccacatcaggaccgctggggcttcgagtctgccctaatttgggtttgtctaggagctccagcctgatcttggattgtcaggcgtctctcaacactgccagccacctgagatgctgaccagcagtgaaggctgcactagttttctacactacaggaattactgttgatgatttttgctgttgtttcatgaatgtgccgagtgacttctgactctgccagcatctttgacctctgactctgcccgcgtctttgtttggcctattgaggtttagcgttttaaccttaactgttgttttggacttgaactttctctagccttgccacaaatggaagagatcattgcattttgctttggtaatgagtttacagagagtgggtcatctttgaagcatcaaatcctgatcaaatgctcaagctggaccgagctgcaagcctgccttggacaaagaatccctctgttcactgtggtgggaaagatcacactacatgcctgttgattggctcagtcactctgtgtctgatctaaacgtcattcagccctagaagcatgaattgcttcaaattattgtcaacttgttctcttccattttcattcaaattaactttgactcctggaagtattgagtcttcctttcaaggaccataaggtacatcagttatcttgaacattctgacgtgtaaaggaccataaggtacatcatttatcttgaacattccgacgtgtaactcacagccgaagcactccatcccagatttgttgtctgggaactttaggatcctctaggaagctaatctgcttagtctatttttagaggattgatctctggcacaaccagcttcctggagttacctcagcagaagactagaattagagaaaagggaaagaccttttcttctagtaagtgtcaagtacagatgctctttgacttatgatggggttatgtcccagtaaacccattggaagtcaaatgcatttaatacccctgactggacaccacagcttagcctcgtccaccctaaatgtactcagaacacttagaattgcccacagttgggcagaatcatctaacacaaactctattttataatcgagtgttgaatatatcatgtaatttattgaatattgtacattatgttgaaattgcaaccatttcacaccattgtaaagtccaaaaatcagaagctgaggactgtctgtacatgacattgaatcacatgaatggattactagggcctgaggggtgtccgttctttagaaaaatgtagagtatatatatcttcagggctgtgaattccatactagttatcaatattttaagatcattctgtatatacatattttaaattatgcaagcaaactaggaggagaatgtgcaattttgagggatacctaatttgcattcggttaggggatatttttcaacctcttgctttatactctgatatggggtgtgtttatgaacttgttaatgttatttaatcatgcagatttccaatcagtgtattgctcatttactgacaaaaagggaaaatacgaaacacagaaagggaaaataaactgacttttataatga

SEQ ID NO: 27637 - DNA, 3068 bp, Homo sapiens
cgcattcagtatcctgtccccaaatccagggcactgtaattgaaggcagcttccaccacccgtactccaggcagctgtcctcttgctgtggtcaaggagccccaggatagtccagctccaggaataccttggagctttcatctaattcccatctagcttctaaagactgggcccatgtaacttgtgttccatttctgacatccatgctaagtagcgggaagtatctggtgatgaactttctgatgtgatcatactaggaactgtagtagaaagaaaacttttatctattataaggatcactgttgttcatctgagcctctggtctcagttctctgctccgcctatggcaaattatttgtatgtattgttctttttttgggaactgaaatgtgatgttgagtgttttgtaatattagccataattttcaaaatcattttctaattcattgaagattaaacattatctttgtatgaagtcaaaatgaatgtaattgtccaaatccattattatgttcaaaacatgacactctaacagaagtaaactgttgctgcatatttaatactattttctctttacagacaagttgtacaattgtgtttatctcgccattaatagtgagggaaatattctctctcgtgctaaggagacaggctcacatattgagggagtgaccggtgcccgcgagacagaaagaacaatgtcagccacatcaggaccgctggggcttcgagtctgccctaatttgggtttgtctaggagctccagcctgatcttggattgtcaggcgtctctcaacactgccagccacctgagatgctgaccagcagtgaaggctgcactagttttctacactacaggaattactgttgatgatttttgctgttgtttcatgaatgtgccgagtgacttctgactctgccagcatctttgacctctgactctgcccgcgtctttgtttggcctattgaggtttagcgttttaaccttaactgttgttttggacttgaactttctctagccttgaaaatggagtgaacaggaggcaaagccacgcgtggtttgtgttggtggtatgttccacaaatggaagagatcattgcattttgctttggtaatgagtttacagagagtgggtcatctttgaagcatcaaatcctgatcaaatgctcaagctggaccgagctgcaagcctgccttggacaaagaatccctctgttcactgtggtgggaaagatcacactacatgcctgttgattggctcagtcactctgtgtctgatctaaacgtcattcagccctagaagcatgaattgcttcaaattattgtcaacttgttctcttccattttcattcaaattaactttgactcctggaagtattgagtcttcctttcaaggaccataaggtacatcagttatcttgaacattctgacgtgtaaaggaccataaggtacatcatttatcttgaacattccgacgtgtaactcacagccgaagcactccatcccagatttgttgtctgggaactttaggatcctctaggaagctaatctgcttagtctatttttagaggattgatctctggcacaaccagcttcctggagttacctcagcagaagactagaattagagaaaagggaaagaccttttcttctagtaagtgtcaagtacagatgctctttgacttatgatggggttatgtcccagtaaacccattggaagtcaaatgcatttaatacccctgactggacaccacagcttagcctcgtccaccctaaatgtactcagaacacttagaattgcccacagttgggcagaatcatctaacacaaactctattttataatcgagtgttgaatatatcatgtaatttattgaatattgtacattatgttgaaattgcaaccatttcacaccattgtaaagtccaaaaatcagaagctgaggactgtctgtacatgacattgaatcacatgaatggattactagggcctgaggggtgtccgttctttagaaaaatgtagagtatatatatcttcagggctgtgaattccatactagttatcaatattttaagatcattctgtatatacatattttaaattatgcaagcaaactaggaggagaatgtgcaattttgagggatacctaatttgcattcggttaggggatatttttcaacctcttgctttatactctgatatggggtgtgtttatgaacttgttaatgttatttaatcatgcagatttccaatcagtgtattgctcatttactgacaaaaagggaaaatacgaaacacagaaagggaaaataaactgacttttataatgaaaaaaagagagagaagaaacagaaaaaaaaaaaacaacacaaaaagagagaaacaaaaaaaaagcaaaaacacaaaaggaaacaagaaaaaaaggaggaaccacaaaaaaagacgcaatcacaaaaaaaaaagcacaggacaaggggccgaatcagaatcacagacagaccaagaagaaggggaaaaaaaggacaagaatggaaaaatatgggagcgagggcaactatcaaccttagtgcgggaggaacaattaatgtggcgcaaaaaccatgtaacatctacgacgaaaagagtatacaacaccttacagagaggggtagagattatttacaaaactcttgtcagagtgtgttatcaacagtgtgtcttacaaatattgtgagcagcgccaatataattgacgtgcgacattaaattatgacagaacatattcgagcggggacacacaagcgcacagtaccagaagacacctcagacagaaaacaccgcaaagatcaaacaaccccacgagagagaagacacaaagagatcaaaaagagaggatagcgagcgcgtgcgcaggcagatgagagtgcagccgagacagagatagagataggcaaccaggagggcgggccggcaggcgagccgaggaacgatcaagtgagccgcagagagaggggcgggcgacggaggcgagtgagaggcaggagtgcgcgccaacacagagcgccgcgctcagcggcacgccgcgac

SEQ ID NO: 27638 - DNA, 2448 bp, Homo sapiens
ttttaggtctctcgggtattgaggcagaagaaaactttgaagaagactcacacaggccattaattaatggtggtgaaaatgaagacgaatatgagccgaattattcaatccaagatgatagttctgttgcccaagtcaaggcgataagcttctaccaggcatgttgccttcctggagtcataccgtactcactggcctacgcctgcttgaagttagtgaattactccttcttcttctggctccccttttatctgagtaacaacttcggctggaaggaggcggaagccgacaagctgtccatttggtacgacgttggagggatcataggtggaactttgcaaggcttcatctctgatgtactacagaagagagcgccggttcttgccctgagtctgcttctggcagttgggtccctcatcgggtatagtcgttctccaaatgataagtccatcaatgcccttctgatgactgttacaggattttttattggtggaccttctaatatgattagttctgctatttctgcggacttgggtcgccaggagctcatccaaaggagcagtgaagctttggccactgtcacaggaattgtggatggttcggggagcattggagctgcagtgggccagtatttagtgtctctgatccgggacaagctaggatggatgtgggttttctactttttcattctcatgacaagttgtacaattgtgtttatctcgccattaatagtgagggaaatattctctctcgtgctaaggagacaggctcacatattgagggagtgaccggtgcccgcgagacagaaagaacaatgtcagccacatcaggaccgctggggcttcgagtctgccctaatttgggtttgtctaggagctccagcctgatcttggattgtcaggcgtctctcaacactgccagccacctgagatgctgaccagcagtgaaggctgcactagttttctacactacaggaattactgttgatgatttttgctgttgtttcatgaatgtgccgagtgacttctgactctgccagcatctttgacctctgactctgcccgcgtctttgtttggcctattgaggtttagcgttttaaccttaactgttgttttggacttgaactttctctagccttgaaaatggagtgaacaggaggcaaagccacgcgtggtttgtgttggtggtatgttccacaaatggaagagatcattgcattttgctttggtaatgagtttacagagagtgggtcatctttgaagcatcaaatcctgatcaaatgctcaagctggaccgagctgcaagcctgccttggacaaagaatccctctgttcactgtggtgggaaagatcacactacatgcctgttgattggctcagtcactctgtgtctgatctaaacgtcattcagccctagaagcatgaattgcttcaaattattgtcaacttgttctcttccattttcattcaaattaactttgactcctggaagtattgagtcttcctttcaaggaccataaggtacatcagttatcttgaacattctgacgtgtaaaggaccataaggtacatcatttatcttgaacattccgacgtgtaactcacagccgaagcactccatcccagatttgttgtctgggaactttaggatcctctaggaagctaatctgcttagtctatttttagaggattgatctctggcacaaccagcttcctggagttacctcagcagaagactagaattagagaaaagggaaagaccttttcttctagtaagtgtcaagtacagatgctctttgacttatgatggggttatgtcccagtaaacccattggaagtcaaatgcatttaatacccctgactggacaccacagcttagcctcgtccaccctaaatgtactcagaacacttagaattgcccacagttgggcagaatcatctaacacaaactctattttataatcgagtgttgaatatatcatgtaatttattgaatattgtacattatgttgaaattgcaaccatttcacaccattgtaaagtccaaaaatcagaagctgaggactgtctgtacatgacattgaatcacatgaatggattactagggcctgaggggtgtccgttctttagaaaaatgtagagtatatatatcttcagggctgtgaattccatactagttatcaatattttaagatcattctgtatatacatattttaaattatgcaagcaaactaggaggagaatgtgcaattttgagggatacctaatttgcattcggttaggggatatttttcaacctcttgctttatactctgatatggggtgtgtttatgaacttgttaatgttatttaatcatgcagatttccaatcagtgtattgctcatttactgacaaaaagggaaaatacgaaacacagaaagggaaaataaactgacttttataatga

SEQ ID NO: 27639 - DNA, 2388 bp, Homo sapiens
ttttaggtctctcgggtattgaggcagaagaaaactttgaagaagactcacacaggccattaattaatggtggtgaaaatgaagacgaatatgagccgaattattcaatccaagatgatagttctgttgcccaagtcaaggcgataagcttctaccaggcatgttgccttcctggagtcataccgtactcactggcctacgcctgcttgaagttagtgaattactccttcttcttctggctccccttttatctgagtaacaacttcggctggaaggaggcggaagccgacaagctgtccatttggtacgacgttggagggatcataggtggaactttgcaaggcttcatctctgatgtactacagaagagagcgccggttcttgccctgagtctgcttctggcagttgggtccctcatcgggtatagtcgttctccaaatgataagtccatcaatgcccttctgatgactgttacaggattttttattggtggaccttctaatatgattagttctgctatttctgcggacttgggtcgccaggagctcatccaaaggagcagtgaagctttggccactgtcacaggaattgtggatggttcggggagcattggagctgcagtgggccagtatttagtgtctctgatccgggacaagctaggatggatgtgggttttctactttttcattctcatgctaaggagacaggctcacatattgagggagtgaccggtgcccgcgagacagaaagaacaatgtcagccacatcaggaccgctggggcttcgagtctgccctaatttgggtttgtctaggagctccagcctgatcttggattgtcaggcgtctctcaacactgccagccacctgagatgctgaccagcagtgaaggctgcactagttttctacactacaggaattactgttgatgatttttgctgttgtttcatgaatgtgccgagtgacttctgactctgccagcatctttgacctctgactctgcccgcgtctttgtttggcctattgaggtttagcgttttaaccttaactgttgttttggacttgaactttctctagccttgaaaatggagtgaacaggaggcaaagccacgcgtggtttgtgttggtggtatgttccacaaatggaagagatcattgcattttgctttggtaatgagtttacagagagtgggtcatctttgaagcatcaaatcctgatcaaatgctcaagctggaccgagctgcaagcctgccttggacaaagaatccctctgttcactgtggtgggaaagatcacactacatgcctgttgattggctcagtcactctgtgtctgatctaaacgtcattcagccctagaagcatgaattgcttcaaattattgtcaacttgttctcttccattttcattcaaattaactttgactcctggaagtattgagtcttcctttcaaggaccataaggtacatcagttatcttgaacattctgacgtgtaaaggaccataaggtacatcatttatcttgaacattccgacgtgtaactcacagccgaagcactccatcccagatttgttgtctgggaactttaggatcctctaggaagctaatctgcttagtctatttttagaggattgatctctggcacaaccagcttcctggagttacctcagcagaagactagaattagagaaaagggaaagaccttttcttctagtaagtgtcaagtacagatgctctttgacttatgatggggttatgtcccagtaaacccattggaagtcaaatgcatttaatacccctgactggacaccacagcttagcctcgtccaccctaaatgtactcagaacacttagaattgcccacagttgggcagaatcatctaacacaaactctattttataatcgagtgttgaatatatcatgtaatttattgaatattgtacattatgttgaaattgcaaccatttcacaccattgtaaagtccaaaaatcagaagctgaggactgtctgtacatgacattgaatcacatgaatggattactagggcctgaggggtgtccgttctttagaaaaatgtagagtatatatatcttcagggctgtgaattccatactagttatcaatattttaagatcattctgtatatacatattttaaattatgcaagcaaactaggaggagaatgtgcaattttgagggatacctaatttgcattcggttaggggatatttttcaacctcttgctttatactctgatatggggtgtgtttatgaacttgttaatgttatttaatcatgcagatttccaatcagtgtattgctcatttactgacaaaaagggaaaatacgaaacacagaaagggaaaataaactgacttttataatga

SEQ ID NO: 27640 - DNA, 1716 bp, Homo sapiens
cgaggattaccgtgagacgacctctaaggagacaggctcacatattgagggagtgaccggtgcccgcgagacagaaagaacaatgtcagccacatcaggaccgctggggcttcgagtctgccctaatttgggtttgtctaggagctccagcctgatcttggattgtcaggcgtctctcaacactgccagccacctgagatgctgaccagcagtgaaggctgcactagttttctacactacaggaattactgttgatgatttttgctgttgtttcatgaatgtgccgagtgacttctgactctgccagcatctttgacctctgactctgcccgcgtctttgtttggcctattgaggtttagcgttttaaccttaactgttgttttggacttgaactttctctagccttgaaaatggagtgaacaggaggcaaagccacgcgtggtttgtgttggtggtatgttccacaaatggaagagatcattgcattttgctttggtaatgagtttacagagagtgggtcatctttgaagcatcaaatcctgatcaaatgctcaagctggaccgagctgcaagcctgccttggacaaagaatccctctgttcactgtggtgggaaagatcacactacatgcctgttgattggctcagtcactctgtgtctgatctaaacgtcattcagccctagaagcatgaattgcttcaaattattgtcaacttgttctcttccattttcattcaaattaactttgactcctggaagtattgagtcttcctttcaaggaccataaggtacatcagttatcttgaacattctgacgtgtaaaggaccataaggtacatcatttatcttgaacattccgacgtgtaactcacagccgaagcactccatcccagatttgttgtctgggaactttaggatcctctaggaagctaatctgcttagtctatttttagaggattgatctctggcacaaccagcttcctggagttacctcagcagaagactagaattagagaaaagggaaagaccttttcttctagtaagtgtcaagtacagatgctctttgacttatgatggggttatgtcccagtaaacccattggaagtcaaatgcatttaatacccctgactggacaccacagcttagcctcgtccaccctaaatgtactcagaacacttagaattgcccacagttgggcagaatcatctaacacaaactctattttataatcgagtgttgaatatatcatgtaatttattgaatattgtacattatgttgaaattgcaaccatttcacaccattgtaaagtccaaaaatcagaagctgaggactgtctgtacatgacattgaatcacatgaatggattactagggcctgaggggtgtccgttctttagaaaaatgtagagtatatatatcttcagggctgtgaattccatactagttatcaatattttaagatcattctgtatatacatattttaaattatgcaagcaaactaggaggagaatgtgcaattttgagggatacctaatttgcattcggttaggggatatttttcaacctcttgctttatactctgatatggggtgtgtttatgaacttgttaatgttatttaatcatgcagatttccaatcagtgtattgctcatttactgacaaaaagggaaaatacgaaacacagaaagggaaaataaactgacttttataatga

SEQ ID NO: 27641 - DNA, 2320 bp, Homo sapiens
ttttaggtctctcgggtattgaggcagaagaaaactttgaagaagactcacacaggccattaattaatggtggtgaaaatgaagacgaatatgagccgaattattcaatccaagatgatagttctgttgcccaagtcaaggcgataagcttctaccaggcatgttgccttcctggagtcataccgtactcactggcctacgcctgcttgaagttagtgaattactccttcttcttctggctccccttttatctgagtaacaacttcggctggaaggaggcggaagccgacaagctgtccatttggtacgacgttggagggatcataggtggaactttgcaaggcttcatctctgatgtactacagaagagagcgccggttcttgccctgagtctgcttctggcagttgggtccctcatcgggtatagtcgttctccaaatgataagtccatcaatgcccttctgatgactgttacaggattttttattggtggaccttctaatatgattagttctgctatttctgcggacttgggtcgccaggagctcatccaaaggagcagtgaagctttggccactgtcacaggaattgtggatggttcggggagcattggagctgcagtgggccagacaagttgtacaattgtgtttatctcgccattaatagtgagggaaatattctctctcgtgctaaggagacaggctcacatattgagggagtgaccggtgcccgcgagacagaaagaacaatgtcacctgatcttggattgtcaggcgtctctcaacactgccagccacctgagatgctgaccagcagtgaaggctgcactagttttctacactacaggaattactgttgatgatttttgctgttgtttcatgaatgtgccgagtgacttctgactctgccagcatctttgacctctgactctgcccgcgtctttgtttggcctattgaggtttagcgttttaaccttaactgttgttttggacttgaactttctctagccttgaaaatggagtgaacaggaggcaaagccacgcgtggtttgtgttggtggtatgttccacaaatggaagagatcattgcattttgctttggtaatgagtttacagagagtgggtcatctttgaagcatcaaatcctgatcaaatgctcaagctggaccgagctgcaagcctgccttggacaaagaatccctctgttcactgtggtgggaaagatcacactacatgcctgttgattggctcagtcactctgtgtctgatctaaacgtcattcagccctagaagcatgaattgcttcaaattattgtcaacttgttctcttccattttcattcaaattaactttgactcctggaagtattgagtcttcctttcaaggaccataaggtacatcagttatcttgaacattctgacgtgtaaaggaccataaggtacatcatttatcttgaacattccgacgtgtaactcacagccgaagcactccatcccagatttgttgtctgggaactttaggatcctctaggaagctaatctgcttagtctatttttagaggattgatctctggcacaaccagcttcctggagttacctcagcagaagactagaattagagaaaagggaaagaccttttcttctagtaagtgtcaagtacagatgctctttgacttatgatggggttatgtcccagtaaacccattggaagtcaaatgcatttaatacccctgactggacaccacagcttagcctcgtccaccctaaatgtactcagaacacttagaattgcccacagttgggcagaatcatctaacacaaactctattttataatcgagtgttgaatatatcatgtaatttattgaatattgtacattatgttgaaattgcaaccatttcacaccattgtaaagtccaaaaatcagaagctgaggactgtctgtacatgacattgaatcacatgaatggattactagggcctgaggggtgtccgttctttagaaaaatgtagagtatatatatcttcagggctgtgaattccatactagttatcaatattttaagatcattctgtatatacatattttaaattatgcaagcaaactaggaggagaatgtgcaattttgagggatacctaatttgcattcggttaggggatatttttcaacctcttgctttatactctgatatggggtgtgtttatgaacttgttaatgttatttaatcatgcagatttccaatcagtgtattgctcatttactgacaaaaagggaaaatacgaaacacagaaagggaaaataaactgacttttataatga

SEQ ID NO: 27642 - DNA, 306 bp, Homo sapiens
tgaggggtgtccgttctttagaaaaatgtagagtatatatatcttcagggctgtgaattccatactagttatcaatattttaagatcattctgtatatacatattttaaattatgcaagcaaactaggaggagaatgtgcaattttgagggatacctaatttgcattcggttaggggatatttttcaacctcttgctttatactctgatatggggtgtgtttatgaacttgttaatgttatttaatcatgcagatttccaatcagtgtattgctcatttactgaccaggtgggactcttcccacca

SEQ ID NO: 27643 - DNA, 3653 bp, Homo sapiens
agggccgtccgctctgctgccgccgctgttgcagccaccgccgttgccgcctccctgccggcaagtgtgtggaagctgagcgttgtcgccgccgctatggggagaaagtcaagcaaagccaaggagaagaagcagaagcggttggaggagcgagcagccatggatgccgtttgtgccaaagtggacgctgccaacaggcttggagaccctctggaggctttcccagtgttcaagaaatatgatagaaacgggttgaatgtctccattgaatgtaagcgagtgtctggactggagccagccaccgtggattgggccttcgacctgaccaaaacgaatatgcaaaccatgtatgagcagagcgagtggggctggaaggaccgagagaaacgggaggaaatgacagatgaccgagcctggtacctcatcgcgtgggaaaacagctccgtccctgttgccttttctcacttccggtttgacgtggagtgtggggatgaagtcctgtactgctatgaagtgcagttggaaagcaaggtgcggcggaaaggcctggggaagttcctcatacagatcctgcagctcatggccaacagcacacagatgaagaaggttatgttaacagtatttaaacacaatcatggtgcctaccagttcttcagagaagcgttgcaatttgaaattgatgactcttcccccagcatgtccggttgctgtggggaggattgctcctatgagatcctgagccggaggaccaagtttggggacagccatcactcccacgcgggtgggcactgtggtggctgctgccactgaactctcagagccactttcaagtcacaatgctctctcctaaggcctttcctctttcctggtctcactgttcaccgggtgtcctcagagctgtggcctccccagccctgcacgtgccaggctgcgccctgagagcacagaaccctggggagaagtggtatcagctgctcctcctctcctaggagaccagagtgctagaagggaatgaaagggagagggaagagtaggtggggccgggcagtgaagctcatcctccacagtggctgcctcctcatttggctcctggggcctgcagtggaggttctcgcacctctgcagcccctagattcctggcaacctcccctcccctgacacatacacacttggacaaatggaatgtttatgtccacctttatgaaagttctggagtcctgggtctggggtttgctggtccccaaagaggaacacactgggtgtaagatctgggtgtagagggcggcttcagagagactcacgcttgcgcagttggaattgctgttaacggagactgggaagatcttttgtgccaagatgcagggaaatgaagaaagctctttccagctgtttttatggattcatggagtgggctcatgttgggaccagctgactctgggaggaagactgcctctccatcgctgtcagagagcctgaaaggaccaacaatgaggtgttcttgggacccgccatggggatgattgcttctctaggctcctggatgttgctgcattctaagcttaacctcctggtctcatggcagtgacttgagcttttgattcatagaagaaagccagaggttctgcttgttcttgtctgccagccctcgtcgttctttctcctctgcctctcacctctaccccaaatacctctgttcttagtctcaaggggagaataacatcagggagcccctcatcttccccagaaggacttctcgttcctcatgtagttaactccattgattttcctatcttggtgctgatagctctctaagggtagggcacacctccccacagccaccctccctcttcagagagcccccagccagcagcaggcccctctgcctgcactcctcaggcttgcccctcgctgcctcagtgaggcactagtgccactgccgtggcccagccgggccatagctcaggctgcagcagaaatgcctctcagtggccaacagttgcttttctctctggtgtcaccctgtggcaacaggctggagcaggggaaggagaaagccttcctcttctctcataggatagaaaggcaggctcagaactaatgctcatcctgatctctaggccttgttcctcttccagggaagaaaagccaaatccttatcaaggaaaaagcacctaacagctccctttggatatccctgagctctgctgtggggagtatcataaaggttctagccttcgtgaagttgttctcgtggaggtctgttggtccctctgacctcagcatctgctcacatcccaccctctgcccaactctggcagtctctcctggcagatctccccagagtggtccttgcttctcacctggattcctgcttgtgcaggagcctgtgtacacagggcctccctcacccagcctggcccctctgctgagcactttgcgctgctcttgatgggcagcagtgggactgggaactccttagagagggccttgcagctttacactggaataagtctgcctctgcctctgcctcaccctgctggctcctggtgggtttcatcccaggcagagttgacattgctggaggggtttggtggactcctaagaatcatgaaaccacaggagcatgtttaggaagagatttgtctctggtccctgtctctgaaaggacacagatgctaaatatttattgtcttagatcatggattcctgatacctctcactcaaggggaccaaaagggacccccccgtgttcatcccttgtaaggtgagttcagtctacgttgtctctttccagtcactggatgcgtggcaccaactggtcaatgggtgcttggtgccataccctgctcaccctagtctctgcaggccatgtcctgaagggttcctcaggaggtcgggactagggtgggagaggcactatctgagacctgcaatcactcttgttggtcttgagcccattcatttccaaaacatccatctttctccacttcccccaggtcttggttttgagaaacagcaggcatggctgagtgcggtggcttacacctgtaatcccagcactttgggaggctgaggcaggcgggtcacctgaggtcaggagttcaagaccagcctggtcaacatggcaaaagcccatctctactaaaaaatacaaaaattagccaggcgtggttgtggcctgtaatcccagctactcgggaggctgaggcaggagactcgcttgaacccaggaggtggaggttgtggtgagctgagatcacgccattgcactccagcctaggcgacagagtgagactccatctcaaaaaaaaaaaaagagaaacatagcaggccttttttaccaggctttttgtgttttgtttgtttgtttggagcatgttaagatttttttaagatttttaaaattttagttatatccaccctatttcaggttatttttgttggtgtcaagtatgtataggacatgtgaatggttctttttaatttttttttaagaggaaatttggaagataaactccttgatatatatatatatatatatttttttttctttagcagcttgttatcactggaatcaaagggaaaaagtgatctcttcttgcattggttgtatttgtatgtcacaaataaaagacactttggtcaaaaaaaga

SEQ ID NO: 27644 - DNA, 1656 bp, Homo sapiens
agggccgtccgctctgctgccgccgctgttgcagccaccgccgttgccgcctccctgccggcaagtgtgtggaagctgagcgttgtcgccgccgctatggggagaaagtcaagcaaagccaaggagaagaagcagaagcggttggaggagcgagcagccatggatgccgtttgtgccaaagtggacgctgccaacaggcttggagaccctctggaggctttcccagtgttcaagaaatatgatagaaacgggttgaatgtctccattgaatgtaagcgagtgtctggactggagccagccaccgtggattgggccttcgacctgaccaaaacgaatatgcaaaccatgtatgagcagagcgagtggggctggaaggaccgagagaaacgggaggaaatgacagatgaccgagcctggtacctcatcgcgtgggaaaacagctccgtccctgttgccttttctcacttccggtttgacgtggagtgtggggatgaagtcctgtactgctatgaagtgcagttggaaagcaaggtgcggcggaaaggcctggggaagttcctcatacagatcctgcagctcatggccaacagcacacagatgaagaaggttatgttaacagtatttaaacacaatcatggtgcctaccagttcttcagagaagcgttgcaatttgaaattgatgactcttcccccagcatgtccggttgctgtggggaggattgctcctatgagatcctgagccggaggaccaagtttggggacagccatcactcccacgcgggtgggcactgtggtggctgctgccactgaactctcagagccactttcaagtcacaatgctctctcctaaggcctttcctctttcctggtctcactgttcaccgggtgtcctcagagctgtggcctccccagccctgcacgtgccaggctgcgccctgagagcacagaaccctggggagaagtggtatcagctgctcctcctctcctaggagaccagagtgctagaagggaatgaaagggagagggaagagtaggtggggccgggcagtgaagctcatcctccacagtggctgcctcctcatttggctcctggggcctgcagtggaggttctcgcacctctgcagcccctagattcctggcaacctcccctcccctgacacatacacacttggacaaatggaatgtttatgtccacctttatgaaagttctggagtcctgggtctggggtttgctggtccccaaagaggaacacactgggtgtaagatctgggtgtagagggcggcttcagagagactcacgcttgcgcagttggaattgctgttaacggagactgggaagatcttttgtgccaagatgcagggaaatgaagaaagctctttccagctgtttttatggattcatggagtgggctcatgttgggaccagctgactctgggaggaagactgcctctccatcgctgtcagagagcctgaaaggaccaacaatgagatcatggattcctgatacctctcactcaaggggaccaaaagggacccccccgtgttcatcccttgtaagcttgttatcactggaatcaaagggaaaaagtgatctcttcttgcattggttgtatttgtatgtcacaaataaaagacactttggtcaaaaaaaga

SEQ ID NO: 27645 - DNA, 3815 bp, Homo sapiens
cttgattttccatttggagttgtaaccaggtaaagtcagtgtgcagcagatcaggtagcctcttctttgggttagctgtgctgtgagcaggttgtatgcccacaggctaatgaggtctcctcttgccctgtcaggtgatgccaaacttaactctcctgggcctttccaccaaagccttcctcgcacatgtgacttcagagctaggcaaatggtgggttttgggaggctgctcctggttctgaagttagtctcccgttgtgggtccccacagcatcccactccaagacaacagctcttgggataggatctgcacctccgccccacttgtctgtgctgttcctcttttctttccctccacagcttggagaccctctggaggctttcccagtgttcaagaaatatgatagaaacgggttgaatgtctccattgaatgtaagcgagtgtctggactggagccagccaccgtggattgggccttcgacctgaccaaaacgaatatgcaaaccatgtatgagcagagcgagtggggctggaaggaccgagagaaacgggaggaaatgacagatgaccgagcctggtacctcatcgcgtgggaaaacagctccgtccctgttgccttttctcacttccggtttgacgtggagtgtggggatgaagtcctgtactgctatgaagtgcagttggaaagcaaggtgcggcggaaaggcctggggaagttcctcatacagatcctgcagctcatggccaacagcacacagatgaagaaggttatgttaacagtatttaaacacaatcatggtgcctaccagttcttcagagaagcgttgcaatttgaaattgatgactcttcccccagcatgtccggttgctgtggggaggattgctcctatgagatcctgagccggaggaccaagtttggggacagccatcactcccacgcgggtgggcactgtggtggctgctgccactgaactctcagagccactttcaagtcacaatgctctctcctaaggcctttcctctttcctggtctcactgttcaccgggtgtcctcagagctgtggcctccccagccctgcacgtgccaggctgcgccctgagagcacagaaccctggggagaagtggtatcagctgctcctcctctcctaggagaccagagtgctagaagggaatgaaagggagagggaagagtaggtggggccgggcagtgaagctcatcctccacagtggctgcctcctcatttggctcctggggcctgcagtggaggttctcgcacctctgcagcccctagattcctggcaacctcccctcccctgacacatacacacttggacaaatggaatgtttatgtccacctttatgaaagttctggagtcctgggtctggggtttgctggtccccaaagaggaacacactgggtgtaagatctgggtgtagagggcggcttcagagagactcacgcttgcgcagttggaattgctgttaacggagactgggaagatcttttgtgccaagatgcagggaaatgaagaaagctctttccagctgtttttatggattcatggagtgggctcatgttgggaccagctgactctgggaggaagactgcctctccatcgctgtcagagagcctgaaaggaccaacaatgaggtgttcttgggacccgccatggggatgattgcttctctaggctcctggatgttgctgcattctaagcttaacctcctggtctcatggcagtgacttgagcttttgattcatagaagaaagccagaggttctgcttgttcttgtctgccagccctcgtcgttctttctcctctgcctctcacctctaccccaaatacctctgttcttagtctcaaggggagaataacatcagggagcccctcatcttccccagaaggacttctcgttcctcatgtagttaactccattgattttcctatcttggtgctgatagctctctaagggtagggcacacctccccacagccaccctccctcttcagagagcccccagccagcagcaggcccctctgcctgcactcctcaggcttgcccctcgctgcctcagtgaggcactagtgccactgccgtggcccagccgggccatagctcaggctgcagcagaaatgcctctcagtggccaacagttgcttttctctctggtgtcaccctgtggcaacaggctggagcaggggaaggagaaagccttcctcttctctcataggatagaaaggcaggctcagaactaatgctcatcctgatctctaggccttgttcctcttccagggaagaaaagccaaatccttatcaaggaaaaagcacctaacagctccctttggatatccctgagctctgctgtggggagtatcataaaggttctagccttcgtgaagttgttctcgtggaggtctgttggtccctctgacctcagcatctgctcacatcccaccctctgcccaactctggcagtctctcctggcagatctccccagagtggtccttgcttctcacctggattcctgcttgtgcaggagcctgtgtacacagggcctccctcacccagcctggcccctctgctgagcactttgcgctgctcttgatgggcagcagtgggactgggaactccttagagagggccttgcagctttacactggaataagtctgcctctgcctctgcctcaccctgctggctcctggtgggtttcatcccaggcagagttgacattgctggaggggtttggtggactcctaagaatcatgaaaccacaggagcatgtttaggaagagatttgtctctggtccctgtctctgaaaggacacagatgctaaatatttattgtcttagatcatggattcctgatacctctcactcaaggggaccaaaagggacccccccgtgttcatcccttgtaaggtgagttcagtctacgttgtctctttccagtcactggatgcgtggcaccaactggtcaatgggtgcttggtgccataccctgctcaccctagtctctgcaggccatgtcctgaagggttcctcaggaggtcgggactagggtgggagaggcactatctgagacctgcaatcactcttgttggtcttgagcccattcatttccaaaacatccatctttctccacttcccccaggtcttggttttgagaaacagcaggcatggctgagtgcggtggcttacacctgtaatcccagcactttgggaggctgaggcaggcgggtcacctgaggtcaggagttcaagaccagcctggtcaacatggcaaaagcccatctctactaaaaaatacaaaaattagccaggcgtggttgtggcctgtaatcccagctactcgggaggctgaggcaggagactcgcttgaacccaggaggtggaggttgtggtgagctgagatcacgccattgcactccagcctaggcgacagagtgagactccatctcaaaaaaaaaaaaagagaaacatagcaggccttttttaccaggctttttgtgttttgtttgtttgtttggagcatgttaagatttttttaagatttttaaaattttagttatatccaccctatttcaggttatttttgttggtgtcaagtatgtataggacatgtgaatggttctttttaatttttttttaagaggaaatttggaagataaactccttgatatatatatatatatatatttttttttctttagcagcttgttatcactggaatcaaagggaaaaagtgatctcttcttgcattggttgtatttgtatgtcacaaataaaagacactttggtcaaaaaaaga

SEQ ID NO: 27646 - DNA, 585 bp, Homo sapiens
  misc_feature (103)..(103): n is a, c, g, or t
  misc_feature (306)..(306): n is a, c, g, or t
atgggctgctgtggctgctctggaggctgtggctccggctgtgggggctgtggctccggctgtgggggctgcggctctggctgtgggggatgtggctctagcngctgtgtgcccatctgctgctgcaagcccgtgtgctgctgtgtgccagcctgttcctgctccagctgtggctcctgtgggggctccaaggggggccgtggctcctgtgggggctccaagggggactgtggctcctgtgggggctccaagggaggctgtggttcttgtggctgctcccagtgcagctgctataagccctgctgntgctcctcaggctgtgggtcatcctgctgccagtccagctgctgcaaaccctgctgttcccagtccagctgttgtaagccctgcagctgctcttcaggctgtgggtcatcctgctgccagtccagctgctgcaagccctgctgttcccagtccagctgctgtaagccctgctgctgctcttcaggctgtgggtcatcctgctgccagtccagctgctgcaagccctgctgttcccagtccagctgctgtgtcccaatttgctgccagtgcaagatctga

SEQ ID NO: 27647 - DNA, 126 bp, Homo sapiens
tttatattttcttgtgttttcatgacagtaaatattgctcttcacttcccggtataagactccttttagtattttctgtacggcccatctactggtgattaatttcctcagcttttgcttgtttgg

SEQ ID NO: 27648 - DNA, 582 bp, Homo sapiens
ggcaccactgggatgggacctctagggtatttactgtcattaatgttaatgtggcatccctgtgagtgtcaggattcacagcttgtggctattcacatccgagatgcctcagttcggtttgcctggttcttactgagtgcagaccagggtctccattgtggcttctgccttcctctgccccagatccagggatgctgatagccgtgcggctgtgttcctagtccccagaaagtggccctgaaggtaggtgctcccttttgcacttgtgggtgcttccagcgcttccacctgcccaaggcctgcccgtgagtgagagacagagatagagagagagagagagaccttttcctcccaagagaatttacccccgagtacccactctgagggtgacttgctctggttatgcaacccgcattttgtagagggcttgacagtttccagagactcacgcagcgtttgatcctctgtggcggccctgggaggtttgcttgtttagttataccctgctggaggcagctaacaggaaacactgtaaagtgtttaaatggtacactttaaaatggtaaaatgtacatttaaaaa

SEQ ID NO: 27649 - DNA, 562 bp, Homo sapiens
agtttcagagtgtaaatggggcaggttacagtattaaatagaagatagtgtaggctttattgagaagttgagatttgaggcaagacggaatggaggtgaggtgagtatacttgccaagcagattatctgtgggaatagcatatactaggcaggcgaatcagtgagcaaagtttctgatcaccaagtatgactggcaaggaggctagctgtggccatagcagagagagcaagtagaagaggttagggaggtaatggggggccagatcaagtagagcctgggaggccaccataagaaaactggcttctattgtgaatcaaatggggagccactgcagggttttgagtaaagctgctatgtagagattaaattttaagagagtaaggcaaaaacaggaagaccagttagaaggctgttggtataatctaggtaagagataacagtggtgtctgtctctacagcagggacttgacctttaaagtctttaaaaacctttaaagtctaatttttaaaaagctgttgacagcaaaaaaaaaaaaaaaagaaccaaaagaagtaaaaaaa

SEQ ID NO: 27650 - DNA, 900 bp, Homo sapiens
atgcttcggttattctatttctctgctattattgcctcagttattttaaattttgtaggaatcattatgaatctgtttattacagtggtcaattgcaaaacttgggtcaaaagccatagaatctcctcttctgataggattctgttcagcctgggcatcaccaggtttcttatgctgggactatttctggtgaacaccatctacttcgtctcttcaaatacggaaaggtcagtctacctgtctgctttttttgtgttgtgtttcatgtttttggactcgagcagtgtctggtttgtgaccttgctcaatatcttgtactgtgtgaagattactaacttccaacactcagtgtttctcctgctgaagcggaatatctccccaaagatccccaggctgctgctggcctgtgtgctgatttctgctttcaccacttgcctgtacatcacgcttagccaggcatcaccttttcctgaacttgtgactacgagaaataacacatcatttaatatcagtgagggcatcttgtctttagtggtttctttggtcttgagctcatctctccagttcatcattaatgtgacttctgcttccttgctaatacactccttgaggagacatatacagaagatgcagaaaaatgccactggtttctggaatccccagacggaagctcatgtaggtgctatgaagctgatggtctatttcctcatcctctacattccatattcagttgctaccctggtccagtatctccccttttatgcagggatggatatggggaccaaatccatttgtctgatttttgccaccctttactctccaggacattctgttctcattattatcacacatcctaaactgaaaacaacagcaaagaagattctttgtttcaaaaaatag

SEQ ID NO: 27651 - DNA, 571 bp, Homo sapiens
  misc_feature (487)..(487): n is a, c, g, or t
cacgttaagtgcttagaacatggcgtgtgacagagtaagttctgtatacctggaaatgttagctgtcctcatcatcatcagacccagggctgagcaggctgactcctcatactcttcattacccagagcatagttccatttcctctcactgtcccacttaggccttcaggatactttgagatccccggagaagctggccagatttcctgcagtggtagggggtgcccagggagtctgaggctgtgggggaattcttagggtgaaaaggcccaggtctccccctgctaccttcaccctggcagatgatggtgaatgtgccgctcttcgcggggaacccccaactgcaggagcagctccgcctgcagctcccagtcttcctgcagcagatgcagaacccagagtcactctccatccttaccaatccccgagccatgcaggcattgctgcagatccagcagggactacagacttgcagtgagccaagatngcgccactgcactccagcctgggtgacagagcgagactccgtctcaaaaaaaaaaaaaaaaaaaaaatgtgtggactgtgataa

SEQ ID NO: 27652 - DNA, 3763 bp, Homo sapiens
ccccaagagtagtagtagtagtagtaccatacgatcgtactgaccacctgtcgtttacccagccctagacatgctgctactgctattccatggatcctaggtcacaccaccttaagcgccggcgcagctgcggcccgcccgcccctcctcctcctcggcccgcccgaccgcccgccggcccaccgccgccgccgtaccgcctcggctcgccccggctctgctccggggggtaagcccagtggcagttctgggggttcctgttcctcctttgcggcggcatggcggagccgagagcggggccgagacgaggccccccattcgggtcaccgtcaagacccccaaggacaaggaggaaattgtgatctgcgatcgagcctcggtcaaggagttcaaagaggaaatctcccggaggtttaaggctcagcaggatcagctggtcctgatcttcgcaggcaagatcctcaaggatggggacacactgaaccagcacggaatcaaggacgggctcactgtccatctggtcatcaagacccctcagaaggctcaagatccagctgctgccactgcttcttccccctccacacctgaccctgcctcagcaccctccaccacgcctgcttcacccgccacccctgcccagccctccacctctggcagtgcctcttcagatgctggcagtggaagccggaggagcagtggtggggggccctctccgggggctggggagggatcccccagtgctactgcgtccatactctctggctttgggggcatcctggggctgggcagcctaggcctgggctctgccaacttcatggagctgcagcagcagatgcagcggcagctgatgtccaatcctgagatgctgtcacagatcatggagaaccccctggtccaggatatgatgtctaaccctgatctgatgcgtcacatgattatggccaacccccagatgcagcagttgatggagcggaaccctgagatcagccacatgctcaataaccctgaactcatgaggcagacaatggagcttgctcggaatccagccatgatgcaagagatgatgcggaaccaggaccgggccctgagcaaccttgagagcatccctggagggtataatgccctccgccgcatgtacacggacatccaggagcccatgttcagtgctgcccgggaacagtttggcaacaatcccttctcttccctggccgggaactccgacagctcatcctcccagcctctgcggactgagaatcgagagcccctccctaacccctggagcccctcgccccccacctcccaggcccccgggtccggtggggagggcaccggaggatcggggaccagccaggtgcacccgacagtctcgaacccctttgggatcaatgcggctagcctggggtcagggatgttcaatagcccagaaatgcaagccctcctccagcagatctctgagaacccccagctgatgcagaatgtgatctcagcaccctacatgcgcagcatgatgcagacgcttgcccagaaccccgactttgctgctcagatgatggtgaatgtgccgctcttcgcggggaacccccaactgcaggagcagctccgcctgcagctcccagtcttcctgcagcagatgcagaacccagagtcactctccatccttaccaatccccgagccatgcaggcattgctgcagatccagcagggactacagaccttgcagaccgaggcccctgggctggtacccagccttggctcctttgggatgtcccggaccccagcaccctcagcaggcagcaacgcagggtctacgcccgaggcccccacttcctcaccagccacgccagccacatcttctccaacaggggcttccagcgcccagcagcaactcatgcagcagatgatccagcttttggctggaagtggaaactcacaggtgcagacgccagaagtgagatttcagcagcagctggagcagctcaactccatgggcttcatcaatcgtgaggctaacctgcaggccctgattgccacaggaggggacatcaacgcagctatcgagagactgctgggctcccagctctcctaatccctcggcccatgcctcctgcctctcccctccctcgatgtcagcattcggttcttctgtcaatccttaccctctgcagcttgtcctcccttccgtcttctccctcatcctttccaaacagcagggtgactttagaggcatgggctccaaccccttagctctgtctgagaattatggttttactgctacgtctctaacagactcttctctcctggtctccttgagcagtgctacttaaacagttttcacagtttcattgattgactctacctccttgccccacaccacttttgcaatctttaaactttcagtggctgtgcagagtcgagggaggaaccagctctctggtttactggaacatagtcttccatctataccactagggttttgtcttatgtttacttttggtaactctcttccttctttttctccctaccccccaacccctagcccaaccaatgctagaatttcttgctctgaaggaggagcaggtgaaacaggtggtaattttccttctcggcccctattctggttcattcagcactttttggtgggaactgttggaaattccagggtaaggaggaagatgcctgttctccctgtctgaagagggagatgagacagctctctggacaggaattaacaaacgctggagcagcccagaggaaattcgtgtgaaagaggagggaatgagattattcggaggaagggaatgggggagacagcctgagtaaaaggcttggaagttggaattaacagtggggagcagaagcactcatagctcttttaggcagaagaatccaggcccgagctggcagaagagacttagagatgctaatggaatttaaactgaaaaaaggagcccaatgaagctaagcgccacgccccacaaggggtcatattggctttagttcctcaagcatatgtgcttatatgcacacacacacacatttccatggacccaggtcttgcttgtgtccccaggcaccagtagtttgagcccccctcaaaagacatgaagggggttggggtctgtgtgagtagtggggaggtgcatgtgtatccacatgtgtgcatacactcttaagttgggtgggaagtggattccttgttggtttctggttcagagtgctctcccaccaccagagacaagtgggtaaaaaggtcagtccattgcaggaatatatatccgggagagctaggtcccttggggctctggatgctgggtaacccagaggtaatgtgggtaccctttctgaagctgtcagggctgtgactagcacccttatcacccctcactgccttgtgggaatagtagagggtttttttcctccagaccccctggcctttcagttcttaactatttccctccaggccagaaagttttctttgaggaaggagaggagagggtggcaatgatgcctttgatctggaattggacatttctctgtcagagcacagaggaggctcatatcacctcttccctctcctacttggcccagctgcttggaggaccgaccccatggctgagaatatgacggcaagaggaacagagtttgctccaagtgggaaagggtcccaagcagtccagagaagatgtctgtgtggctttccctccctgcctcccccagctcccacactggcctttgtaaataaatggcgtggtctttgttgtga

SEQ ID NO: 27653 - DNA, 3535 bp, Homo sapiens
gaggaggaggagccgggcgggctggcgggcggccgggtggcggcggcggcatggcggagccgagagcggggccgagacgaggccccccattcgggtcaccgtcaagacccccaaggacaaggaggaaattgtgatctgcgatcgagcctcggtcaaggagttcaaagaggaaatctcccggaggtttaaggctcagcaggatcagctggtcctgatcttcgcaggcaagatcctcaaggatggggacacactgaaccagcacggaatcaaggacgggctcactgtccatctggtcatcaagacccctcagaaggctcaagatccagctgctgccactgcttcttccccctccacacctgaccctgcctcagcaccctccaccacgcctgcttcacccgccacccctgcccagccctccacctctggcagtgcctcttcagatgctggcagtggaagccggaggagcagtggtggggggccctctccgggggctggggagggatcccccagtgctactgcgtccatactctctggctttgggggcatcctggggctgggcagcctaggcctgggctctgccaacttcatggagctgcagcagcagatgcagcggcagctgatgtccaatcctgagatgctgtcacagatcatggagaaccccctggtccaggatatgatgtctaaccctgatctgatgcgtcacatgattatggccaacccccagatgcagcagttgatggagcggaaccctgagatcagccacatgctcaataaccctgaactcatgaggcagacaatggagcttgctcggaatccagccatgatgcaagagatgatgcggaaccaggaccgggccctgagcaaccttgagagcatccctggagggtataatgccctccgccgcatgtacacggacatccaggagcccatgttcagtgctgcccgggaacagtttggcaacaatcccttctcttccctggccgggaactccgacagctcatcctcccagcctctgcggactgagaatcgagagcccctccctaacccctggagcccctcgccccccacctcccaggcccccgggtccggtggggagggcaccggaggatcggggaccagccaggtgcacccgacagtctcgaacccctttgggatcaatgcggctagcctggggtcagggatgttcaatagcccagaaatgcaagccctcctccagcagatctctgagaacccccagctgatgcagaatgtgatctcagcaccctacatgcgcagcatgatgcagacgcttgcccagaaccccgactttgctgctcagatgatggtgaatgtgccgctcttcgcggggaacccccaactgcaggagcagctccgcctgcagctcccagtcttcctgcagcagatgcagaacccagagtcactctccatccttaccaatccccgagccatgcaggcattgctgcagatccagcagggactacagaccttgcagaccgaggcccctgggctggtacccagccttggctcctttgggatgtcccggaccccagcaccctcagcaggcagcaacgcagggtctacgcccgaggcccccacttcctcaccagccacgccagccacatcttctccaacaggggcttccagcgcccagcagcaactcatgcagcagatgatccagcttttggctggaagtggaaactcacaggtgcagacgccagaagtgagatttcagcagcagctggagcagctcaactccatgggcttcatcaatcgtgaggctaacctgcaggccctgattgccacaggaggggacatcaacgcagctatcgagagactgctgggctcccagctctcctaatccctcggcccatgcctcctgcctctcccctccctcgatgtcagcattcggttcttctgtcaatccttaccctctgcagcttgtcctcccttccgtcttctccctcatcctttccaaacagcagggtgactttagaggcatgggctccaaccccttagctctgtctgagaattatggttttactgctacgtctctaacagactcttctctcctggtctccttgagcagtgctacttaaacagttttcacagtttcattgattgactctacctccttgccccacaccacttttgcaatctttaaactttcagtggctgtgcagagtcgagggaggaaccagctctctggtttactggaacatagtcttccatctataccactagggttttgtcttatgtttacttttggtaactctcttccttctttttctccctaccccccaacccctagcccaaccaatgctagaatttcttgctctgaaggaggagcaggtgaaacaggtggtaattttccttctcggcccctattctggttcattcagcactttttggtgggaactgttggaaattccagggtaaggaggaagatgcctgttctccctgtctgaagagggagatgagacagctctctggacaggaattaacaaacgctggagcagcccagaggaaattcgtgtgaaagaggagggaatgagattattcggaggaagggaatgggggagacagcctgagtaaaaggcttggaagttggaattaacagtggggagcagaagcactcatagctcttttaggcagaagaatccaggcccgagctggcagaagagacttagagatgctaatggaatttaaactgaaaaaaggagcccaatgaagctaagcgccacgccccacaaggggtcatattggctttagttcctcaagcatatgtgcttatatgcacacacacacacatttccatggacccaggtcttgcttgtgtccccaggcaccagtagtttgagcccccctcaaaagacatgaagggggttggggtctgtgtgagtagtggggaggtgcatgtgtatccacatgtgtgcatacactcttaagttgggtgggaagtggattccttgttggtttctggttcagagtgctctcccaccaccagagacaagtgggtaaaaaggtcagtccattgcaggaatatatatccgggagagctaggtcccttggggctctggatgctgggtaacccagaggtaatgtgggtaccctttctgaagctgtcagggctgtgactagcacccttatcacccctcactgccttgtgggaatagtagagggtttttttcctccagaccccctggcctttcagttcttaactatttccctccaggccagaaagttttctttgaggaaggagaggagagggtggcaatgatgcctttgatctggaattggacatttctctgtcagagcacagaggaggctcatatcacctcttccctctcctacttggcccagctgcttggaggaccgaccccatggctgagaatatgacggcaagaggaacagagtttgctccaagtgggaaagggtcccaagcagtccagagaagatgtctgtgtggctttccctccctgcctcccccagctcccacactggcctttgtaaataaatggcgtggtctttgttgtga

SEQ ID NO: 27654 - DNA, 3735 bp, Homo sapiens
gaggaggaggagccgggcgggctggcgggcggccgggtggcggcggcggcatggcggagccgagagcggggccgagacgaggccccccattcgggtcaccgtcaagacccccaaggacaaggaggaaattgtgatctgcgatcgagcctcggtcaaggagttcaaagaggaaatctcccggaggtttaaggctcagcaggatcagctggtcctgatcttcgcaggcaagatcctcaaggatggggacacactgaaccagcacggaatcaaggacgggctcactgtccatctggtcatcaagacccctcagaaggctcaagatccagctgctgccactgcttcttccccctccacacctgaccctgcctcagcaccctccaccacgcctgcttcacccgccacccctgcccagccctccacctctggcagtgcctcttcagatgctggcagtggaagccggaggagcagtggtggggggccctctccgggggctggggagggatcccccagtgctactgcgtccatactctctggctttgggggcatcctggggctgggcagcctaggcctgggctctgccaacttcatggagctgcagcagcagatgcagcggcagctgatgtccaatcctgagatgctgtcacagatcatggagaaccccctggtccaggatatgatgtctaaccctgatctgatgcgtcacatgattatggccaacccccagatgcagcagttgatggagcggaaccctgagatcagccacatgctcaataaccctgaactcatgaggcagacaatggagcttgctcggaatccagccatgatgcaagagatgatgcggaaccaggaccgggccctgagcaaccttgagagcatccctggagggtataatgccctccgccgcatgtacacggacatccaggagcccatgttcagtgctgcccgggaacagtttggcaacaatcccttctcttccctggccgggaactccgacagctcatcctcccagcctctgcggactgagaatcgagagcccctccctaacccctggagcccctcgccccccacctcccaggcccccgggtccggtggggagggcaccggaggatcggggaccagccaggtgcacccgacagtctcgaacccctttgggatcaatgcggctagcctggggtcagggatgttcaatagcccagaaatgcaagccctcctccagcagatctctgagaacccccagctgatgcagaatgtgatctcagcaccctacatgcgcagcatgatgcagacgcttgcccagaaccccgactttgctgctcagatgatggtgaatgtgccgctcttcgcggggaacccccaactgcaggagcagctccgcctgcagctcccagtcttcctgcagcagatgcagaacccagagtcactctccatccttaccaatccccgagccatgcaggcattgctgcagatccagcagggactacagaccttgcagaccgaggcccctgggctggtacccaggtgagggtaggggggcaggagggcagcaaggttctagcaacttctccccttcaactcttctctctgccactctctcagcatcctttgtgtctctgagggtctgttttcctgtttcttccaactgcttttccttctggatctcacattctcatccctttcttggatgccatctcctacctcttggtctctcttgcctacagccttggctcctttgggatgtcccggaccccagcaccctcagcaggcagcaacgcagggtctacgcccgaggcccccacttcctcaccagccacgccagccacatcttctccaacaggggcttccagcgcccagcagcaactcatgcagcagatgatccagcttttggctggaagtggaaactcacaggtgcagacgccagaagtgagatttcagcagcagctggagcagctcaactccatgggcttcatcaatcgtgaggctaacctgcaggccctgattgccacaggaggggacatcaacgcagctatcgagagactgctgggctcccagctctcctaatccctcggcccatgcctcctgcctctcccctccctcgatgtcagcattcggttcttctgtcaatccttaccctctgcagcttgtcctcccttccgtcttctccctcatcctttccaaacagcagggtgactttagaggcatgggctccaaccccttagctctgtctgagaattatggttttactgctacgtctctaacagactcttctctcctggtctccttgagcagtgctacttaaacagttttcacagtttcattgattgactctacctccttgccccacaccacttttgcaatctttaaactttcagtggctgtgcagagtcgagggaggaaccagctctctggtttactggaacatagtcttccatctataccactagggttttgtcttatgtttacttttggtaactctcttccttctttttctccctaccccccaacccctagcccaaccaatgctagaatttcttgctctgaaggaggagcaggtgaaacaggtggtaattttccttctcggcccctattctggttcattcagcactttttggtgggaactgttggaaattccagggtaaggaggaagatgcctgttctccctgtctgaagagggagatgagacagctctctggacaggaattaacaaacgctggagcagcccagaggaaattcgtgtgaaagaggagggaatgagattattcggaggaagggaatgggggagacagcctgagtaaaaggcttggaagttggaattaacagtggggagcagaagcactcatagctcttttaggcagaagaatccaggcccgagctggcagaagagacttagagatgctaatggaatttaaactgaaaaaaggagcccaatgaagctaagcgccacgccccacaaggggtcatattggctttagttcctcaagcatatgtgcttatatgcacacacacacacatttccatggacccaggtcttgcttgtgtccccaggcaccagtagtttgagcccccctcaaaagacatgaagggggttggggtctgtgtgagtagtggggaggtgcatgtgtatccacatgtgtgcatacactcttaagttgggtgggaagtggattccttgttggtttctggttcagagtgctctcccaccaccagagacaagtgggtaaaaaggtcagtccattgcaggaatatatatccgggagagctaggtcccttggggctctggatgctgggtaacccagaggtaatgtgggtaccctttctgaagctgtcagggctgtgactagcacccttatcacccctcactgccttgtgggaatagtagagggtttttttcctccagaccccctggcctttcagttcttaactatttccctccaggccagaaagttttctttgaggaaggagaggagagggtggcaatgatgcctttgatctggaattggacatttctctgtcagagcacagaggaggctcatatcacctcttccctctcctacttggcccagctgcttggaggaccgaccccatggctgagaatatgacggcaagaggaacagagtttgctccaagtgggaaagggtcccaagcagtccagagaagatgtctgtgtggctttccctccctgcctcccccagctcccacactggcctttgtaaataaatggcgtggtctttgttgtga

SEQ ID NO: 27655 - DNA, 4497 bp, Homo sapiens
  misc_feature (3765)..(3765): n is a, c, g, or t
ccccaagagtagtagtagtagtagtaccatacgatcgtactgaccacctgtcgtttacccagccctagacatgctgctactgctattccatggatcctaggtcacaccaccttaagcgccggcgcagctgcggcccgcccgcccctcctcctcctcggcccgcccgaccgcccgccggcccaccgccgccgccgtaccgcctcggctcgccccggctctgctccggggggtaagcccagtggcagttctgggggttcctgttcctcctttgcggcggcatggcggagccgagagcggggccgagacgaggccccccattcgggtcaccgtcaagacccccaaggacaaggaggaaattgtgatctgcgatcgagcctcggtcaaggagttcaaagaggaaatctcccggaggtttaaggctcagcaggatcagctggtcctgatcttcgcaggcaagatcctcaaggatggggacacactgaaccagcacggaatcaaggacgggctcactgtccatctggtcatcaagacccctcagaaggctcaagatccagctgctgccactgcttcttccccctccacacctgaccctgcctcagcaccctccaccacgcctgcttcacccgccacccctgcccagccctccacctctggcagtgcctcttcagatgctggcagtggaagccggaggagcagtggtggggggccctctccgggggctggggagggatcccccagtgctactgcgtccatactctctggctttgggggcatcctggggctgggcagcctaggcctgggctctgccaacttcatggagctgcagcagcagatgcagcggcagctgatgtccaatcctgagatgctgtcacagatcatggagaaccccctggtccaggatatgatgtctaaccctgatctgatgcgtcacatgattatggccaacccccagatgcagcagttgatggagcggaaccctgagatcagccacatgctcaataaccctgaactcatgaggcagacaatggagcttgctcggaatccagccatgatgcaagagatgatgcggaaccaggaccgggccctgagcaaccttgagagcatccctggagggtataatgccctccgccgcatgtacacggacatccaggagcccatgttcagtgctgcccgggaacagtttggcaacaatcccttctcttccctggccgggaactccgacagctcatcctcccagcctctgcggactgagaatcgagagcccctccctaacccctggagcccctcgccccccacctcccaggcccccgggtccggtggggagggcaccggaggatcggggaccagccaggtgcacccgacagtctcgaacccctttgggatcaatgcggctagcctggggtcagggatgttcaatagcccagaaatgcaagccctcctccagcagatctctgagaacccccagctgatgcagaatgtgatctcagcaccctacatgcgcagcatgatgcagacgcttgcccagaaccccgactttgctgctcagatgatggtgaatgtgccgctcttcgcggggaacccccaactgcaggagcagctccgcctgcagctcccagtcttcctgcagcagatgcagaacccagagtcactctccatccttaccaatccccgagccatgcaggcattgctgcagatccagcagggactacagaccttgcagaccgaggcccctgggctggtacccagccttggctcctttgggatgtcccggaccccagcaccctcagcaggcagcaacgcagggtctacgcccgaggcccccacttcctcaccagccacgccagccacatcttctccaacaggggcttccagcgcccagcagcaactcatgcagcagatgatccagcttttggctggaagtggaaactcacaggtgcagacgccagaagtgagatttcagcagcagctggagcagctcaactccatgggcttcatcaatcgtgaggctaacctgcaggccctgattgccacaggaggggacatcaacgcagctatcgagagactgctgggctcccagctctcctaatccctcggcccatgcctcctgcctctcccctccctcgatgtcagcattcggttcttctgtcaatccttaccctctgcagcttgtcctcccttccgtcttctccctcatcctttccaaacagcagggtgactttagaggcatgggctccaaccccttagctctgtctgagaattatggttttactgctacgtctctaacagactcttctctcctggtctccttgagcagtgctacttaaacagttttcacagtttcattgattgactctacctccttgccccacaccacttttgcaatctttaaactttcagtggctgtgcagagtcgagggaggaaccagctctctggtttactggaacatagtcttccatctataccactagggttttgtcttatgtttacttttggtaactctcttccttctttttctccctaccccccaacccctagcccaaccaatgctagaatttcttgctctgaaggaggagcaggtgaaacaggtggtaattttccttctcggcccctattctggttcattcagcactttttggtgggaactgttggaaattccagggtaaggaggaagatgcctgttctccctgtctgaagagggagatgagacagctctctggacaggaattaacaaacgctggagcagcccagaggaaattcgtgtgaaagaggagggaatgagattattcggaggaagggaatgggggagacagcctgagtaaaaggcttggaagttggaattaacagtggggagcagaagcactcatagctcttttaggcagaagaatccaggcccgagctggcagaagagacttagagatgctaatggaatttaaactgaaaaaaggagcccaatgaagctaagcgccacgccccacaaggggtcatattggctttagttcctcaagcatatgtgcttatatgcacacacacacacatttccatggacccaggtcttgcttgtgtccccaggcaccagtagtttgagcccccctcaaaagacatgaagggggttggggtctgtgtgagtagtggggaggtgcatgtgtatccacatgtgtgcatacactcttaagttgggtgggaagtggattccttgttggtttctggttcagagtgctctcccaccaccagagacaagtgggtaaaaaggtcagtccattgcaggaatatatatccgggagagctaggtcccttggggctctggatgctgggtaacccagaggtaatgtgggtaccctttctgaagctgtcagggctgtgactagcacccttatcacccctcactgccttgtgggaatagtagagggtttttttcctccagaccccctggcctttcagttcttaactatttccctccaggccagaaagttttctttgaggaaggagaggagagggtggcaatgatgcctttgatctggaattggacatttctctgtcagagcacagaggaggctcatatcacctcttccctctcctacttggcccagctgcttggaggaccgaccccatggctgagaatatgacggcaagaggaacagagtttgctccaagtgggaaagggtcccaagcagtccagagaagatgtctgtgtggctttccctccctgcctcccccagctcccacactggcctttgtaaataaatggcgtggtctttgttgtgaanaaaaaaaaaaaagaaaaaaaaaaaaaaaaaaaaaaaaaaagcggagaagatttcccccagggggggacagggggagagggggggaaagggagaaaagggggccaccgaccacaattaaccggcggggaaaagggcgcgccaaaggaacacatattggggcgcagcctacagttggaacttggcgggaccacaaaaagagagtgggacaccatcacgcagtgggcgagagataaacgtggtcatggccctggtcggaaacccccaacggacgggggagaaacaacggcgtgaggcaacccaaatcacgcggcgcgacaaaataacagcgcacccgcacagagaatgaagacaacccgaccacacgggcgtaggaacccctgggacttaaaacagcgacgccaaagaggggcgtcaggccagtgaaccaagcaacacctgtggagctcataccacgcacagggctgtcgccagccaagggggtgcgcaaattatggggtcccaaaaagagaggcacagcgacaactcaacagaacaccactaccgcggggcgagcgcgcaccccccggggcggggaacccatctgggcaccacgatgaaaccaaagagtcccgccggtgttggcaacgggaattcctggcgccacgaaagacgcgcaggccagtgcacagagacaaccagtgggagagaacggccaccacataggggcagaacgccgggagggtggccaggggc

SEQ ID NO: 27656 - DNA, 3341 bp, Homo sapiens
gaggaggaggagccgggcgggctggcgggcggccgggtggcggcggcggcatggcggagccgagagcggggccgagacgaggccccccattcgggtcaccgtcaagacccccaaggacaaggaggaaattgtgatctgcgatcgagcctcggtcaaggagttcaaagaggaaatctcccggaggtttaaggctcagcaggatcagctggtcctgatcttcgcaggcaagatcctcaaggatggggacacactgaaccagcacggaatcaaggacgggctcactgtccatctggtcatcaagacccctcagaaggctcaagatccagctgctgccactgcttcttccccctccacacctgaccctgcctcagcaccctccaccacgcctgcttcacccgccacccctgcccagccctccacctctggcagtgcctcttcagatgctggcagtggaagccggaggagcagtggtggggggccctctccgggggctggggagggatcccccagtgctactgcgtccatactctatgcagcagttgatggagcggaaccctgagatcagccacatgctcaataaccctgaactcatgaggcagacaatggagcttgctcggaatccagccatgatgcaagagatgatgcggaaccaggaccgggccctgagcaaccttgagagcatccctggagggtataatgccctccgccgcatgtacacggacatccaggagcccatgttcagtgctgcccgggaacagtttggcaacaatcccttctcttccctggccgggaactccgacagctcatcctcccagcctctgcggactgagaatcgagagcccctccctaacccctggagcccctcgccccccacctcccaggcccccgggtccggtggggagggcaccggaggatcggggaccagccaggtgcacccgacagtctcgaacccctttgggatcaatgcggctagcctggggtcagggatgttcaatagcccagaaatgcaagccctcctccagcagatctctgagaacccccagctgatgcagaatgtgatctcagcaccctacatgcgcagcatgatgcagacgcttgcccagaaccccgactttgctgctcagatgatggtgaatgtgccgctcttcgcggggaacccccaactgcaggagcagctccgcctgcagctcccagtcttcctgcagcagatgcagaacccagagtcactctccatccttaccaatccccgagccatgcaggcattgctgcagatccagcagggactacagaccttgcagaccgaggcccctgggctggtacccagccttggctcctttgggatgtcccggaccccagcaccctcagcaggcagcaacgcagggtctacgcccgaggcccccacttcctcaccagccacgccagccacatcttctccaacaggggcttccagcgcccagcagcaactcatgcagcagatgatccagcttttggctggaagtggaaactcacaggtgcagacgccagaagtgagatttcagcagcagctggagcagctcaactccatgggcttcatcaatcgtgaggctaacctgcaggccctgattgccacaggaggggacatcaacgcagctatcgagagactgctgggctcccagctctcctaatccctcggcccatgcctcctgcctctcccctccctcgatgtcagcattcggttcttctgtcaatccttaccctctgcagcttgtcctcccttccgtcttctccctcatcctttccaaacagcagggtgactttagaggcatgggctccaaccccttagctctgtctgagaattatggttttactgctacgtctctaacagactcttctctcctggtctccttgagcagtgctacttaaacagttttcacagtttcattgattgactctacctccttgccccacaccacttttgcaatctttaaactttcagtggctgtgcagagtcgagggaggaaccagctctctggtttactggaacatagtcttccatctataccactagggttttgtcttatgtttacttttggtaactctcttccttctttttctccctaccccccaacccctagcccaaccaatgctagaatttcttgctctgaaggaggagcaggtgaaacaggtggtaattttccttctcggcccctattctggttcattcagcactttttggtgggaactgttggaaattccagggtaaggaggaagatgcctgttctccctgtctgaagagggagatgagacagctctctggacaggaattaacaaacgctggagcagcccagaggaaattcgtgtgaaagaggagggaatgagattattcggaggaagggaatgggggagacagcctgagtaaaaggcttggaagttggaattaacagtggggagcagaagcactcatagctcttttaggcagaagaatccaggcccgagctggcagaagagacttagagatgctaatggaatttaaactgaaaaaaggagcccaatgaagctaagcgccacgccccacaaggggtcatattggctttagttcctcaagcatatgtgcttatatgcacacacacacacatttccatggacccaggtcttgcttgtgtccccaggcaccagtagtttgagcccccctcaaaagacatgaagggggttggggtctgtgtgagtagtggggaggtgcatgtgtatccacatgtgtgcatacactcttaagttgggtgggaagtggattccttgttggtttctggttcagagtgctctcccaccaccagagacaagtgggtaaaaaggtcagtccattgcaggaatatatatccgggagagctaggtcccttggggctctggatgctgggtaacccagaggtaatgtgggtaccctttctgaagctgtcagggctgtgactagcacccttatcacccctcactgccttgtgggaatagtagagggtttttttcctccagaccccctggcctttcagttcttaactatttccctccaggccagaaagttttctttgaggaaggagaggagagggtggcaatgatgcctttgatctggaattggacatttctctgtcagagcacagaggaggctcatatcacctcttccctctcctacttggcccagctgcttggaggaccgaccccatggctgagaatatgacggcaagaggaacagagtttgctccaagtgggaaagggtcccaagcagtccagagaagatgtctgtgtggctttccctccctgcctcccccagctcccacactggcctttgtaaataaatggcgtggtctttgttgtga

SEQ ID NO: 27657 - DNA, 2519 bp, Homo sapiens
cacgttaagtgcttagaacatggcgtgtgacagagtaagttctgtatacctggaaatgttagctgtcctcatcatcatcagacccagggctgagcaggctgactcctcatactcttcattacccagagcatagttccatttcctctcactgtcccacttaggccttcaggatactttgagatccccggagaagctggccagatttcctgcagtggtagggggtgcccagggagtctgaggctgtgggggaattcttagggtgaaaaggcccaggtctccccctgctaccttcaccctggcagatgatggtgaatgtgccgctcttcgcggggaacccccaactgcaggagcagctccgcctgcagctcccagtcttcctgcagcagatgcagaacccagagtcactctccatccttaccaatccccgagccatgcaggcattgctgcagatccagcagggactacagaccttgcagaccgaggcccctgggctggtacccagccttggctcctttgggatgtcccggaccccagcaccctcagcaggcagcaacgcagggtctacgcccgaggcccccacttcctcaccagccacgccagccacatcttctccaacaggggcttccagcgcccagcagcaactcatgcagcagatgatccagcttttggctggaagtggaaactcacaggtgcagacgccagaagtgagatttcagcagcagctggagcagctcaactccatgggcttcatcaatcgtgaggctaacctgcaggccctgattgccacaggaggggacatcaacgcagctatcgagagactgctgggctcccagctctcctaatccctcggcccatgcctcctgcctctcccctccctcgatgtcagcattcggttcttctgtcaatccttaccctctgcagcttgtcctcccttccgtcttctccctcatcctttccaaacagcagggtgactttagaggcatgggctccaaccccttagctctgtctgagaattatggttttactgctacgtctctaacagactcttctctcctggtctccttgagcagtgctacttaaacagttttcacagtttcattgattgactctacctccttgccccacaccacttttgcaatctttaaactttcagtggctgtgcagagtcgagggaggaaccagctctctggtttactggaacatagtcttccatctataccactagggttttgtcttatgtttacttttggtaactctcttccttctttttctccctaccccccaacccctagcccaaccaatgctagaatttcttgctctgaaggaggagcaggtgaaacaggtggtaattttccttctcggcccctattctggttcattcagcactttttggtgggaactgttggaaattccagggtaaggaggaagatgcctgttctccctgtctgaagagggagatgagacagctctctggacaggaattaacaaacgctggagcagcccagaggaaattcgtgtgaaagaggagggaatgagattattcggaggaagggaatgggggagacagcctgagtaaaaggcttggaagttggaattaacagtggggagcagaagcactcatagctcttttaggcagaagaatccaggcccgagctggcagaagagacttagagatgctaatggaatttaaactgaaaaaaggagcccaatgaagctaagcgccacgccccacaaggggtcatattggctttagttcctcaagcatatgtgcttatatgcacacacacacacatttccatggacccaggtcttgcttgtgtccccaggcaccagtagtttgagcccccctcaaaagacatgaagggggttggggtctgtgtgagtagtggggaggtgcatgtgtatccacatgtgtgcatacactcttaagttgggtgggaagtggattccttgttggtttctggttcagagtgctctcccaccaccagagacaagtgggtaaaaaggtcagtccattgcaggaatatatatccgggagagctaggtcccttggggctctggatgctgggtaacccagaggtaatgtgggtaccctttctgaagctgtcagggctgtgactagcacccttatcacccctcactgccttgtgggaatagtagagggtttttttcctccagaccccctggcctttcagttcttaactatttccctccaggccagaaagttttctttgaggaaggagaggagagggtggcaatgatgcctttgatctggaattggacatttctctgtcagagcacagaggaggctcatatcacctcttccctctcctacttggcccagctgcttggaggaccgaccccatggctgagaatatgacggcaagaggaacagagtttgctccaagtgggaaagggtcccaagcagtccagagaagatgtctgtgtggctttccctccctgcctcccccagctcccacactggcctttgtaaataaatggcgtggtctttgttgtga

SEQ ID NO: 27658 - DNA, 2539 bp, Homo sapiens
gaggaggaggagccgggcgggctggcgggcggccgggtggcggcggcggcatggcggagccgagagcggggccgagacgaggccccccattcgggtcaccgtcaagacccccaaggacaaggaggaaattgtgatctgcgatcgagcctcggtcaaggagttcaaagaggaaatctcccggaggtttaaggctcagcaggatcagctggtcctgatcttcgcaggcaagatcctcaaggatggggacacactgaaccagcacggaatcaaggacgggctcactgtccatctggtcatcaagacccctcagaaggctcaagatccagctgctgccactgcttcttccccctccacacctgaccctgcctcagcaccctccaccacgcctgcttcacccgccacccctgcccagccctccacctctggcagtgcctcttcagatgctggcagtggaagccggaggagcagtggtggggggccctctccgggggctggggagggatcccccagtgctactgcgtccatactctctggctttgggggcatcctggggctgggcagcctaggcctgggctctgccaacttcatggagctgcagcagcagatgcagcggcagctgatgtccaatcctgagatgctgtcacagatcatggagaaccccctggtccaggatatgatgtctaaccctgatctgatgcgtcacatgattatggccaacccccagatgcagcagttgatggagcggaaccctgagatcagccacatgctcaataaccctgaactcatgaggcagacaatggagcttgctcggaatccagccatgatgcaagagatgatgcggaaccaggaccgggccctgagcaaccttgagagcatccctggagggtataatgccctccgccgcatgtacacggacatccaggagcccatgttcagtgctgcccgggaacagtttggcaacaatcccttctcttccctggccgggaactccgacagctcatcctcccagcctctgcggactgagaatcgagagcccctccctaacccctggagcccctcgccccccacctcccaggcccccgggtccggtggggagggcaccggaggatcggggaccagccaggtgcacccgacagtctcgaacccctttgggatcaatgcggctagcctggggtcagggatgttcaatagcccagaaatgcaagccctcctccagcagatctctgagaacccccagctgatgcagaatgtgatctcagcaccctacatgcgcagcatgatgcagacgcttgcccagaaccccgactttgctgctcagatgatggtgaatgtgccgctcttcgcggggaacccccaactgcaggagcagctccgcctgcagctcccagtcttcctgcagcagatgcagaacccagagtcactctccatccttaccaatccccgagccatgcaggcattgctgcagatccagcagggactacagaccttgcagaccgaggcccctgggctggtacccagccttggctcctttgggatgtcccggaccccagcaccctcagcaggcagcaacgcagggtctacgcccgaggcccccacttcctcaccagccacgccagccacatcttctccaacaggggcttccagcgcccagcagcaactcatgcagcagatgatccagcttttggctggaagtggaaactcacaggtgcagacgccagaagtgagatttcagcagcagctggagcagctcaactccatgggcttcatcaatcgtgaggctaacctgcaggccctgattgccacaggaggggacatcaacgcagctatcgagagactgctgggctcccagctctcctaatccctcggcccatgcctcctgcctctcccctccctcgatgtcagcattcggttcttctgtcaatccttaccctctgcagcttgtcctcccttccgtcttctccctcatcctttccaaacagcagggtgactttagaggcatgggctccaaccccttagctctgtctgagaattatggttttactgctacgtctctaacagactcttctctcctggtctccttgagcagtgctacttaaacagttttcacagtttcattgattgactctacctccttgccccacaccacttttgcaatctttaaactttcagtggctgtgcagagtcgagggaggaaccagctctctggtttactggaacatagtcttccatctataccactagggttttgtcttatgtttacttttggtaactctcttccttctttttctccctaccccccaacccctagcccaaccaatgctagaatttcttgctctgaaggaggagcaggtgaaacaggtggtaattttccttctcggcccctattctggttcattcagcactttttggtgggaactgtgtgcgcaatttcacgagctctggagagcaagataccactacgaccagggacacacgggcatatcgttttactctggaaccagctataacatgatacggattcactgcctcgtttacactg

SEQ ID NO: 27659 - DNA, 516 bp, Homo sapiens
gaggaggaggagccgggcgggctggcgggcggccgggtggcggcggcggcatggcggagccgagagcggggccgagacgaggccccccattcgggtcaccgtcaagacccccaaggacaaggaggaaattgtgatctgcgatcgagcctcggtcaaggagttcaaagaggaaatctcccggaggtttaaggctcagcaggatcagctggtcctgatcttcgcaggcaagatcctcaaggatggggacacactgaaccagcacggaatcaaggacgggctcactgtccatctggtcatcaagacccctcagaaggctcaagatccagctgctgccactgcttcttccccctccacacctgaccctgcctcagcaccctccaccacgcctgcttcacccgccacccctgcggcagctcccctgctctcaggtttttgaggaaacaaagatttgtggtaactgaaggtgttgggtcagtggccaggtgccgacactgagctgtgacccagaggggacgc

SEQ ID NO: 27660 - DNA, 1923 bp, Homo sapiens
  misc_feature (1651)..(1651): n is a, c, g, or t
  misc_feature (1656)..(1656): n is a, c, g, or t
  misc_feature (1660)..(1660): n is a, c, g, or t
  misc_feature (1668)..(1668): n is a, c, g, or t
  misc_feature (1676)..(1676): n is a, c, g, or t
  misc_feature (1681)..(1681): n is a, c, g, or t
  misc_feature (1701)..(1701): n is a, c, g, or t
  misc_feature (1713)..(1713): n is a, c, g, or t
  misc_feature (1751)..(1751): n is a, c, g, or t
  misc_feature (1753)..(1753): n is a, c, g, or t
  misc_feature (1762)..(1763): n is a, c, g, or t
  misc_feature (1777)..(1778): n is a, c, g, or t
  misc_feature (1788)..(1788): n is a, c, g, or t
  misc_feature (1801)..(1801): n is a, c, g, or t
  misc_feature (1808)..(1809): n is a, c, g, or t
  misc_feature (1812)..(1812): n is a, c, g, or t
  misc_feature (1816)..(1816): n is a, c, g, or t
  misc_feature (1821)..(1821): n is a, c, g, or t
  misc_feature (1839)..(1839): n is a, c, g, or t
gaggaggaggagccgggcgggctggcgggcggccgggtggcggcggcggcatggcggagccgagagcggggccgagacgaggccccccattcgggtcaccgtcaagacccccaaggacaaggaggaaattgtgatctgcgatcgagcctcggtcaaggagttcaaagaggaaatctcccggaggtttaaggctcagcaggatcagctggtcctgatcttcgcaggcaagatcctcaaggatggggacacactgaaccagcacggaatcaaggacgggctcactgtccatctggtcatcaagacccctcagaaggctcaagatccagctgctgccactgcttcttccccctccacacctgaccctgcctcagcaccctccaccacgcctgcttcacccgccacccctgcccagccctccacctctggcagtgcctcttcagatgctggcagtggaagccggaggagcagtggtggggggccctctccgggggctggggagggatcccccagtgctactgcgtccatactctctggctttgggggcatcctggggctgggcagcctaggcctgggctctgccaacttcatggagctgcagcagcagatgcagcggcagctgatgtccaatcctgagatgctgtcacagatcatggagaaccccctggtccaggatatgatgtctaaccctgatctgatgcgtcacatgattatggccaacccccagatgcagcagttgatggagcggaaccctgagatcagccacatgctcaataaccctgaactcatgaggcagacaatggagcttgctcggaatccagccatgatgcaagagatgatgcggaaccaggaccctgaatctctgctcagggctgactcgtgggcagagaaggaagaatgtggggaacaacctgccctccactccaaccctccacagccatactgtatgactgtaacctacttttatttatgttttaagacatacagggcatcacactgaaaaggagctgtgatctgagggtcaggagtgtgggcctgggtaccagcactgccactgacttgcctctctctcagccttagttgccccttcactgaagacctttccagctttggtgatctacgattctatcacagcaagcaacaggaagacagagcatcatgctaggcacataagaagcttttaaaatactggttaaattgagatcaccacaccaggggaatagtgtccaagtcatgctccagctcctttcccctcttagggatcttggactagaaaaggccaaactttgtttatttcttaaaacttgaatctgagttcacagaaagtaagtgctgtactttattgactacctcttccacaggagaacccagcacaggtcacagtggcttatcctgtaatcctagcactttgggaggctgaggtgggcagatcacctgaggtcaggagtttgagaccagcctggccaacatggcgaaaccccatctctactaaaaatacaaaaaaaggctgggcgtggtggctcacgcttctaatcccagcactttgggaggccaaagcagacggatcacctgaggtcaggagttcaagaccagcctggccaacatggcgaaaccttgtctctactaaaatataaaaaattagctgggggaagcngaggngggnggatcacnaggtcagnagatngagaccatcctggctaacanggtgaaaccccntctctactaaaaatacaaaaaattagccaggcgtggtngnaggtgcctnnagtcccagctactnnggaggctgangcaggagaatggngtgaacnnggnaggnggagnttgcagtgagccaagatngcgccactgcactccagcctgggtgacagagcgagactccgtctcaaaaaaaaaaaaaaaaaaaaaatgtgtggactgtgataa

SEQ ID NO: 27661 - DNA, 3471 bp, Homo sapiens
gaggaggaggagccgggcgggctggcgggcggccgggtggcggcggcggcatggcggagccgagagcggggccgagacgaggccccccattcgggtcaccgtcaagacccccaaggacaaggaggaaattgtgatctgcgatcgagcctcggtcaaggaggcaagatcctcaaggatggggacacactgaaccagcacggaatcaaggacgggctcactgtccatctggtcatcaagacccctcagaaggctcaagatccagctgctgccactgcttcttccccctccacacctgaccctgcctcagcaccctccaccacgcctgcttcacccgccacccctgcccagccctccacctctggcagtgcctcttcagatgctggcagtggaagccggaggagcagtggtggggggccctctccgggggctggggagggatcccccagtgctactgcgtccatactctctggctttgggggcatcctggggctgggcagcctaggcctgggctctgccaacttcatggagctgcagcagcagatgcagcggcagctgatgtccaatcctgagatgctgtcacagatcatggagaaccccctggtccaggatatgatgtctaaccctgatctgatgcgtcacatgattatggccaacccccagatgcagcagttgatggagcggaaccctgagatcagccacatgctcaataaccctgaactcatgaggcagacaatggagcttgctcggaatccagccatgatgcaagagatgatgcggaaccaggaccgggccctgagcaaccttgagagcatccctggagggtataatgccctccgccgcatgtacacggacatccaggagcccatgttcagtgctgcccgggaacagtttggcaacaatcccttctcttccctggccgggaactccgacagctcatcctcccagcctctgcggactgagaatcgagagcccctccctaacccctggagcccctcgccccccacctcccaggcccccgggtccggtggggagggcaccggaggatcggggaccagccaggtgcacccgacagtctcgaacccctttgggatcaatgcggctagcctggggtcagggatgttcaatagcccagaaatgcaagccctcctccagcagatctctgagaacccccagctgatgcagaatgtgatctcagcaccctacatgcgcagcatgatgcagacgcttgcccagaaccccgactttgctgctcagatgatggtgaatgtgccgctcttcgcggggaacccccaactgcaggagcagctccgcctgcagctcccagtcttcctgcagcagatgcagaacccagagtcactctccatccttaccaatccccgagccatgcaggcattgctgcagatccagcagggactacagaccttgcagaccgaggcccctgggctggtacccagccttggctcctttgggatgtcccggaccccagcaccctcagcaggcagcaacgcagggtctacgcccgaggcccccacttcctcaccagccacgccagccacatcttctccaacaggggcttccagcgcccagcagcaactcatgcagcagatgatccagcttttggctggaagtggaaactcacaggtgcagacgccagaagtgagatttcagcagcagctggagcagctcaactccatgggcttcatcaatcgtgaggctaacctgcaggccctgattgccacaggaggggacatcaacgcagctatcgagagactgctgggctcccagctctcctaatccctcggcccatgcctcctgcctctcccctccctcgatgtcagcattcggttcttctgtcaatccttaccctctgcagcttgtcctcccttccgtcttctccctcatcctttccaaacagcagggtgactttagaggcatgggctccaaccccttagctctgtctgagaattatggttttactgctacgtctctaacagactcttctctcctggtctccttgagcagtgctacttaaacagttttcacagtttcattgattgactctacctccttgccccacaccacttttgcaatctttaaactttcagtggctgtgcagagtcgagggaggaaccagctctctggtttactggaacatagtcttccatctataccactagggttttgtcttatgtttacttttggtaactctcttccttctttttctccctaccccccaacccctagcccaaccaatgctagaatttcttgctctgaaggaggagcaggtgaaacaggtggtaattttccttctcggcccctattctggttcattcagcactttttggtgggaactgttggaaattccagggtaaggaggaagatgcctgttctccctgtctgaagagggagatgagacagctctctggacaggaattaacaaacgctggagcagcccagaggaaattcgtgtgaaagaggagggaatgagattattcggaggaagggaatgggggagacagcctgagtaaaaggcttggaagttggaattaacagtggggagcagaagcactcatagctcttttaggcagaagaatccaggcccgagctggcagaagagacttagagatgctaatggaatttaaactgaaaaaaggagcccaatgaagctaagcgccacgccccacaaggggtcatattggctttagttcctcaagcatatgtgcttatatgcacacacacacacatttccatggacccaggtcttgcttgtgtccccaggcaccagtagtttgagcccccctcaaaagacatgaagggggttggggtctgtgtgagtagtggggaggtgcatgtgtatccacatgtgtgcatacactcttaagttgggtgggaagtggattccttgttggtttctggttcagagtgctctcccaccaccagagacaagtgggtaaaaaggtcagtccattgcaggaatatatatccgggagagctaggtcccttggggctctggatgctgggtaacccagaggtaatgtgggtaccctttctgaagctgtcagggctgtgactagcacccttatcacccctcactgccttgtgggaatagtagagggtttttttcctccagaccccctggcctttcagttcttaactatttccctccaggccagaaagttttctttgaggaaggagaggagagggtggcaatgatgcctttgatctggaattggacatttctctgtcagagcacagaggaggctcatatcacctcttccctctcctacttggcccagctgcttggaggaccgaccccatggctgagaatatgacggcaagaggaacagagtttgctccaagtgggaaagggtcccaagcagtccagagaagatgtctgtgtggctttccctccctgcctcccccagctcccacactggcctttgtaaataaatggcgtggtctttgttgtga

SEQ ID NO: 27662 - DNA, 3838 bp, Homo sapiens
ccccaagagtagtagtagtagtagtaccatacgatcgtactgaccacctgtcgtttacccagccctagacatgctgctactgctattccatggatcctaggtcacaccaccttaagcgccggcgcagctgcggcccgcccgcccctcctcctcctcggcccgcccgaccgcccgccggcccaccgccgccgccgtaccgcctcggctcgccccggctctgctccggggggtaagcccagtggcagttctgggggttcctgttcctcctttgcggcggcatggcggagccgagagcggggccgagacgaggccccccattcgggtcaccgtcaagacccccaaggacaaggaggaaattgtgatctgcgatcgagcctcggtcaaggagttcaaagaggaaatctcccggaggtttaaggctcagcaggatcagctggtcctgatcttcgcaggcaagatcctcaaggatggggacacactgaaccagcacggaatcaaggacgggctcactgtccatctggtcatcaagacccctcagaaggctcaagatccagctgctgccactgcttcttccccctccacacctgaccctgcctcagcaccctccaccacgcctgcttcacccgccacccctgcccagccctccacctctggcagtgcctcttcagatgctggcagtggaagccggaggagcagtggtggggggccctctccgggggctggggagggatcccccagtgctactgcgtccatactctctggctttgggggcatcctggggctgggcagcctaggcctgggctctgccaacttcatggagctgcagcagcagatgcagcggcagctgatgtccaatcctgagatgctgtcacagatcatggagaaccccctggtccaggatatgatgtctaaccctgatctgatgcgtcacatgattatggccaacccccagatgcagcagttgatggagcggaaccctgagatcagccacatgctcaataaccctgaactcatgaggcagacaatggagcttgctcggaatccagccatgatgcaagagatgatgcggaaccaggaccgggccctgagcaaccttgagagcatccctggagggtataatgccctccgccgcatgtacacggacatccaggagcccatgttcagtgctgcccgggaacagtttggcaacaatcccttctcttccctggccgggaactccgacagctcatcctcccagcctctgcggactgagaatcgagagcccctccctaacccctggagcccctcgccccccacctcccaggcccccgggtccggtggggagggcaccggaggatcggggaccagccaggtgcacccgacagtctcgaacccctttgggatcaatgcggctagcctggggtcagggatgttcaatagcccagaaatgcaagccctcctccagcagatctctgagaacccccagctgatgcagaatgtgatctcagcaccctacatgcgcagcatgatgcagacgcttgcccagaaccccgactttgctgctcagatgatggtgaatgtgccgctcttcgcggggaacccccaactgcaggagcagctccgcctgcagctcccagtcttcctgcagcagatgcagaacccagagtcactctccatccttaccaatccccgagccatgcaggcattgctgcagatccagcagggactacagaccttgcagaccgaggcccctgggctggtacccagccttggctcctttgggatgtcccggaccccagcaccctcagcaggcagcaacgcagggtctacgcccgaggcccccacttcctcaccagccacgccagccacatcttctccaacaggggcttccagcgcccagcagcaactcatgcagcagatgatccagcttttggctggaagtggaaactcacaggtgcagacgccagaagtgagatttcagcagcagctggagcagctcaactccatgggcttcatcaatcgtgaggctaacctgcaggccctgattgccacaggaggggacatcaacgcagctatcgagagactgctgggctcccagctctcctaatccctcggcccatgcctcctgcctctcccctccctcgatgtcagcattcggttcttctgtcaatccttaccctctgcagcttgtcctcccttccgtcttctccctcatcctttccaaacagcagggtgactttagaggcatgggctccaaccccttagctctgtctgagaattatggttttactgctacgtctctaacagactcttctctcctggtctccttgagcagtgctacttaaacagttttcacagtttcattgattgactctacctccttgccccacaccacttttgcaatctttaaactttcagtggctgtgcagagtcgagggaggaaccagctctctggtttactggaacatagtcttccatctataccactagggttttgtcttatgtttacttttggtaactctcttccttctttttctccctaccccccaacccctagcccaaccaatgctagaatttcttgctctgaaggaggagcaggtgaaacaggtggtaattttccttctcggcccctattctggttcattcagcactttttggtgggaactgttggaaattccagggtaaggaggaagatgcctgttctccctgtctgaagagggagatgagacagctctctggacaggaattaacaaacgctggagcagcccagaggaaattcgtgtgaaagaggagggaatgagattattcggaggaagggaatgggggagacagcctgagtaaaaggcttggaagttggaattaacagtggggagcagaagcactcatagctcttttaggcagaagaatccaggcccgagctggcagaagagacttagagatgctaatggaatttaaactgaaaaaaggagcccaatgaagctaagcgccacgccccacaaggggtcatattggctttagttcctcaagcatatgtgcttatatgcacacacacacacatttccatggacccaggtcttgcttgtgtccccaggcaccagtagtttgagcccccctcaaaagacatgaagggggttggggtctgtgtgagtagtggggaggtgcatgtgtatccacatgtgtgcatacactcttaagttgggtgggaagtggattccttgttggtttctggttcagagtgctctcccaccaccagagacaagtgggtaaaaaggtcagtccattgcaggaatatatatccgggagagctaggtcccttggggctctggatgctgggtaacccagaggtaatgtgggtaccctttctgaagctgtcagggctgtgactagcacccttatcacccctcactgccttgtgggaatagtagagggtttttttcctccagaccccctggcctttcagttcttaactatttccctccaggccagaaagttttctttgaggaaggagaggagagggtggcaatgatgcctttgatctggaattggacatttctctgtcagagcacagaggaggctcatatcacctcttccctctcctacttggcccagctgcttggaggaccgaccccatggctgagaatatgacggcaagaggaacagagtttgctccaagtgggaaagggtcccaagcagtccagagaagatgtctgtgtggctttccctccctgcctcccccagctcccacactggcctttgtaaataaatggcgtggtctttgttgtgaacacacacacaggacgcacaaaacacacgaaggacaaagaaagagagaaaaaaaagggtgttttcgtgggcaaaa

SEQ ID NO: 27663 - DNA, 3073 bp, Homo sapiens
gaggaggaggagccgggcgggctggcgggcggccgggtggcggcggcggcatggcggagccgagagcggggccgagacgaggccccccattcgggtcaccgtcaagacccccaaggacaaggaggaaattgtgatctgcgatcgagcctcggtcaaggagtccaatcctgagatgctgtcacagatcatggagaaccccctggtccaggatatgatgtctaaccctgatctgatgcgtcacatgattatggccaacccccagatgcagcagttgatggagcggaaccctgagatcagccacatgctcaataaccctgaactcatgaggcagacaatggagcttgctcggaatccagccatgatgcaagagatgatgcggaaccaggaccgggccctgagcaaccttgagagcatccctggagggtataatgccctccgccgcatgtacacggacatccaggagcccatgttcagtgctgcccgggaacagtttggcaacaatcccttctcttccctggccgggaactccgacagctcatcctcccagcctctgcggactgagaatcgagagcccctccctaacccctggagcccctcgccccccacctcccaggcccccgggtccggtggggagggcaccggaggatcggggaccagccaggtgcacccgacagtctcgaacccctttgggatcaatgcggctagcctggggtcagggatgttcaatagcccagaaatgcaagccctcctccagcagatctctgagaacccccagctgatgcagaatgtgatctcagcaccctacatgcgcagcatgatgcagacgcttgcccagaaccccgactttgctgctcagatgatggtgaatgtgccgctcttcgcggggaacccccaactgcaggagcagctccgcctgcagctcccagtcttcctgcagcagatgcagaacccagagtcactctccatccttaccaatccccgagccatgcaggcattgctgcagatccagcagggactacagaccttgcagaccgaggcccctgggctggtacccagccttggctcctttgggatgtcccggaccccagcaccctcagcaggcagcaacgcagggtctacgcccgaggcccccacttcctcaccagccacgccagccacatcttctccaacaggggcttccagcgcccagcagcaactcatgcagcagatgatccagcttttggctggaagtggaaactcacaggtgcagacgccagaagtgagatttcagcagcagctggagcagctcaactccatgggcttcatcaatcgtgaggctaacctgcaggccctgattgccacaggaggggacatcaacgcagctatcgagagactgctgggctcccagctctcctaatccctcggcccatgcctcctgcctctcccctccctcgatgtcagcattcggttcttctgtcaatccttaccctctgcagcttgtcctcccttccgtcttctccctcatcctttccaaacagcagggtgactttagaggcatgggctccaaccccttagctctgtctgagaattatggttttactgctacgtctctaacagactcttctctcctggtctccttgagcagtgctacttaaacagttttcacagtttcattgattgactctacctccttgccccacaccacttttgcaatctttaaactttcagtggctgtgcagagtcgagggaggaaccagctctctggtttactggaacatagtcttccatctataccactagggttttgtcttatgtttacttttggtaactctcttccttctttttctccctaccccccaacccctagcccaaccaatgctagaatttcttgctctgaaggaggagcaggtgaaacaggtggtaattttccttctcggcccctattctggttcattcagcactttttggtgggaactgttggaaattccagggtaaggaggaagatgcctgttctccctgtctgaagagggagatgagacagctctctggacaggaattaacaaacgctggagcagcccagaggaaattcgtgtgaaagaggagggaatgagattattcggaggaagggaatgggggagacagcctgagtaaaaggcttggaagttggaattaacagtggggagcagaagcactcatagctcttttaggcagaagaatccaggcccgagctggcagaagagacttagagatgctaatggaatttaaactgaaaaaaggagcccaatgaagctaagcgccacgccccacaaggggtcatattggctttagttcctcaagcatatgtgcttatatgcacacacacacacatttccatggacccaggtcttgcttgtgtccccaggcaccagtagtttgagcccccctcaaaagacatgaagggggttggggtctgtgtgagtagtggggaggtgcatgtgtatccacatgtgtgcatacactcttaagttgggtgggaagtggattccttgttggtttctggttcagagtgctctcccaccaccagagacaagtgggtaaaaaggtcagtccattgcaggaatatatatccgggagagctaggtcccttggggctctggatgctgggtaacccagaggtaatgtgggtaccctttctgaagctgtcagggctgtgactagcacccttatcacccctcactgccttgtgggaatagtagagggtttttttcctccagaccccctggcctttcagttcttaactatttccctccaggccagaaagttttctttgaggaaggagaggagagggtggcaatgatgcctttgatctggaattggacatttctctgtcagagcacagaggaggctcatatcacctcttccctctcctacttggcccagctgcttggaggaccgaccccatggctgagaatatgacggcaagaggaacagagtttgctccaagtgggaaagggtcccaagcagtccagagaagatgtctgtgtggctttccctccctgcctcccccagctcccacactggcctttgtaaataaatggcgtggtctttgttgtga

SEQ ID NO: 27664 - DNA, 3475 bp, Homo sapiens
gaggaggaggagccgggcgggctggcgggcggccgggtggcggcggcggcatggcggagccgagagcggggccgagacgaggccccccattcgggtcaccgtcaagacccccaaggacaaggaggaaattgtgatctgcgatcgagcctcggtcaaggagttcaaagaggaaatctcccggaggtttaaggctcagcaggatcagctggtcctgatcttcgcaggcaagatcctcaaggatggggacacactgaaccagcacggaatcaaggacgggctcactgtccatctggtcatcaagacccctcagaaggctcaagatccagctgctgccactgcttcttccccctccacacctgaccctgcctcagcaccctccaccacgcctgcttcacccgccacccctgcccagccctccacctctggcagtgcctcttcagatgctggcagtggaagccggaggagcagtggtggggggccctctccgggggctggggagggatcccccagtgctactgcgtccatactctctggctttgggggcatcctggggctgggcagcctaggcctgggctctgccaacttcatggagctgcagcagcagatgcagcggcagctgatgtccaatcctgagatgctgtcacagatcatggagaaccccctggtccaggatatgatgtctaaccctgatctgatgcgtcacatgattatggccaacccccagatgcagcagttgatggagcggaaccctgagatcagccacatgctcaataaccctgaactcatgaggcagacaatggagcttgctcggaatccagccatgatgcaagagatgatgcggaaccaggaccgggccctgagcaaccttgagagcatccctggagggtataatgccctccgccgcatgtacacggacatccaggagcccatgttcagtgctgcccgggaacagtttggcaacaatcccttctcttccctggccgggaactccgacagctcatcctcccagcctctgcggactgagaatcgagagcccctccctaacccctggagcccctcgccccccacctcccaggcccccgggtccggtggggagggcaccggaggatcggggaccagccaggtgcacccgacagtctcgaacccctttgggatcaatgcggctagcctggggtcagggatgttcaatagcccagaaatgcaagccctcctccagcagatctctgagaacccccagctgatgcagaatgtgatctcagcaccctacatgcgcagcatgatgcagacgcttgcccagaaccccgactttgctgctcagatgatggtgaatgtgccgctcttcgcggggaacccccaactgcaggagcagctccgcctgcagctcccagtcttcctgcagcagatgcagaacccagagtcactctccatccttaccaatccccgagccatgcaggcattgctgcagatccagcagggactacagaccttgcagaccgaggcccctgggctggtacccagccttggctcctttgggatgtcccggaccccagcaccctcagcaggcagcaacgcagggtctacgcccgaggcccccacttcctcaccagccacgccagccacatcttctccaacaggggcttccagcgcccagcagcaactcatgcagcagatgatccagcttttggctggaagtggaaactcacaggtgcagacgccagaagtgagatttcagcagcagctggagcagctcaactccatgggcttcatcaatcgtgaggctaacctgcaggccctgattgccacaggaggggacatcaacgcagctatcgagagactgctgggctcccagctctcctaatccctcggcccatgcctcctgcctctcccctccctcgatgtcagcattcggttcttctgtcaatccttaccctctgcagcttgtctccaaccccttagctctgtctgagaattatggttttactgctacgtctctaacagactcttctctcctggtctccttgagcagtgctacttaaacagttttcacagtttcattgattgactctacctccttgccccacaccacttttgcaatctttaaactttcagtggctgtgcagagtcgagggaggaaccagctctctggtttactggaacatagtcttccatctataccactagggttttgtcttatgtttacttttggtaactctcttccttctttttctccctaccccccaacccctagcccaaccaatgctagaatttcttgctctgaaggaggagcaggtgaaacaggtggtaattttccttctcggcccctattctggttcattcagcactttttggtgggaactgttggaaattccagggtaaggaggaagatgcctgttctccctgtctgaagagggagatgagacagctctctggacaggaattaacaaacgctggagcagcccagaggaaattcgtgtgaaagaggagggaatgagattattcggaggaagggaatgggggagacagcctgagtaaaaggcttggaagttggaattaacagtggggagcagaagcactcatagctcttttaggcagaagaatccaggcccgagctggcagaagagacttagagatgctaatggaatttaaactgaaaaaaggagcccaatgaagctaagcgccacgccccacaaggggtcatattggctttagttcctcaagcatatgtgcttatatgcacacacacacacatttccatggacccaggtcttgcttgtgtccccaggcaccagtagtttgagcccccctcaaaagacatgaagggggttggggtctgtgtgagtagtggggaggtgcatgtgtatccacatgtgtgcatacactcttaagttgggtgggaagtggattccttgttggtttctggttcagagtgctctcccaccaccagagacaagtgggtaaaaaggtcagtccattgcaggaatatatatccgggagagctaggtcccttggggctctggatgctgggtaacccagaggtaatgtgggtaccctttctgaagctgtcagggctgtgactagcacccttatcacccctcactgccttgtgggaatagtagagggtttttttcctccagaccccctggcctttcagttcttaactatttccctccaggccagaaagttttctttgaggaaggagaggagagggtggcaatgatgcctttgatctggaattggacatttctctgtcagagcacagaggaggctcatatcacctcttccctctcctacttggcccagctgcttggaggaccgaccccatggctgagaatatgacggcaagaggaacagagtttgctccaagtgggaaagggtcccaagcagtccagagaagatgtctgtgtggctttccctccctgcctcccccagctcccacactggcctttgtaaataaatggcgtggtctttgttgtga

SEQ ID NO: 27665 - DNA, 1727 bp, Homo sapiens
gaggaggaggagccgggcgggctggcgggcggccgggtggcggcggcggcatggcggagccgagagcggggccgagacgaggccccccattcgggtcaccgtcaagacccccaaggacaaggaggaaattgtgatctgcgatcgagcctcggtcaaggagttcaaagaggaaatctcccggaggtttaaggctcagcaggatcagctggtcctgatcttcgcaggcaagatcctcaaggatggggacacactgaaccagcacggaatcaaggacgggctcactgtccatctggtcatcaagacccctcagaaggctcaagatccagctgctgccactgcttcttccccctccacacctgaccctgcctcagcaccctccaccacgcctgcttcacccgccacccctgcccagccctccacctctggcagtgcctcttcagatgctggcagtggaagccggaggagcagtggtggggggccctctccgggggctggggagggatcccccagtgctactgcgtccatactctctggctttgggggcatcctggggctgggcagcctaggcctgggctctgccaacttcatggagctgcagcagcagatgcagcggcagctgatgtccaatcctgagatgctgtcacagatcatggagaaccccctggtccaggatatgatgtctaaccctgatctgatgcgtcacatgattatggccaacccccagatgcagcagttgatggagcggaaccctgagatcagccacatgctcaataaccctgaactcatgaggcagacaatggagcttgctcggaatccagccatgatgcaagagatgatgcggaaccaggaccgggccctgagcaaccttgagagcatccctggagggtataatgccctccgccgcatgtacacggacatccaggagcccatgttcagtgctgcccgggaacagtttggcaacaatcccttctcttccctggccgggaactccgacagctcatcctcccagcctctgcggactgagaatcgagagcccctccctaacgaacgagaggacaaaaggaaaacgaggagagaagaaaagagaacaaaaaaggaaaaacgagaaaaaacaagcaaagaaaacaacaagaacgaacaaaaaaacacaaaaaaaaagaaagagcagacaaagaagacaggacaaggagaagaagaacagtcggagaggcgaggccgacggacagagacgacacaagagaaaaggaacgaagcgaaaaaacagacggagcgaagaaagtaaaacaaaagaagaagcgagcagaagcaacgaccagggcaaagagaaacacacggcaacgaaacagaaaaacagaaaaaacgaaagcaagaacagaaaaaaacaaaacacaggaagacaggaaaagaacacacagacagaagaagagcaaagcacgaagaccagaacagagacaaccaaaacagagagacccgaagacacgagaaaaaaagaaaaaaaaaggaaaagaaggagaaaagcaaccacagaaagaaaagaaagacgaagacacgacgcgaaaagacaacgagaaaagaaaacagggcacgaaagaacagagaagaagaagaggagccgaaaacaagaaacatcgaaacacaagaaagagagcagaaaaaacaaaaaagcaaacaaagcaagccaacacagaagggcacaaagaggagaacaagacgaggaagaaaagaaa

SEQ ID NO: 27666 - DNA, 350 bp, Homo sapiens
ggaggcgggcttggagccaagattacagtagaggaaggaagtccagtttactctactccctgtcactgtggggcagttcctgggccctggtcctgatcctgatacagaccccccttcctcaaggcccacccttttcctaggttggtgctcccctggttccggggcccattttgtctctctcccttgatcagacaatggagcttgctcggaatccagccatgatgcaagagatgatgcggaaccaggaccgggccctgagcaaccttgagagcatccctggagggtataatgccctccgccgcatgtacacggacatccaggagcccatgttcagtgctgcccgggaacag

SEQ ID NO: 27667 - DNA, 387 bp, Homo sapiens
aaccagggaggcggaggttgcagtgagccgagatcacaccactgcattccagcctggtgacagagcaagactccatctcaaaaaaaaaaaacacaaaacaaaacaaaacaaaacaaaaaatttcggtttagccaagctgatacaatacaatcccacactccttcaactaactccaacatggcagcagtagggttcatttaaaaatacgaatcaggctgggcacgatgactcaagcctgtaatcccacagctctgggaggccaaggaggcaggatcacttgaggccaggagttcaagaccagcctgtgccacatagcgaaaccccatctctacaaaaaaatttaaaaactggccatgtgtggtgggtgacatgtgcctatagtcttag

SEQ ID NO: 27668 - DNA, 465 bp, Homo sapiens
caaaaatgctgtgctctcaaacttttccttcttgatttctttccctttggtgaaacattgatgttcttaaccaagactgaagaatacccattgtattagccctctttcactctgctatgaagacatacctgagactgagtaatttataaataaaagaggtttaattgactctcagttcctcatggcaagggaggcctcaggaaacttacaatcattgcggaaggtgaaacaggcacatcacatggcagcaggtgagagaagtgagtgctgagcagagggggaagccccttataaaaccatcagctctcatgaaaactcacttgttattatgagaacagcatgagggtaaccgccccacctggtccctcccatgacacatgggaattacggaaactacagttcatgatgagatttgggtggggacacagccaaaccatatcacccatgttgtttgagaggaggcta

SEQ ID NO: 27669 - DNA, 658 bp, Homo sapiens
agcttcccaagtagctgggattacaggcatgtatcatcacacccggctcattttgtaatagagacagggtttcaccacgttggccaggctgatcttgaactcctgacctcaaatatctatccgcctcagcctcccaaaatgttgggattaccaccaataccgtgccaggccagaatgttcgttctttttttttagacagagtcttgctctgttggccaggtcttatattaaaacttaaatatctttttgtagcttttgccctcaatttttttttaccatatagaatactagtgctttcatttaacaggggtttcagggtgcaattttgctgaataataaattttaatgacgatgctgttttgagatagtgtttttatagtaactgtaaatgtgtaaatatgataatgatttttcaaaatagtgtgtacctttataaacataatttatgtatttacagtcacatatatggcctagaatttcctatcagtttgcaaaagtaattttatgaaaatacatgataggcagcaaaagttgaggcaggatacttgtttgttcaggagaattgcttgaacctgggaggcggaagttgcagtgagccaagatcatgccactgcactaagcctgggcgacagaagaaggctctgtctcaaaaaaaaaa

SEQ ID NO: 27670 - DNA, 600 bp, Homo sapiens
ccatgcttgggaaggtgcatgcagaccaatgttagtaatagtcaaaattcctgtgtcggtttgtgtggtttgctaaacaggactcaatgtatcatgaaacagtgtattatatagtcaactatggtcaactatgtcccagtgatatttatgagagggatctgaagtatttattgataatgcatatatgaaaaacggagaagaattaatgaaacagatatatctgtgttagaatgattctgtataaagatagggaatatcaagtctgttcttagtgttttgtgaatcacagagtgtaaaattattcccagtgaattaatgaataaatttaaatacaacatagaaatgaatgcagaaaaagagggtcaaccctggatcgatgatgagcactggtggagtatgagtcacatacgatgaatacgtgtctggaactctgaggtccatcgcagaagtcagtttcctctgtttcaactaactctgtagatagatgacaagaatagagaatgaattttttttgtttatgagtttttattttataattggttcaatgaaagaataaaacatatatgaataaataaataagttatgcattgtccaattata

SEQ ID NO: 27671 - DNA, 405 bp, Homo sapiens
cgacgggctggtttttgccgcagtccctgaccaagtatgctgggaggaccagctcccgctccaccctgctccccctgggaggaaggctgacccctgcgtgggagtgtgactgctggaaaggcatccttgctgcagctgtgagtgtgatgggacagcagagtcactcctgcatgggattctagggctgggggtcccagaggggtggcctccgcccctcctgggggccgaggactgtcaccatgtcactacggcactctccagctgctgaccaaagccctcgctaaccgcagccctgccatactctgggtctttcctctggagcaaggtgaagagactgcagcgaggcgtggaattgggaagctcttctggttttattaaaaactcgttccaccccaaaaaaaaaac

SEQ ID NO: 27672 - DNA, 389 bp, Homo sapiens
ccgctttggtcttccaaagtggggggattaccagcataagccaccatgcccagctacattgtaaacatgtttgttttctaggtgctgcaggcagagtgatcctattaaaacctaatcatgttgtgtcactctgcttcccagaatcctctgtggtctcttatctcattcagaataaaagcccaagtccattcagcagcaggcagtgctcccagtctgtaaccctcgaggccattgtccctccctgctcttctcccttgctcagcacggtcctcctccctgctctcagacacacctggcccctgtgcctttgcacttgctcttctctctgagaaggaattttttgtttgttttgttgttgtattctaagcacctagaattgcctggcaaat

SEQ ID NO: 27673 - DNA, 428 bp, Homo sapiens
attacaaacactactgtgagaagtaatggctaaagtaaaaaagagggcagaaaaaaacatctgatgctataatgcgtctaaataaagaatgtgaaacataaagttttgttctacatcttcactggagattttaaagggcaaggagacctagctccttgagatgtataactatttgctgacaagttggagtgtcattagccagtgttctagaaagtgaataatataatcccccgccccccagctctacattgatacatttcttagctaggagacaaatgttagtttgtatttcgtagaccaaactattttaacatctccattttcatttgtctgtatagacaaaaatgtttggcctacaaagacacagccgtggaatattgaatgaccccagttcagtatccattacctgaatgttgttgtgtccccac

SEQ ID NO: 27674 - DNA, 487 bp, Homo sapiens
gttggatggagaaaacgagggtgagtgtcagcttcataggacgggccttccacgagaggcctcatggtgcttgggagagttggggtgaaagcaggttggaacaagatgcttgctgctgacatttgggcactgatgggcagcctgacctctgctttctttttagtgcttaacaacactgaagccctgttaagacaggattcttaggactgggcacagtggctcatccagcactttgggagccctgggtgggaggatcatttgagccccaggagtttgaggccagacagggcaacatagcaaggccccatctctggaaagaaatacaaaaattaaccaggcttggtggtgtgcacctctagtcccagctacttgagaggctgaggtgggaggatcacttgagcctgggagttcaaagctgtaatgagctataatcatgacattacactccagccgaggagacagagcaagactctgtctcaaaaaaaaa

SEQ ID NO: 27675 - DNA, 532 bp, Homo sapiens
aaaaacctaacgaagcaaaattccaaatgtaaaattacttccaattacttaagctacatatcctaatgtaactagaacaagaattcacctgttctatgtaaggtaggtattactatatccatttttctgaagaaaactccttggctcagagtgtgtgaatgatgtctaaaatcacatagctatagtcagcaacagaactcaggtttgaacttgggctcatctggttttaaagcccagaacttttattatacttcattgactcccaacacggtaaaattaagatatttagttaaagaggtgggggctgagaagctgaaaaattaacaaagagatcaactaaaaaccaaaagcagtattttcctagcctgggcaacaaagggagatcctgtctctataaaaaatttttagaaatcagctggatgtagttgcgcacacttgtagtcccagctattcaggaggctgaggtgggagaaagcttgtgcccaggagtttgagattgcagcgagctatgattgtgtcactgcactccaaa

SEQ ID NO: 27676 - DNA, 392 bp, Homo sapiens
atagtctaaaacttcacttaacaaagtagttctcaaacggggaagggagcatgtattttgagattttaggcttcagcactactcatctctctgcccttaagaaccagtgcttggccaggcacggtggctcatgcctgtaatcccagcactttgggaggccgaggtgggtggatcatgaggtcaggagttcgagaccagcctggccaatgtagtgaaacaccgtctttactagaaatacaaaaattagttgagcatggtggcacacgcccatagttccagctactcaggaggctgaggcaggaaaatcgcttgaacccaggaggcggaagctgcggtgagccaagatcaagccactacactgcagcctgggcaacagagccagactccatctc

SEQ ID NO: 27677 - DNA, 815 bp, Homo sapiens
  misc_feature (32)..(32): n is a, c, g, or t
  misc_feature (38)..(38): n is a, c, g, or t
atgctaggtttgtagaggcttacttaaccttnatgganacgctggaaatctgcaggaggaggaggaggactccatcctcctcctcctattgcttctcctgggcattgggatctgctgcctccagctcctgcaggcaatggccagtgtgaggcgttgaatgcattctactttatattatccaagttaggtgggaaatagcttttaatttacagattttcacttcgcaggtaactctgaaggcacacatctgttttatataacaagggatatataaccagcaggagctcatagtagcatttgtagactggttatttgcttttatgtttctttgggactggaagtaacaatttttaatgttaactgtcagtttaggagaggaaataaatacatgtagagaaggttctacctgagccaaaatttcccattcttccctcacaatgtaggattttagaggtgtctctcttgttttctcatctttttcttttgccttctctaaattgttgtaaaataactgaatggtcttgttttcctttgtttgggtcaagaaattttagcggaaaattgttactgtgtgaaagaagattattgactcaacaagccttcaattttccgtgaataacactcccaccccctagcttcaggaacatgccgtgcgtgcattctattttaaaatatagactgtaatttaaaacaggcattttgatgccccactgaactttgtttaagcctggaataaaagaggagaaaaaagctgtaagccacaaaaaagtgactaagctttctcaactacttttcttcataatgcattctttaaa

SEQ ID NO: 27678 - DNA, 586 bp, Homo sapiens
ctcttctcaccctagcctgcacttctggttttggcatggcagtgcctgccatgttgggctagatgccaccatcttcacccacccatcctcctcctcctattgcttctcctgggcattgggatctgctgcctccagctcctgcaggcaatggccagtgtgaggcgttgaatgcattctactttatattatccaagttaggtgggaaatagcttttaatttacagattttcacttcgcaggtaactctgaaggcacacatctgttttatataacaagggatatataaccagcaggagctcatagtagcatttgtagactggttatttgcttttatgtttctttgggactggaagtaacaatttttaatgttaactgtcagtttaggagaggaaataaatacatgtagagaaggttctacctgagccaaaatttcccattcttccctcacaatgtaggattttagaggtgtctctcttgttttctcatctttttcttttgccttctctaaattgttgtaaaataactgaatggtcttgttttcctttgtttgggtcaagaaattttagcggaaaattgttactgtgtga

SEQ ID NO: 27679 - DNA, 564 bp, Homo sapiens
tcagatgttaaagttatcaaaaagtggctttaaaatgacagatgttaatatagtcaacaaagtaaatgacaaaatgtgcaattttagcaaacaactggaaattgtagcaagatttaaatggaaattccagaactgaaatatataaaatacctaaaatttagacttcaataggtatgtttaaaagaggaataatttcttaaatgaaactcaagaagttaatctggctgcttcaggttaagttgaaagtgacaaattcattcctgcctctgcctctaggtgtctcttgacttttgctgctgaattctgttcctgcactgccttgctttattctggcgattctcatgctggtctagaactctgttgaccttgaaatggtgtgaaatattagactccatgttttctactctcttaacttgttattttgtgagctagcatcattagcccaaatgcatcacaccaggttcacagggtcatcagatagttctgctcttgaccacatgctgagcaagagtcattgataattgagttctttgtaccaagccccttcttctgaagatttctgtg

SEQ ID NO: 27680 - DNA, 2075 bp, Homo sapiens
cactgcaccaacaatcatttatcaatggttctaagttactcattgccagttcaagccaaaggtcatgttgttaagggggtgcttctagtagcacttgtgcatctgagttgaatgaagctgtgcaaacccaccctttaaaccattccacccggcagtattcagcttcttaaccagtcgctatttaggaaaaaaaacccactagttaggccatcaacaagcattctttttatatttcttccagtataataaattattgatatcattgctgacttttatattatgggagggaaaaaataacattaataaaaaggtgataaaaaagcactgtttctatttttttctttttttccaaaaaaagaaagtaataaaaacttaaattctttgtaccagttaaaaaaaatgtataaaatttacatctgtgcagtggagttgttaagttctagaaacagtctatgaagctttagttttagcctagtagaacaactgttagagacagacgtataatttttatggaattacatgataatcatattcggatttatagaagcattttacaagtattgcaatcattgagtagagataatcatggtattttcatcagcttggtactttttgaaacgtgactgcgttgtgtgaacaatctgcaatttttcagtccgtgagatcctgcccttccacctctttcccatacccccaaggattatctcaaaatgatctctttagttctgtctccaaggcccaggacacttgtcagaaggatgcaaaaaaagaaaaaagtagatccaccctcttaatcccaaaagaacaaagtctccccacctttctcggatgcagggccagagtgacacagccgaaaaattgcagtttgtctgtacttctgtttgaactttccacgttgtcctgtttacaagttaacttaagttggggtatccgtcacgggtcttcctgttttgtatttaaataaaaacaacagcagcaggctgtccctgagtagttttgctgccataggttaagtcctcatgtgtacagtgcaggccctgtggcccgcacttcagtaagttatcaactctcaccgctgtgaacctgccaatccgctgtaacaactctgctttaaaacaaaaccaaacaaaactttaaaaaaaaatgtgtgatccagctttctcttgccatcctatgtgcatgccgtaagatcagttggatattaaaccatcaataaagtttcacaagatttgaaaacaaagtttctgtagcttcgatacctaagacagacgatagtgatcttgaaaagagaaaagggggaggggggagctacttatcagccaaaagcatataaagtgttcttttcaccagacttctttgggtgggtgaggggaggggcaagagggtgttttatagcatcactaagacattctcattcccccacctggaaaacagtgttatggcaatgggtgcctggttgatgttcttaaaggaaacgaattattaaaacactatgacatcctccagagggaagaaagagtaggagcagggggctatggagaataaatttctcccaattgccgcctcagatttcaaaatccagaatttgtattgtgtttcgaatcacaaacatagaattcttactgtgttggttaaagtaaaattcatttgcagttttgattttcatcaatgagctgtactttcccccatgactgtatgtagttttaataaaatcatttagagtgagtgagtgccaaccgatgttgcagaatcttttgtctaggcactccaagatgccaataagtcattttaaaatgtatgtcagagatgtaaacaaacattttggattttttttaaacagtatttatttggaatgttttcatttatctaaataactattgctattatgaattatggaaaattaatattatgtgtggcatatagtgacttcttaacacacacatcacgcaatctgcaaacccagaaaatgtgtatatctgtctttagaaattagtgtttatatcacttacagtggtttgtgaataaagaaaactggtttgtaatatcaaaaaaataaaagcttagtctgaaaaggt

SEQ ID NO: 27681 - DNA, 483 bp, Homo sapiens
ccaaactttattcccaggcttcttcagctttatttgccgcaaagaatgaattaggtatagcgaaaactgaaaagagctgcagtgaaaaggggcttgggcttaaaaatattagagatctagattttatcagatccataataaacaaaaaaattttaaaaagcagtcatgatataaaatagcagctcctgtaatttctgcaagtatcacttcttcagaagtgttcattcagtttgcctcattcttagaagcctcatcaaaattctccaccagatctggaacttcatcatcatcatcctctccagtagcaaggggtgcttttccatccacagattgtttgggcagagcttcagccagtctccttaaactagtcaggctgtctgcaccaagctggttgaggatgctgggaagcatttctgtcagctgctttgtctcagcgtggcctgtaatggtgaaggtgtttgctgccagggatgcctgaaccgg

SEQ ID NO: 27682 - DNA, 244 bp, Homo sapiens
agtgggatttgctgatggttcagaatgttggatgagagaaggagagaggccaagagtaaccacagtggcactgtgcagtcaaaccctctgccatgttggaaatattctagatctgcaccgtccagtagcgcagcaccagccacgtgtggccgtgaagcatgtgaaaggtgacctgtgcgactgaggaactgaatccataatcttaggtagctcttcaggcaagaaagggtgtcaaaaaaaataa

SEQ ID NO: 27683 - DNA, 421 bp, Homo sapiens
cccctgaagggcagagcattctctggatacccagagaggtgaccgtggcatccaggagtggacccggggctgcaccaagcatcccggagcccagactggtctcgcttcctcacctttctggctctgcggcaagcggctcctaatgatacctggctgaaagagaccaattaacctgagctgctgaggactctgagaagcttcccttatgctgtggttatgtgggatttcccaggtcagtgtcagttgtgtaaaatacagaggtctccaatggatgatgggtagtttatgacacttccactttacaatgatgcaagagagatacgcattttgtagaagtggaaatagtgcttcgagttcccatacaaccattctgtttttcactttcagtacaatgttcaataaattacatgagatattcaac

SEQ ID NO: 27684 - DNA, 1612 bp, Homo sapiens
cctaatcatactgaaatattggtgcacacctctctgcattagatttcacttttttaaaaaacccagtggacattgctataaataagatttatttggctacaaataacctgggatgttgcttattatgattgatgcctgctggtttgttcccaagctgagtgaaattgaacctcgtcctccctactcattttgatgactgaggctggtttataagaaaaggaagtttggagaagaaaaccgagattagaaaatatcatgttttggttggagataagaaccagggatggcaagtaccagtgtgtacaaatgtatttcacggagtttgaaggaacgcataatacaagagggaaaacaatttgtccttcattggacgtattatttggatttgggtgagcaacaaaatggaatgtggtctgttaggagcattctgtttgttcttttgtccctgatgtgatgaatcattgccacatgctagatggactcttcatatccaggttttgtccctcagggctgagcactgtattaaagagtttttgttgagtcatttaaccttagtgtccacatccagatcagctgtaaaatggggaagacgtgtgctgatttggaatgaatgcaaaatatcactatcattttcctaattacagaggagcaaaggttatcttcagccctttcagttctatgctcacatattcaaatatcaaatgtaatttagctgaagttatttaataatcaagtctttcaatatctgttcaaagaaaaagaacacactttgaaaattctgcaaagctgtctcccagtctttaaaatgtctggaagcactctccttctttacaataccaacatcactggcccagaatcttccctgtgctagtttgtaaatataaataaattacttgttttgtaaacttttgtaaagaatattttggtagaaatacttcaaacatattctttgggttatatttatacatatgtgaaataaatatactatcaaaaggttatattttatacaaaaagtaaattgctaccttttgtatgctaatatgcaaagttttgtataatatgatggtttatttttagctctacacttaaaccataggtggttgagtgggaacttttgaaaactatcaagaggcttgttagacaaatttatattctgaaacctcaataagaaagcattccaggtttcaatccttgttttttgtcctgctcccaaattcttttttaaacccatagttcttgtgtcttatttgattcttctgctgtgcacattgtattggtccttgttgcatgtagtctactgtgtgttttccgattttataaggcagcatttctccatacaaaaagaaaaaaaatgatgtacatataaacgcttttgttgtatggctcctccatgttactgtatatatctgccagcacttcccagttacactcctgtgagtcagcttatttttaccctaacataaatagtatgttttgtagtagttatcaaatttaagagataaagcaatcagaatgtttggattttcttctatcttaatgtgaatttcataattaatgtctatttattcagctattcattaaaatacaggattctttgggaaaacatgaagtg

SEQ ID NO: 27685 - DNA, 364 bp, Homo sapiens
aattctcatgcctcagcctctcgagtagctgggattacaggagtgtaccactacacctgactattttttgtattattagtagagatgtaggtttctccatgttggcccggctggtcttgaactcctgacctcaagtgatccggccgcttcggcctcccaatgtgctaggattacaggtatgagccaccaggcccggcctcgttttaaaaggactcttaggttacataacttaaggcacctttagccatctctaatctgctgagttttataatacaggtaagtttccattaacaagtaataaaaacaatcaacacccactgtgataaaccaccatttaataaatgcctggtttatgtcagtcgcc

SEQ ID NO: 27686 - DNA, 348 bp, Homo sapiens
tagagacagggcctcgttttattgcctcagctgcagtacagtggcactatcatagctcactgcagccttgaatcccgggctcaggggatccttcctccttagcctgccaagtagctgggactacaggcatgtgccaccatgcccaactaattttttaaaaaatttgtagagaaaggatctcactatgttgccctgaatggtctcaaactcctgggctcaagtgaacctcctgcctcagtgtcccaaatgcactgagattacaggcctaaaccactacacccagcctctgtgtactctttaggtgaaaaggagttagtcctttgaagaggagagaaaacaccaactctc

SEQ ID NO: 27687 - DNA, 1975 bp, Homo sapiens
cagccctcctgagcctagtccctttgtgagatttgtccccatttcttggacaccatataagagacttcagaggctgaagtgggaggattgcttgagcctgggaggtcgaggatgcagtgagctgtggtcataccactgcactctagcctgggcaacagagcgagaccttgtctcaaaaacagccaccaccaaaaactatcttgggatttgaataggattaccttaaatttgtagattaatttgagaattgacatctgtacgacattctagaacatggtatttcatgtcatgtattcatttcttgttaatgtctttcagaagagttttagggtttccatcatatagatcttacacgtcttttgttagataacagatctttgtatttttgttcctaaatacttcagacatttgtattgccattgtaaatgggatctttcttccattttctagttagttattggtggtacatctgaaaagcatttgaggtttgtgtgctgctctcttgattttgtttctagccaccgtactgaattctcatattacttccagtaaaatcttagttgattctcttaggcttctttggctaacatttattattttatatgcaaataattatagttttgtctcttccttttcaatacttacactctttccttcctttcctttcttttttttttctttctcagggccttgttgtcacccagactggagagcaatggtgtgatctagctcactgtaacctcaaactcctgggcttaagggatcctcctgcctcagcttcctgagtggctgggactacaggcaggcagtgaattttaaaacttttggtgtagagacaagatcttgctatgttgcccaggctggttttcctgccactttagagcaggtttcctttttttcatacttttaagaggtttttattaggaattgtccattgaatgttagctaaaacagtcaataaaatgcgttaagtaccagctacatgcaagaccctaagttagatacagtcagccctcttcatcagcaggtccacatcttcagattcaactagataaggctgaatatttgaagaaaaaaacaataaaaatacaattagaaagtacagtataacaactgttgccatgatacaatatctatacattttattagtgatgacctaaagttcatgggaccaggcacggtgactcacacttgtaatcccaacactttgggaggccaacctgggcagcatagtgagaccttgtctttaataaaaataaaaataaaaaaattagctagtgtggtggtatgcacctgtagtcccagctactcaagaggctgaggtgggcagatcactggagcccaggaggttgcggctgctgtgagctgtgattgtgacactgctctccagcctgagtgacagagggtgatcctgtctctaagtaagtaaataaataaagtatatgggggggatgtgtgttggttatatgcaaacactgcaccattatacgtaagggattgagcatccacagattctggtatggtgtggaggcgatatcctagaaccagtcgtctgcaaggtagcaaggatgactgaactgtggaagaatcaaagcactgttaaacagcatacaattcctgtcttcaaaaaagttatctcatcgggtagatgagacttaaaatgaataaaaggaatgaatacacattggagatagtggttgttgtgatagataaccttaattgtgttttcttccaaaacgggtgaattcacataaaagggcatcagaaaaatacaaagacaacccatcaatatcaggagcctgagcatgagttaaagcatgtggatggcctagagccatgtttttaaaattgttattaaatattggttttttacttaaatcaatgaaaactttctttactttgtggttgtgttcctcaaaatgagaatttttaacaataataaaaataaagcttattagatcatttttaatggtaa

SEQ ID NO: 27688 - DNA, 1446 bp, Homo sapiens
cagccctcctgagcctagtccctttgtgagatttgtccccatttcttggacaccatataagagacttcagaggctgaagtgggaggattgcttgagcctgggaggtcgaggatgcagtgagctgtggtcataccactgcactctagcctgggcaacagagcgagaccttgtctcaaaaacagccaccaccaaaaactatcttgggatttgaataggattaccttaaatttgtagattaatttgagaattgacatctgtacgacattctagaacatggtatttcatgtcatgtattcatttcttgttaatgtctttcagaagagttttagggtttccatcatatagatcttacacgtcttttgttagataacagatctttgtatttttgttcctaaatacttcagacatttgtattgccattgtaaatgggatctttcttccattttctagttagttattggtggtacatctgaaaagcatttgaggtttgtgtgctgctctcttgattttgtttctagccaccgtactgaattctcatattacttccagtaaaatcttagttgattctcttaggcttctttggctaacatttattattttatatgcaaataattatagttttgtctcttccttttcaatacttacactctttccttcctttcctttcttttttttttctttctcagggccttgttgtcacccagactggagagcaatggtgtgatctagctcactgtaacctcaaactcctgggcttaagggatcctcctgcctcactactcaagaggctgaggtgggcagatcactggagcccaggaggttgcggctgctgtgagctgtgattgtgacactgctctccagcctgagtgacagagggtgatcctgtctctaagtaagtaaataaataaagtatatgggggggatgtgtgttggttatatgcaaacactgcaccattatacgtaagggattgagcatccacagattctggtatggtgtggaggcgatatcctagaaccagtcgtctgcaaggtagcaaggatgactgaactgtggaagaatcaaagcactgttaaacagcatacaattcctgtcttcaaaaaagttatctcatcgggtagatgagacttaaaatgaataaaaggaatgaatacacattggagatagtggttgttgtgatagataaccttaattgtgttttcttccaaaacgggtgaattcacataaaagggcatcagaaaaatacaaagacaacccatcaatatcaggagcctgagcatgagttaaagcatgtggatggcctagagccatgtttttaaaattgttattaaatattggttttttacttaaatcaatgaaaactttctttactttgtggttgtgttcctcaaaatgagaatttttaacaataataaaaataaagcttattagatcatttttaatggtaa

SEQ ID NO: 27689 - DNA, 623 bp, Homo sapiens
aactgaaactggctcctggctgacagccagcagagaatcaggatatcagtcccagaatcataaggaactgaattctgctaaaaacctaaatgagcttggaagtgggattcttccgagaagagcccagccgggtcaccatcttaattttggtctgcgaaaccgtaagcagagaatccactcaagcccacctggatctacagaactgtgagctaagctgatgtggtaatattttaaagccgctaaatttttgttcatttgttgtgcagcaataggaatctaacacaaaggtaaatagaatatattttttaaatcgaggcaatattcacataacataaaattaaccattaattaagtgtacaacccagtggcattactacattcataatattgtgaaaccatcacttctgtctaattccaagacattttcaccaccctacaggaaactgatacccattaagcagtcactccctgttccctcctccccttagtccctggcaaacactaatatgctttctgcctatggatttgtctattctggaggttacatacaatttgtgaccttttgtgtctagcttctttcacttagtttaatgttttaaagattcatccacattgtagcatgt

SEQ ID NO: 27690 - DNA, 438 bp, Homo sapiens
gcccatccactaaggcagcatttccccatcttgacaccattgacatttgagggtcttctcttgggaggaacagcgttgtagttctccagtcactagatgtcatcagcactcctggtcctggcagccaagaatgtctccagacatagccaagtgtcccctgggggcagcaacacccatggctgagcaccattggcccaagggatcagtcctaggctctactctctagacctgtgctgcccgacacagcgtccacaggtcacaggtgacgctggagcactggaactgtggacgctccacactgaggcagagagtgcaaaacatgccaggctgggaggacagcattaaaagaagaatgtgaaatatctcacctgtaatgttcatatgcagaaatgatattattttggatatgggggttaataaaatgtattattaaaatta

SEQ ID NO: 27691 - DNA, 425 bp, Homo sapiens
ctttcccgtctattcctactttagtgacagttattatcaagagtgggcattagattttgtcaaattatcttatgcatctattaatacaatcctgttatttttttctttagcctcttgatatgatggattaaattaattgattttcaaatgttgacccagccttgcatacatgggataaatcccactagttcatgctgtataattacttgtatatatagttgtattcaatttgctaatattttattgagaattttgcatttctgctcataagagatattggtctgtagtttcttgtaatgtttttgcattgttttggaattagggtattgttagcctcacataatgaattagggagtatttcctctgccttctgaaagagattgcagagaattggtataatttcttccttaggctgggttcagtgt

SEQ ID NO: 27692 - DNA, 653 bp, Homo sapiens
agagaacctagagcccaaggttcagagtcacccatctcagcaagcccagaagcatctgcaatatctatgatggcctcgccctttgctttactgatggccctggtggtgctcagctgcaagtcaagctgctctctgggctgtgatctccctgagacccacagcctggataacaggaggaccttgatgctcctggcacaaatgagcagaatctctccttcctcctgtctgatggacagacatgactttggatttccccaggaggagtttgatggcaaccagttccagaaggctccagccatctctgtcctccatgagctgatccagcagatcttcaacctctttaccacaaaagattcatctgctgcttgggatgaggacctcctagacaaattctgcaccgaactctaccagcagctgaatgacttggaagcctgtgtgatgcaggaggagagggtgggagaaactcccctgatgaatgcggactccatcttggctgtgaagaaatacttccgaagaatcactctctatctgacagagaagaaatacagcccttgtgcctgggaggttgtcagagcagaaatcatgagatccctctctttatcaacaaacttgcaagaaagattaaggaggaaggaataacacctggtccaaca

SEQ ID NO: 27693 - DNA, 428 bp, Homo sapiens
tggtgataatgagaccaaggttgcattttgatgccaggtaaggttattctgtttagtcacatactcctgaccctagccagctgactgcttgaaaagatatactgtagttgctttagtataagcaattactaaaaaattaattgatataatttaaaattttaggcaaccttaaagcccacaaatagtaatcatacatgaaaatgttgtcttgactatattttttggggaaattcatattctatataggttgattcagcttttactcagaatatttattttctgtactttaaatcattatagccaaactgcttctagattcttacccccagtataagcaggaaaaggattaaaggatacatgtaaagatcataaaggacactttaatactatacttttttactttgttcctaaaccaaataatttaaaaa

SEQ ID NO: 27694 - DNA, 433 bp, Homo sapiens
agctcggtagagaaatggaagaggaaggtatatgcagtgtttgactgtctctgtttcttgtctcacgtcacaaaacaagactgaatttggatttctgaacgcgactgtgttttcctcgggagtaatgaaattagggctccatttccttcgctgttcccaagggaaaggtcctgcttaaacaggtgctttgtgagtggaaacgtggccagagtgcggcgggtgctttgtgagtggaaatgtggccagagtgcggcggatgctttgtgagtggaaacgtggccttctctggaagccctggggaggggctttccgactgagaggaaggcctcgcatctgcccaccgcccagtcctgggcctcacagtgaggatgcaggtcacgctgcacagatgaggcccgtgtggcaggtggtcccaggaacgaactcgcctccc

SEQ ID NO: 27695 - DNA, 1017 bp, Homo sapiens
tttagatctaagttttatggcaaagtaacccttaagttactaaaatttgtgtatgtgttcatggagcagacatatattgagtgtttcttatataccaagccctcgtgctggatgtttagcatccagggatggataagacagctgtgccttcaaggagcaagaggccctggcgcagagaccactgcagcgcctcgttagcttcacaggcaggctcgtgctgtctgcacactcagcagtgacagcagggtgtggccagggcgacacaaccttcaggggattctggaagctcatactcctccaggaaagagggggctctaggcaaacatgaaggcctgagcccccagctcatctgaggaaaagcaggtggtctggaagcgccgctagggcagaggtggggagcatgtgtagacgcctcccggcgggaagggaccaccagggccagctcgggccccagcgctgccggtgtcattcggggttaaggtctgtccagcagcaacgcggggcagggctggtgccaaaaagaccagttaaagaattggaatttgtgtcatgtttaacttgttggagttgtgaataaagaacactgtgaggtctacctgggttaggtctacctggccaggtagacctaacccaaggtagaaggccagagctcccacaaaagctgtcaccagcacccgtggtatccacagccttgactttcttctgtgggaatgtgctttggctcaggttctgtctgtgacagcaccacacatccttcagcccctaaggtaatgatttaccacctggcagccccttttcaagagcactaatgcagcctccccagcatctgcagcgctgcccaccgtgaggccagttaaaatctcagcctcactctcattgcagcagaacacatctgagagggtgtagaactggggactcaggtcagcaatggaggggctggattgaacaggtttcactccactctgcgggcattgtaggtcactgggggacccagagcgcgagctatgaggggggaaa

SEQ ID NO: 27696 - DNA, 1996 bp, Homo sapiens
ccctcacttcctctcttctcctgtttctcaacatcctggcttagtattgtgtgcaaaatcagagaggggtgcaagatcctgatttttcaggagttcaagcgacaatggcagcccaatacggcagtatgagcttcaaccccagcacaccaggggccagttatgggcctggaaggcaagagcccagaaattcccaattgagaattgtgttagtgggtaaaaccggagcaggaaaaagtgcaacaggaaacagcatccttggccggaaagtgtttcattctggcactgcagcaaaatccattaccaagaagtgtgagaaacgcagcagctcatggaaggaaacagaacttgtcgtagttgacacaccaggcattttcgacacagaggtgcccaatgctgaaacgtccaaggagattattcgctgcattcttctgacctccccagggcctcatgctctgcttctggtggttccactgggccgttacactgaggaagagcacaaagccacagagaagatcctgaaaatgtttggagagagggctagaagtttcatgattctcatattcacccggaaagatgacttaggtgacaccaatttgcatgactacttaagggaagctccagaagacattcaagacttgatggacattttcggtgaccgctactgtgcgttaaacaacaaggcaacaggcgctgagcaggaggcccagagggcacagttgctgggcctgatccagcgcgtggtgagggagaacaaggaaggctgctacactaataggatgtaccaaagggcggaggaggagatccagaagcaaacacaagcaatgcaagaactccacagagtggagctggagagagagaaagcgcggataagagaggagtatgaagagaaaatcagaaagctggaagataaagtggagcaggaaaagagaaagaagcaaatggagaagaaactagcagaacaggaggctcactatgctgtaaggcagcaaagggcaagaacggaagtggagagtaaggatgggatacttgaattaatcatgacagcgttacagattgcttcctttattttgttacgtctgttcgcggaagattaaacttaatgaaaatctgtttgtattttctgcatattctctggcaaccttgccccatacttacttatttagcatagtcgagtgctctagtttctgtctctcaggcactcgtaactaaggaccaccattggccattggtagatgtttgattgacttaacaagagagggacaaattttcaatttgtgaaactccaaagcagaaagtattggtgcttgctaccttgtgaattcttccttagacatgcagagaaaatgtatgcaagagaccaaaaagatggctccaagctatgtcatgttacctgtaataaaatcttttcttctagattctttctatgttggcagataatctccccttgtagcttccactcacttattcttgcattcagagtcacaatgatcatcttacccatgtggtttttgagaaagaaagatcaattctttgtttgcagtaggtaatcttagagatggagatgattgtagaattattcctagatgagtgtcaatttatttaattccattgtcatataaggagtcaaattgtttcttatcatttgttcattgaagaacagagacctgtctggaaaatcgatctctacaaattcaattaaataatgatccccaaatgctgaaaaagtgaaatacagcaattcaacagataatagagcaatgtttagtatattcagctgtatctgtagaaactctttgacgaacctcaatttaaccaatttgatgaatacccagttctcttcttttctagagaaagatagttgcaacctcacctccctcactcaacactttgaatacttattgtttggcaggtcatccacacacttctgcccccactgcattgaattttttgcttatgttgtttataataaaacttttcaattatctcataaaaaaaa

SEQ ID NO: 27697 - DNA, 798 bp, Homo sapiens
ccctcacttcctctcttctcctgtttctcaacatcctggcttagtattgtgtgcaaaatcagagaggggtgcaagatcctgatttttcagggcctggaaggcaagagcccagaaattcccaattgagaattgtgttagtgggtaaaaccggagcaggaaaaagtgcaacaggaaacagcatccttggccggaaagtgtttcattctggcactgcagcaaaatccattaccaagaagtgtgagaaacgcagcagctcatggaaggaaacagaacttgtcgtagttgacacaccaggcattttcgacacagaggtgcccaatgctgaaacgtccaaggagattattcgctgcattcttctgacctccccagggcctcatgctctgcttctggtggttccactgggccgttacactgaggaagagcacaaagccacagagaagatcctgaaaatgtttggagagagggctagaagtttcatgattctcatattcacccggaaagatgacttaggtgacaccaatttgcatgactacttaagggaagctccagaagacattcaagacttgatggacattttcggtgaccgctactgtgcgttaaacaacaaggcaacaggcgctgagcaggaggcccagagggcacagttgctgggcctgatccagcgcgtggtgagggagaacaaggaaggctgctacactaataggatgtacacaggaatcagaatgaaactcgagtacgaaactacgaactcaggtacagtaccattagttaatatgtagagaatatacttttgattaa

SEQ ID NO: 27698 - DNA, 4023 bp, Homo sapiens
atcaaatgtggggtttgttacattccgctgccgccgcggacagttcttaaagggccagccgccggctgccgcgcagacccagctgcgtcctgcgccgcctcccgctccctgagggcctgggccgagagagactgatcgcgcgtgggcctcgcgaggcagacgccgtcgggcggacaacaaagagagaggccccggaaggagccgggctgcccccggacccgggggtggggaggggagcacattgttccgcagggcgggagctcttaaaggatccagacaggcaccccccccctcccccgccccctgcccagtttggccgtcctagatcgggaacaaaggagtcaacgtgtggccgggcggccaaagggttgtgagtcccggcccagcccctccacccccctgcccccccgatgcgaccatgggctctggcagtgactaggtggccaccctccgcccccgtgggccagcggcgattctctgcgggacctggcagcaccccgggccagctctggggaagccctggcctcgagggccccctggccagcccgcctgcccgggatgagcgcttaccctcccagcagccgccgtcccgacctccacacctccccgtagaggagcgccgagcctcggctcctgccggcgggagcccccgaatgctgcacccagccacccagcagagcccgttcatggttgatctccacgagcaggtgcaccagggacctgtccctctgtcctacacggtcaccacagtgacgacccaaggcttccccttgcctacaggccagcacatccctggctgcagtgcccagcagctcccagcatgctccgtgatgttcagtgggcagcattaccccctctgctgcctcccgcccccgcttatccaggcgtgcaccatgcagcagctgcctgtgccctatcaggcctacccccacctcatctccagtgaccactacatcctgcaccccccaccaccggccccacccccccagcccacccacatggcgcccctggggcagtttgtgtctctgcagacccagcaccctcggatgcccctccagcggctcgacaacgacgtggacctgcgtggggaccagccctccctgggcagcttcacctactccacctctgcgcctggcccagccctttccccgtcggtgcccctgcactacctgccccacgatccgctgcaccaggagctgtcctttggtgtgccatattctcacatgatgccacggagactgagcacccagagataccgcctgcagcagccactgcccccgccgcccccacccccacccccaccaccctactaccccagcttcctgccctacttcctctcgatgctgccaatgtcaccaacagcaatggggcccaccatcagcctggacctggacgtggatgatgtggagatggagaactatgaggccctcctgaacctggccgagcggctgggagatgccaagccccggggtctcaccaaagcagacatagagcagctcccgtcgtaccgctttaacccggacagccatcagtcggagcagacgctgtgtgtggtctgcttcagtgacttcgaggcgcggcagctgctccgagtcctcccctgcaaccatgagttccacaccaagtgtgttgacaagtggttgaaggccaaccggacgtgtcccatctgccgggccgacgcctccgaggtgcccagggaggctgagtgaggccacgcagccgcctgcccgggagaaccctgcctgaagctctggaaacttgtgggtggggcccagggaggatggggagggagtggcccaggcctgccccttcgctcctgcctgcatttccagagctggtgccagggtcagcccagcgaggagtccctgcaataagcccctgcatttgccaagctccaaagactccctccctagtctgcctgcccgcccgcccgccacggagctgcctgagtgtccctgatcgggtctccctcctgtgcaccctcaggtccctccttttcctgctggcactgagtgccaggggtccgctccctcagtggggccggtggagatccttggccccaggatgggcagacagagcaccatcctgggtcagaaggtctcatgctctgaaatggcgtgccctctgcccaggtggcactgccaggtgcgtagacagacggtgtcacgagccatttcctgagccccagggctgaatcccccctccttgaccccgaacagtgaactcaggcagctggctctgtgttggctgctgtgagggctgagtctggttccctaggggaccctcatcccaggaacaacattccagccccaccctcaggctggagggcgtcccagcctaatcccgagctggggcacacgtatcctgaggggcttgggccatacggggagagggagccctgtgttcccggtggttgtccctcccagggatgcagccagacccgtgcccaatctcctctccctctgttgttttgcatgaacgtgaggagcagcagtttttgttcattcatttggcccaaaatcacgtgtaggatttggggatgtggatatttaagacaatttcttttttcttttggtttaataggggcgggtatagggaccaactgggaccgagtgcccagggggccgagcacggtcatgctggccggcctgcatgcatgcgtgtgccgggctgggctgggcggccggcggtcgtggggcagggttgggggtctgtgctcagctgataactgccatgcactgtactgcacacgtccctagagcctaccgggacccgacgcttttcagggcatttctccctccagccagggcccaactcccacctgcctgggcgaatctcctccaaggaagtcccaggaggatggggaccaggaaggctgtggacccccatctccagggggccttcccagcctgatccctgtcctccaagttctggaggaggccgctgtagggtctggctgagcttcccacccactttccctggtcccaatcctttcttgtcctatacccagctggggttgctgccctgaacgaactgcgtgtggggccggcacatcctagcaggcagcccctggcgcctgctgcctcagggatgctccaaccaccctcgttctcctcgcagtggccctggctcccacctcccgccccagcctgccgtggggcccgtcagcctggtcccacccccatggagaacccaaagtcttactgtatataactccaggtgacgtttctatatttatagcagtgttgaaaacccacgtgttttacacagaaccaccctctccaacccctcccttcccgaccccaacaaaacgttttcaaaccccttacagttcctggggcaggcggaaacaggctcacagattgtgtgtcggctgcagcagtgattccaacaagcagctattgggggggaaacacagcatttaaaaagatcatcattaaaaaacaagatttatacaacaattacttaggatgtttgtgatccgccgaccttgctatagatgccatgttaccaatgatttcctgtggtgggggcttgccattgtttactctcttatttaccaacttctggcctaggcatgacagtgggcaccttcccccagccctggctgggcccagcgcctgtgttctgtgttagaaaggttttatatatatataaaattacatatatatgtagaaatatatgtaattttgggggccctgttccttgcacattttacagttacctcatttttcccatgtatgtatttgagaaaatgctaatatatagagaaaaaaatggttcttaaagcttaaatgtgtggttttttccattccatgggattcacattggtttgtagcatttaacataactagtatgttgtattatatatatgtgtatactgattgaaatttttaacagatttgtactttttttaaaatgaaagttgctagttctgcttgaccaagtagtgcaatcattattttttttaatattgttgctgatttcagagggatattcactaataaatgtatgatgtatacc

SEQ ID NO: 27699 - DNA, 2317 bp, Homo sapiens
  misc_feature (13)..(13): n is a, c, g, or t
  misc_feature (24)..(24): n is a, c, g, or t
actggcagtaacnccacggtgtantggtacgaggctgggtggctctggaaacttgtgggtggggcccagggaggatggggagggagtggcccaggcctgccccttcgctcctgcctgcatttccagagctggtgccagggtcagcccagcgaggagtccctgcaataagcccctgcatttgccaagctccaaagactccctccctagtctgcctgcccgcccgcccgccacggagctgcctgagtgtccctgatcgggtctccctcctgtgcaccctcaggtccctccttttcctgctggcactgagtgccaggggtccgctccctcagtggggccggtggagatccttggccccaggatgggcagacagagcaccatcctgggtcagaaggtctcatgctctgaaatggcgtgccctctgcccaggtggcactgccaggtgcgtagacagacggtgtcacgagccatttcctgagccccagggctgaatcccccctccttgaccccgaacagtgaactcaggcagctggctctgtgttggctgctgtgagggctgagtctggttccctaggggaccctcatcccaggaacaacattccagccccaccctcaggctggagggcgtcccagcctaatcccgagctggggcacacgtatcctgaggggcttgggccatacggggagagggagccctgtgttcccggtggttgtccctcccagggatgcagccagacccgtgcccaatctcctctccctctgttgttttgcatgaacgtgaggagcagcagtttttgttcattcatttggcccaaaatcacgtgtaggatttggggatgtggatatttaagacaatttcttttttcttttggtttaataggggcgggtatagggaccaactgggaccgagtgcccagggggccgagcacggtcatgctggccggcctgcatgcatgcgtgtgccgggctgggctgggcggccggcggtcgtggggcagggttgggggtctgtgctcagctgataactgccatgcactgtactgcacacgtccctagagcctaccgggacccgacgcttttcagggcatttctccctccagccagggcccaactcccacctgcctgggcgaatctcctccaaggaagtcccaggaggatggggaccaggaaggctgtggacccccatctccagggggccttcccagcctgatccctgtcctccaagttctggaggaggccgctgtagggtctggctgagcttcccacccactttccctggtcccaatcctttcttgtcctatacccagctggggttgctgccctgaacgaactgcgtgtggggccggcacatcctagcaggcagcccctggcgcctgctgcctcagggatgctccaaccaccctcgttctcctcgcagtggccctggctcccacctcccgccccagcctgccgtggggcccgtcagcctggtcccacccccatggagaacccaaagtcttactgtatataactccaggtgacgtttctatatttatagcagtgttgaaaacccacgtgttttacacagaaccaccctctccaacccctcccttcccgaccccaacaaaacgttttcaaaccccttacagttcctggggcaggcggaaacaggctcacagattgtgtgtcggctgcagcagtgattccaacaagcagctattgggggggaaacacagcatttaaaaagatcatcattaaaaaacaagatttatacaacaattacttaggatgtttgtgatccgccgaccttgctatagatgccatgttaccaatgatttcctgtggtgggggcttgccattgtttactctcttatttaccaacttctggcctaggcatgacagtgggcaccttcccccagccctggctgggcccagcgcctgtgttctgtgttagaaaggttttatatatatataaaattacatatatatgtagaaatatatgtaattttgggggccctgttccttgcacattttacagttacctcatttttcccatgtatgtatttgagaaaatgctaatatatagagaaaaaaatggttcttaaagcttaaatgtgtggttttttccattccatgggattcacattggtttgtagcatttaacataactagtatgttgtattatatatatgtgtatactgattgaaatttttaacagatttgtactttttttaaaatgaaagttgctagttctgcttgaccaagtagtgcaatcattattttttttaatattgttgctgatttcagagggatattcactaataaatgtatgatgtatacc

SEQ ID NO: 27700 - DNA, 984 bp, Homo sapiens
  misc_feature (65)..(65): n is a, c, g, or t
  misc_feature (70)..(70): n is a, c, g, or t
  misc_feature (79)..(79): n is a, c, g, or t
  misc_feature (190)..(190): n is a, c, g, or t
  misc_feature (216)..(216): n is a, c, g, or t
  misc_feature (318)..(318): n is a, c, g, or t
  misc_feature (373)..(373): n is a, c, g, or t
  misc_feature (401)..(401): n is a, c, g, or t
  misc_feature (409)..(409): n is a, c, g, or t
  misc_feature (507)..(507): n is a, c, g, or t
  misc_feature (517)..(517): n is a, c, g, or t
  misc_feature (520)..(520): n is a, c, g, or t
  misc_feature (717)..(717): n is a, c, g, or t
  misc_feature (748)..(748): n is a, c, g, or t
  misc_feature (752)..(752): n is a, c, g, or t
  misc_feature (765)..(765): n is a, c, g, or t
  misc_feature (768)..(768): n is a, c, g, or t
  misc_feature (789)..(789): n is a, c, g, or t
  misc_feature (810)..(810): n is a, c, g, or t
  misc_feature (926)..(926): n is a, c, g, or t
  misc_feature (928)..(928): n is a, c, g, or t
  misc_feature (968)..(968): n is a, c, g, or t
atggagtggcggaaccatagtgggagagtgagtgagtttgtgttgctgggcttccctgctcctgngccantacaggtantattgtttgcccttttgctgctggcctatgtgttggtgctgactgagaacacactcatcattatggcaattaggaaccattccaccctccacaaacccatgtacttttttntagctaatatgtcctttctggagatntggtatgtcactgtcactattcccaagatgcttgctggctttgttggatccaaacaggatcatggacagctaatctcctttgagggatgcatgacacagctntactttttccttggcttgggctgcactgagtgtgtccttctcgctgttatggccnatgatcgctatatggccatctgctatcntctccacnacccagtcattgtcagtggccggctgtgtgtgcagatggctgctggctcttgggctggaggttttggcatctccatggtcaaagtttttcttatttcnggcctctctnacngtggccccaacatcatcaaccactttttctgtgatgtctctccattgctcaacctctcatgcactgatatgtccacagcagagcttacagatttcatcctggccatttttattcttctagggccactctctgtcactggggcctcctatgtggccattactggtgctgtgatgcacattccttcggctgctggacgntataaggccttttccacctgtgcctctcatntcantgttgtgataatnttntatgcagccagtatcttcatntatgctcggccaaaggcactntcagcttttgacaccaacaagttggtctctgtactgtatgctgtcattgtaccattgctcaatcccatcatttactgcctgcgcaatcaagaggtcaagagagccctatgctgtantntgcacctgtaccagcaccaggatcctgaccccaagaaagntagcagaaatgtatag

SEQ ID NO: 27701 - DNA, 448 bp, Homo sapiens
ggaaaacatctaagaaataaaaaaatatggtcctgcgtatgtttctagaaattttccagattaatttgcaggtgcagttggtataccatttttcacatatttattcacccttcaaatcctagaatcaaatactttttaaccatgtcatcaactattaaatcactattgtggtctttctccttaacgacttgtagtattaataggaaaagttaaatgaatgaatgaagacaaaggtagagaaaaggtaattagtgaaaactgagattagatacatctatgagggtgatgagagactcactgatgaccgaaaagttagaaaaagaaactggaagaatgatctgatttagcattctataaaggtagatgtatgtaagtttgtgtgttatatgtgtaccatatcttattagtttctatgttcatttatttatgttcatttcaaagtaaaaaa

SEQ ID NO: 27702 - DNA, 126 bp, Homo sapiens
gaaaagatcatttttttattattgcaattgttattgttaccccatgagaatggggacccagtctgtcttagggactgctgtatgacccgtgcctagcatgcagtagatgatcaataaatacttgtt

SEQ ID NO: 27703 - DNA, 382 bp, Homo sapiens
attttgcaaaaagaggaactttagctccgcactttggagatgccagtgtctttgagatgttaaggactttttgttttgtttttgttttttaattctttaactatgttacaggtttagcaatgcctccgattcaggaatttgtttaaaaccccccagtggcttagagctgcacatagaataaaatctaaactgtttctcatggtctacatggtcagccattgtttacctgacttaactaacctctccgacttcccctgacacggctgcctccctgggcttgtacgctcctgtgcttattcttgtccccgtacaaagcacatccattctcgctgtgaggccttagcagcacctgctcctgctgcctcagaaggttcttccctga

SEQ ID NO: 27704 - DNA, 176 bp, Homo sapiens
gatgctaatataaccctgaataatccataaatatgatgtttagcatttggaaaatataattttatatggttatttaataagttgttccaagataatttatgaattatttgcataaaattatgttaaatccatgaatcacatcatttattgaaaataaattttatttaaatgtaata

SEQ ID NO: 27705 - DNA, 435 bp, Homo sapiens
ctttgtctttctgaaccgtggtgttttgagtacaggccaggtctttcatagaatgtgtctgatgtgggtttgcccagtgtttcccaggattgtgtgcaggtcgtggagcgacgcaggtgactgacaagtgtccttaggaattgaattgtggtggttttttgtccatcttcaagttactgctcaccagactgcaagcatgtcttgcagggagagaccctaaggtgctgcatgtacctcccatcacatcccaccagggtcttcagcatctgccatggcccacgcttagctagtactgcacggtgggtgccaaatggtggttttctaactccatcatttcctctcttgattatttcagtttctgctgtaaggaggtgcttcactttcctgtccgtccacacagttatctgtccatttactttacaaaaaaaaaaactt

SEQ ID NO: 27706 - DNA, 206 bp, Homo sapiens
tctttctgacacttccagatttatgtgatatacattgtccatctgagtattttactctgcacccttagatttcaatctgatctcgaagtggttaaagagatgaattctctgtcccctacctcagctctcctccccagtcttcaagaaacttgttgtaagtacacatgagtatgagcactgatggagtgggaaatgaatacttatga

SEQ ID NO: 27707 - DNA, 1158 bp, Homo sapiens
agcagtgtgaaaaagaggtgagatgtcccctgaactgacaagaggctgtgtgctgctacatcctgcaaccagcaccgacatcccactgccatcatcaccatgcccaagagaaaggttgaataggacatgaaagaagataaaaccaatgaaggacaaatcacagagatctgcaagcttgtctgctaaacctgctcctccaaagccagagcccaagcctaaaagggcccctacaaagaagagagagaaggtacacaaagggaaaaagggaaaagctgatattggcaaggaggagaataaccctgcacaacatggagatgccaaaacagaccgggcacagaaagctgaatgtgttggagatgccaagtgaagtgtgtgcatttttaataactgtgtacctctgatgactgtacagtttgaaatactatttttaatcaagttttataaaaatgcagaagctatattgttagcacacagaacacttcattgttgtcttttggggaaggagcctatgtcactaatagaatgtcttcaaaactagactgatgtggaaaaaacacctttctcttctagttttgagagacttcctcttggctcccacaaggagggatttcctggctttgacacacatagccactttagcatgaaagccttaaggaggggaaaacaaatttatttttatgtcctcttttctctttccaccttcagcatacacttaactcccttaaaccgagatacctgttgggacctgaccctcaataattgattatcagcgtgtcaggcaatctggactttccagtgaaaccactgagatggtgcccctcaaaagagcagcggttctctttctgggttgtggatctttagacaaattctcccattttcatttcacttcctgaaagtcatgcttgggtcatgaaaagttgttcaaccctcactctaaactttccctgttcagagcatcaaatgaaaacttcatagggtttgataggggctttctgatttttgatagtcggttgaagaagggagtttgaaagttgttaaatactgttaatgattgtctgcccatgtcctgctgaaataccgtgattggttatggaaagtatctttaataaagctgggtatagtttggcttgggaaaaaaatcaaaacctatcaaaaaag

SEQ ID NO: 27708 - DNA, 478 bp, Homo sapiens
ttcctttccttttccattatacataatattgtaataaccatccttatacaaatgaactcacaagctaaatcttatattgctattgagtatatctagttatctcaatgattctatgggtcatgggtataattaggctgacttaaaatggaattgctggatcaattggtatgcacattaaaaaatttgtatatttgggggccagacacggcggctcacacctgtaatccaagaactttgggaggccaagacgggtggattacgaggtcaggagatagagaccaccctggctaacacggtgaaaccctgtctctactaaaaatacaaaaaattagccggcatggtggcaggcacctgtagtcccaggtactcaggaggctgaggcagaagaatggcatgaacccgggcgggggagcttgcagtgagccaagatcgtgccactgcactccagcctgggcgacagagccagattccgtctcaa

SEQ ID NO: 27709 - DNA, 411 bp, Homo sapiens
  misc_feature (291)..(291): n is a, c, g, or t
atggctcgtacgaagcaaacagctcgcaagtctaccggcggcaaagctccgcgcaagcagcttgctactaaagcagcccgtaagagcgctccggccaccggtggcgtgaagaaacctcatcgctaccgcccgggcaccgtggccttgcgcgaaatccgtcgctaccagaagtccaccgagctgctgatccggaagctgccgttccagcgcctggtgcgagaaatcgcccaggacttcaaaaccgacctgcgtttccagagctctgcggtgatggcgctgcaggaggcttgngaggcctacctggtgggactcttcgaagacaccaatctgtgcgctattcacgctaaacgcgtcaccatcatgcccaaagatatccagctggcacgtcgcatccgtggggaaagggcataa

SEQ ID NO: 27710 - DNA, 477 bp, Homo sapiens
agaaggcaaaatgggagcttggtatcacctggtaaaagcaggagcaagagagagtgcggtggagggggaatgtgtgtgtgtgttgggggatacacccttttacacagatctcatgtgaactcagagcaagagctcactcatcaccaaggagatggctaaacccatttataaggggtccactgatgatccaaacaccttccaccaggccccacctccaaccccagggatcatgtctcaacatgagatttggaggagacaaacatccaaaccacatcaacctatggggccaaatcttcataggtggaatttacaaaaggaagccttctaaaagaagtttcaccgctcctaagcactcaaacagaaaatggaaaaaaaagatgtgaagagatttctttgaagataaagactgattgtcccccacccctgtcccaccccactgttctcctcccttaagctgggaagggaccactcaagcac

SEQ ID NO: 27711 - DNA, 1668 bp, Homo sapiens
gattgcttgagtccaggagttcgagaccagcctgggcaacatagggagaccttatttctacaaaaataataaaaataattagttgggcatggtggcttgagcatgggagttcgaggctacagtgagttgtgatcgtactgcactccagcctggatgacagagtgaaaccctatcaataaaaaataaaaaaggatgggggagcagggggatgatggtcctatgcaagtctaaaacttagcaaggcacgtttcatgagatcttaggctcatgaataatcctctttggtcctatactgtcctctccaggaccccctgggcggtggtcctgacccgatagatctgccaggcaggggtgactcccccgtggcttttgttggagaccatctggcctgtggaaactggggcagtatccctcatgatctctaaatagccaagagaagagtcattcttgtatggaacaatggacattcacagccttcctcattcctggctttaggacttcagatacaatcatgtcagagctcagggcttcaacatatgaattttgggggcacagttcagtccatagcaatacttccattcccctgacctgcaacatgtccagttacttcgaaaagtacttgtcatccactatattaataacatgctcattgccagcctatgaaacaagttgaccactccatacataaggtcatagataatatgacacatgcaggttgagttgtcagccctgataagatcccaagacttgcccaacaagtgcagtccctggagctacctggtccagtaattagaggagtattcctgataaagtcaaatattgtccttggcagcccccacctaaaagaagctcaatagctggtatgcctgtttgtctattggagataacatgtatcacatctgagtattattttgcctcctttagttaaaattacccacaacacagccacctctgaatggggccctcaacaacagcagactcgagaggcctactatgcattaacatgggcctgacattaatgtaggcccatgggaactacaggtctcttgacttttaccatacagattggatactgcgcaacaagagactgctatcaggatgcaccaggcccttgggttttggacatataaattacccaagatggttgccatatacattccctttgaatggcagctactagcctgctattggactctaatttaaacagaacacttgaccactgaagcactgtatgtgaccttaagacctgagctgcccatctcatgcaggtattattaacgaaaaataaaaatggaagccccagtttagaaataccctaaggctgactacccgcaaccgtgtaaccaaaactaatcattctgattttcctgaaatgctgtctctgatcataaatgaaatgcaaaatgtaagctttacatccttgccagcatgattcactgaaattaaaccaatcagctatagaccaacaagcttaaacagctcaacttgccctaaaaagaatgtataacagccaattataaaaaaggtcaaaatattccccccctttatgcattataaactgtgttgtaactgctgtaagattaatttcttaccacttgatttgagtcttctagattgtggtctgtacttcttgtttgaacaataaacttttaaatttttctttaaaaa

SEQ ID NO: 27712 - DNA, 766 bp, Homo sapiens
ctcaggtgtagctgggacttatcgggtgaccttttagaaactgtttattttcatttttgtaccccacattgggataagtatggtccactgacattgagaataaccaggcctgttgtagacagccagccatcctgaaactactaggtttatacttcttacctgttagaacagagtttcccaagttgtattcccttggaaacactagcagtcgtgcatcatttgggcagttaggttacacaaaatttaaatggtctatttattttcttttccagacagaactcagggcagtcccaccttcaagggaaatcttcattacatccttctgatggtggggtagctgggagtcagcatgaaatcccaaattctaaatcatcgggaaaaagcagaagggttggaacccaaattaaactgaagtcctaaataaagttcacttttcggtcaggcattcaggaagcagcacgtgaaaatttgcttggatacagtttcctcatagttcttcagcagcttgaaataacatcttgagctggctgtaaacaaaacatctcaagttatcgtttttctttccatttgattgagccagttattgtatagggaggtgacacaaaacaaaacttcgtgtttctgaagccgagattttgggattgtactttatgcaaagttacttataagttctgattactttgagagaaaaatattacagtatccttaggaagttttatgtatttgttttaaagctaagcaccaccctctttttagttaaaaaaaa

SEQ ID NO: 27713 - DNA, 347 bp, Homo sapiens
gaatgttggatattgatatcaattccagagattgatagaaaaataaatgtgcttattatatgtttaattatatgctaattatatgtacaaattaggataaataacacaaaaacatataagtataatacaacaaataaaaatttgatcgtcaatttctgcctttacaataaaaggcagaaaagaagggggaatttttcaataaaaagtaacaagcaaaatattaagtccaataagtcagcattcacaaaaaatgtatacaggctaaattatcttattagaataaaagctcttggattgcctagaaaaatacaaatctagctatatttgattacaaagaatatctataa

SEQ ID NO: 27714 - DNA, 371 bp, Homo sapiens
agcttcatgcttgtgttgacacagccacaatcacaactcaggtgtcagttctgagaccttcccatgcctgtcgccactcagcaagtgttcttcatgtgccctggcagttcgcattgtaaggagcagccaggttgttatggactgttgctagttaccacagagtagtgaattatattaaggattaattacagcagacaatgtgcacagtatcatcgagtgcagcgttctaaaaatgattctacacttttactttgaaaaattggatttgaccagattgtagaatctgggtgaaaatgataggatttggtttggcgaagagctttgttgtcggtgtttttggtgacatcatgactgatcatatcgatggtttt

SEQ ID NO: 27715 - DNA, 367 bp, Homo sapiens
gcaagctttgagtgttccagcagaggatacttttaaatacagtatctagttctcttggcgtatttaaatatgatttattcaacaaaggttaagtttgcacacagccttttggtctcatctctatgaacagcaaggtggactttctttgagtggacaccagacaatggcaaccatccattttctggcaaggaaaagagctagtaggtattttcattttttcagttcaactgtgagaacactgacctgcagaagccccaaaggcagggtatagattcttcagcctggtgtgtttccattgtttcttgggtttttgctttgttaagctcatgtgtagcatatttcaaaaaataggtcataaacattcagt

SEQ ID NO: 27716 - DNA, 432 bp, Homo sapiens
atcataattctttgtgcctctgctcaagcccttcttcctgcctggaataccctcttttcagtcccggctaattacatctaccatcccattccaagtggccgctggaaactcacttccttatgttctataaattaaaacaaaaaaaccaccaccccacacaccaaaaaaaaacaaaaaccacaccccagagggagatgtatattactagagagggagtcttgctctgttgcccaggctggagtgcagtggcgcgatctcagctcaccacaacctccgcctcatgggttcaaccgattctcctgcctcagcatcccgagtagctgggactacaggcgcgcgccgccacgcctggctaattttttgtgtttttggtagagacggggtttcactatgttggccgggctggtctcgaactcctgacctcgtgatccg

SEQ ID NO: 27717 - DNA, 421 bp, Homo sapiens
atcataattctttgtgcctctgctcaagcccttcttcctgcctggaataccctcttttcagtcccggctaattacatctaccatcccattccaagtggccgctggaaactcacttccttatgttctatgatttctttcacaatttacactttttttgttttgttttgttttgtttgggggggggggttgtttttctgagagggagtcttgctctgttgcccaggctggagtgcagtggcgcgatctcagctcaccacaacctccgcctcatgggttcaaccgattctcctgcctcagcatcccgagtagctgggactacaggcgcgcgccgccacgcctggctaattttttgtgtttttggtagagacggggtttcactatgttggccgggctggtctcgaactcctgacctcgtgatccg

SEQ ID NO: 27718 - DNA, 669 bp, Homo sapiens
ccctgagtctctgcagcaaaagccatgtcagaggggagattataactaggtaactataacaagcacttgagcacttaccatgttccaagcactatcaccaaggtactgttggggtttatggcagtctaacggtaagaaaaatgtggtaaaatgaggtaatcatgctgctatagctttttgctttttttcatatagtatcaagttggtcagaattagctttctctgactggtctgcttccgtgtttctctgtgatggtgttaagattatgaaagaaaaagaagattacctaagactgctacaagtgttaactatatgcccttaagaatgagcttgactttggaagtaaagcttttcagatcttagtctacccggggcctttgttgatgggtctgtggttctgtagacccctggctttcactgtgttctcagaggtacaccagattgagagcagagttcttctttggaagtcccagagcaaaataactgccatcaagtgagtttgcattcgtatttgtttccccttccatagagggttagttttagttacctctagcttggagttcctgagaaggctggttataggactgagcgtgggaaaggaaccctcttcaggattacctcagtcccatcagtctaccccattgtgacattgagcccaacacacacgc

SEQ ID NO: 27719 - DNA, 454 bp, Homo sapiens
tcccgacacctgctagcccctgcccaagtggtttttcctcaagcccattgggtggaaatgctggagatgctgctgaagtttctctaagaagggaacggaggcacctgccatagtgatgaacagaggtatggtagtgagtactgagtgctgagtgctgatactgagcacagagtactgagtattgagcaccaagtactgagcatgggccagctgggttttgggcccatttcaccctccccctggcctctggggtgcccctaactgggatccctgccatgcacatgacagattccccctgtggcctgactgtggctccaggtttccagagagggtccccagcccggcaggacccccgttcaggtcctaagtcatttgtcggccatgctctgtccccagaacctcagcaaggggggcgctgtgagcaagctgatggagagcatggcagccgaggagg

SEQ ID NO: 27720 - DNA, 651 bp, Homo sapiens
tgagaagcccagtcccactatacattggagaactcatacaaaagagaacatttatgagtgtagtaaatgtgggaaaagcttcagaggaaagtcacacctctctgttcatcagagaattcatacaggagagaaaccctatgaatgtagtatatgtgggaagactttcagtggaaagtcacacctctctgtccatcatagaactcatacaggagagaaaccttatgaatgcagaagatgtgggaaagcctttggggagaagtcaacccttattgtacatcagagaatgcatacaggagagaaaccctataaatgcaacgaatgtgggaaagcctttagtgagaagtcaccactgattaaacatcagagaattcatacaggagagagaccctatgaatgcactgactgtaaaaaagccttcagtaggaagtcaactctcatcaaacatcagagaattcatacaggagaaaaaccttacaaatgtagtgaatgtgggaaggccttcagtgtgaaatcaactctcattgtgcatcacagaactcatacaggagagaaaccttatgaatgcgtccgtcgaagcgacggaccattcacaaagagcacctcatcataatttattgaatgcgtccaggatcctgctagatcacatcagca

SEQ ID NO: 27721 - DNA, 262 bp, Homo sapiens
gaggcagaggttgcagtgaactgagatcgtgccactgcactccagcctgggcattatagccagaccttgtcaaataaataaataaacaaacccatggtataaatgagaggaatcatgctctatattcttttattaatagagacagggtcttgctatgttgccaggctggtctcgaactcctgacctcaggtaatccgcccgcctcagcctcccaaagtgctgggattataggcgagagccaccacgctcagtgagtatgaca

SEQ ID NO: 27722 - DNA, 1004 bp, Homo sapiens
tgagaagcccagtcccactatacattggagaactcatacaaaagagaacatttatgagtgtagtaaatgtgggaaaagcttcagaggaaagtcacacctctctgttcatcagagaattcatacaggagagaaaccctatgaatgtagtatatgtgggaagactttcagtggaaagtcacacctctctgtccatcatagaactcatacaggagagaaaccttatgaatgcagaagatgtgggaaagcctttggggagaagtcaacccttattgtacatcagagaatgcatacaggagagaaaccctataaatgcaacgaatgtgggaaagcctttagtgagaagtcaccactgattaaacatcagagaattcatacaggagagagaccctatgaatgcactgactgtaaaaaagccttcagtaggaagtcaactctcatcaaacatcagagaattcatacaggagaaaaaccttacaaatgtagtgaatgtgggaaggccttcagtgtgaaatcaactctcattgtgcatcacagaactcatacaggagagaaaccttatgaatgcagagactgtgggaaagcattcagtgggaagtcaactctcattaaacatcagagaagtcacacaggagataaaaacctatgattatacttgagagtgggataattatactagtagttatttgtcatttgactattactagtctcattatttgtcaaataatcatggcgagtaatcttataaatgtccagaatattggaaattcttcatatgttaatgttcatttaacttaatacaaagtacaaaagtataattccagcctgggcattatagccagaccttgtcaaataaataaataaacaaacccatggtataaatgagaggaatcatgctctatattcttttattaatagagacagggtcttgctatgttgccaggctggtcttgaactcgtagcgttaattgatcctcccacctttgcctcccaaagcacttgtatta

SEQ ID NO: 27723 - DNA, 404 bp, Homo sapiens
cttgtagaagtcattgcttcagtaagagttgattatgtgttcatttctcaaggacaatgggtctgagtggcaaataccttcagaattttttttttttagggataagctaaactaagtcagatttctttgtgaaataggggatgtggcaaaacaaagggtggttagattcaaagtttgaaaattttgggtatcatagctattggaggtagggaatggtaaagggttggaagagggtggaaatatccagggaccacatccatttgctcttcttgttttctgcttcaggggtagtgacttcttttgaaaaatgagaggtttattttcataacaggcagtgaggaatagttaggcagatgtgtgtgggttggttctggcccttgattagcagacaggaatgatactgc

SEQ ID NO: 27724 - DNA, 148 bp, Homo sapiens
gggaagtgtgggggctgttaccctccttgttttacagagacagatactgaagagtgggagatgtaaataacttgccttgtatcaaacaattgatgagcagaagccagtcccaggccattgcactctactttctgtttctaaaccaaca

SEQ ID NO: 27725 - DNA, 377 bp, Homo sapiens
tatacataaaaataaacagctaagagatgttatgctaaagtattgatggtttttctatgaaagtgtggtactagtacaaatagatcactaagaaacaagagagtccagctatagacccaaatctgatatgtgatgaaggcggcatttcaaatcatgggggaaagatggattgttcatgaaatggtattagggtgaccgactgaggacaagatgttcagctggatccctgtatcatttctttttcttttcgcttttcttttctttttttttttttttttttttgagacagagtctctctgtgtcgcccagtctggagtgcagtggcgtgatctcagctcattgcaatctccgcctcctggattcaagcaattctcctg

SEQ ID NO: 27726 - DNA, 398 bp, Homo sapiens
cattgcctgtagaacacctaatgtcacgtgtagctatacatatgaatacctacttttaatccctatgtgaatgattaacctatgtttcattcctcatctctggcacattaacatcattctggaataaccccttttaaatttaatttaaattttaatattttattattttacagacagagtctcgctctgccacccaggctggagtgcagtggtatgatcacggctcactgcagccttgacctcccgggctcaagcagtcctcccacctcagcctcccaagtagctaggactatagggacacaccactgccaggctaatttttgtatcttttgtagagatggggtttgagaccagcccgggtaacatagcgaggcctcgtttctccaaaacaaaaaaac

SEQ ID NO: 27727 - DNA, 1090 bp, Homo sapiens
atcctttgtcaagacagatattttgagaatgtttgcttctgtggcttgtcacttcatttcattaacaatgtcttctatgagccaacagtttcaactttgataaaatcgaatttatcattttttttcttttgtggtaatagttttctgtgtcctgcctacctccacaatgccaacatatacccatgttatgattgataattttagttttttggttttaggtctacaacctagcttgacttaatttctgtatatggtgtaaggaagatgtcaggcttcattttttcctctacagatatcctggtgaacataatgccatttgttgaaaacagttttgtcctatttcacttttgctgaaaattagatgattgtataggtgtgtgtctgtttcgggacacactgttttgtcccattgacgtacaaatggatcttaatccagttcacactgtcttcattactgcagattttcatgggttgggtaaggccagtcctctttgttcttttaaaaaattaagtatttttggtcctttgcatttttatataaagtttgcttttgccacttcctacaaaaaaaaaagcctgttgagattttgaatgagaatatgtggaattgtatgtcagtttccctcatactgacaatattagcaatattgagtcttcttacccgtgagcgtagtgtatttcttaatttatttagatattctttaatttatcctcacaaacattttgcagtttttggtatagggttttgctcatactttgtcaaatttgtttctgaatattttgtttttttctgacgttccttcaaatggcatagctttgttggtattttttgctactgatttgtagtaaatcaattttggattgatatgctaggggtatatacaaatacagttgatttttgcaagcggacagctttccagggactgctgtagcataacaaatgactcccaaaccctctgactggaggcagccatgcctttgtgctctcgggctctgtgggtcaggatctctgtcagggcatggtgtggacggctgatttgcgcaccatgatgtctggaatctcaggtggtggctggaagcatctagactc

SEQ ID NO: 27728 - DNA, 403 bp, Homo sapiens
gatcgcttgagcccaggagtccaagattggcctgggcaacagagaccctatctctacaaaaatatatatttttttaattaggcaggcttggtggcatgcacctgtggtcccagctactcatgaggctgaggtgagagcattgcttgagcccaggaggtcgaggctacagtgagccgtgatcgtgccactgcactccagcctgggagacagagggagactctgtctcaaacaaacaaaaaacaacaaacacaaaacaaaacaaaaaaaactaaaaaaacaaaaactcagaaataggcagcagcagctaaagataagcagaacaaccatgttcatgttcatattcatgtaagaatgtattttgttaattgactccctgaattcaaaatacagtgcatccatggca

SEQ ID NO: 27729 - DNA, 382 bp, Homo sapiens
cccaaaatacttgttagatttcatttttatagaatgcaaattaaaaaatatattattatagggcacctacatatgtgcataagctataaagaaaaacaagaggcctggcgtggtggctcacgcctgtaattccagcactttgggaggccaaggcaggcagaatgcttgaactcaggagctcaagaccagcatgggcaacatggtaaaaccccatctctaccaaaaatacaaaaattatctgggcatggtggcacgcacatgtggtcctgatacttggcaggttggggtgggaggatcgcttgaacctgggaggcagaagttgcagtgagccaagatggcaccactgaactccaacctgggtgacagagtgagacctgtctca

SEQ ID NO: 27730 - DNA, 1776 bp, Homo sapiens
cccccgagccgcacggagctgcgggcagcgggcggactgttaaaccgcggcggcggcggcggcggcggcggcggcggccggggcgggagcggggcgcgctctggagacgagtcagcggcgccccgggtgggggaggcgggcgggcagctagagatcacctcagcagcccccaccacggccggaccgaaggtgcggcggcggaggggagccagggcgccccagcaggtttccaatacttatctacaggaatcgccatgaccccagctctgagggaggcaacagcaaagggtatcagcttttcatctttgccaagtaccatggagtctgacaagatgctctacatggaaagtcccagaactgtagatgaaaagctaaagggagacaccttttctcagatgcttggatttccaactcctgaacctactcttaatactaattttgtgaatttaaaacattttggctcccctcagtcttcaaaacattaccagactgtttttttaatgagatctaattctacattaaataaacacaatgagaattataaacaaaagaaattaggggagcccagttgcaataagctgaaaaacatactgtataatggcagcaacattcagctcagtaaaatctgtctttctcattctgaagagttcatcaaaaaggagcctctatcagataccacgagccagtgcatgaaagatgtacaaattattctggattcaaatataaccaaagacactaatgtagataaagtacaactacaaaactgtaaatggtatcaagagaatgcacttttggataaagttactgatgctgagattaaaaagggtttattgcactgtactcaaaagaaaattgtacctggccactcaaatgtgcctgttagttcttcagctgctgaaaaagaggaggaagtacatgctcgtttacttcattgtgtaagcaaacagaaaattttacttagccaggctagaagaactcagaaacatttgcagatgctcctggcaaagcatgttgttaagcactatggtcagcagatgaaattgtctatgaaacatcaactccccaaaatgaagacatttcatgaacctaccacaattttgggtaatagtttacctaaatgcactgaaattaagccagaagttaacacattgactgcagagaataaattgtgggatgatgcaaaaaatggctttgcacggtgtacagctgcggaaatccaaagatttgcattttctgctacagggctgttgtctcatgttgaagagggtttggattccgatgcaactgatagcagctctgatgacgatttggatgaatatacccttagaaaaaatgtggcagttaactgtagtactgaatggaagtggcttgtagacagagcacgagttggcagccgatggacttggcttcaagctcagatttcagacctagaatgcaaaatccaacaactaacagacattcacaggcaaattcgtgcctccaaggggatagtggtcctagaagaatgtcagcttccaaaagatattttgaaaaaacaaatgcaatttgcagaccaagcagcttcactaaacattctagggaatcctcaggttccccaggagtgtcaagatcctgtaccggaacaagattttgaaatgtcaccaagcagccctactttacttcttcgaaacatcgaaaaacaggtaaagtcaaagtaaggatatcagtggtatgaaatgacttttcattgattttgtaaactattcaaataaacatcattatatgtgtaaattcctg

SEQ ID NO: 27731 - DNA, 2042 bp, Homo sapiens
cccccgagccgcacggagctgcgggcagcgggcggactgttaaaccgcggcggcggcggcggcggcggcggcggcggccggggcgggagcggggcgcgctctggagacgagtcagcggcgccccgggtgggggaggcgggcgggcagctagagatcacctcagcagcccccaccacggccggaccgaaggtgcggcggcggaggggagccagggcgccccagcaggtttccaatacttatctacaggaatcgccatgaccccagctctgagggaggcaacagcaaagggtatcagcttttcatctttgccaagtaccatggagtctgacaagatgctctacatggaaagtcccagaactgtagatgaaaagctaaagggagacaccttttctcagatgcttggatttccaactcctgaacctactcttaatactaattttgtgaatttaaaacattttggctcccctcagtcttcaaaacattaccagactgtttttttaatgagatctaattctacattaaataaacacaatgagaattataaacaaaagaaattaggggagcccagttgcaataagctgaaaaacatactgtataatggcagcaacattcagctcagtaaaatctgtctttctcattctgaagagttcatcaaaaaggagcctctatcagataccacgagccagtgcatgaaagatgtacaaattattctggattcaaatataaccaaagacactaatgtagataaagtacaactacaaaactgtaaatggtatcaagagaatgcacttttggataaagttactgatgctgagattaaaaagggtttattgcactgtactcaaaagaaaattgtacctggccactcaaatgtgcctgttagttcttcagctgctgaaaaagaggaggaagtacatgctcgtttacttcattgtgtaagcaaacagaaaattttacttagccaggctagaagaactcagaaacatttgcagatgctcctggcaaagcatgttgttaagcactatggtcagcagatgaaattgtctatgaaacatcaactccccaaaatgaagacatttcatgaacctaccacaattttgggtaatagtttacctaaatgcactgaaattaagccagaagttaacacattgactgcagagaataaattgtgggatgatgcaaaaaatggctttgcacggtgtacagctgcggaaatccaaagatttgcattttctgctacagggctgttgtctcatgttgaagagggtttggattccgatgcaactgatagcagctctgatgacgatttggatgaatatacccttagaaaaaatgtggcagttaactgtagtactgaatggaagtggcttgtagacagagcacgagttggcagccgatggacttggcttcaagctcagatttcagacctagaatgcaaaatccaacaactaacagacattcacaggcaaattcgtgcctccaaggggatagtggtcctagaagaatgtcagcttccaaaagatattttgaaaaaacaaatgcaatttgcagaccaagcagcttcactaaacattctagggaatcctcaggttccccaggagtgtcaagatcctgtaccggaacaagattttgaaatgtcaccaagcagccctactttacttcttcgaaacatcgaaaaacagagtgcacagttgactgagatcatcaacagtttgattgcccctctcaacttgtccccaacttcatcacccctctcttccaaatcctgtagccataaatgtctggctaatggcatttacaggaggtaggtatcaatggaatagcttagcttttaaattcaactttgcctattttatcttattttgattttgttttgatattttaagtattatagctactttttttgtacattaggggctactagagtacaatcaatataccatggatgcattttttgataatattaaatttacacaattaaggtaatgataaatctaggaatgagggagagagatttctgggaagtttcataatgtttctta

SEQ ID NO: 27732 - DNA, 666 bp, Homo sapiens
ggataaagttactgatgctgagattaaaaagggtttattgcactgtactcaaaagaaaattgtacctggccactcaaatgtgcctgttagttcttcagctgctgaaaaagaggaggaagtacatgctcgtttacttcattgtgtaagcaaacagaaaattttacttagccaggctagaagaactcagaaacatttgcagatgctcctggcaaagcatgttgttaagcactatggtcagcagatgaaattgtctatgaaacatcaactccccaaaatgaagacatttcatgaacctaccacaattttgggtaatagtttacctaaatgcactgaaattaagccagaagttaacacattgactgcagagaataaattgtgggatgatgcaaaaaatggctttgcacggtgtacagctgcggaaatccaaagatttgcattttctgctacagggctgttgtctcatgttgaagagggtttggattccgatgcaactgatagcagctctgatgacgatttggatgaatatacccttagaaaaaatgtggcagtgtaagtgcaaaattattattagactattttctgttccatatatagcagcaattatcttagtttccaggtatgttgacaagaaatagattttctaaaatcttaatgctataatctttt

SEQ ID NO: 27733 - DNA, 1962 bp, Homo sapiens
cccccgagccgcacggagctgcgggcagcgggcggactgttaaaccgcggcggcggcggcggcggcggcggcggcggccggggcgggagcggggcgcgctctggagacgagtcagcggcgccccgggtgggggaggcgggcgggcagctagagatcacctcagcagcccccaccacggccggaccgaaggtgcggcggcggaggggagccagggcgccccagcaggtttccaatacttatctacaggaatcgccatgaccccagctctgagggaggcaacagcaaagggtatcagcttttcatctttgccaagtaccatggagtctgacaagatgctctacatggaaagtcccagaactgtagatgaaaagctaaagggagacaccttttctcagatgcttggatttccaactcctgaacctactcttaatactaattttgtgaatttaaaacattttggctcccctcagtcttcaaaacattaccagactgtttttttaatgagatctaattctacattaaataaacacaatgagaattataaacaaaagaaattaggggagcccagttgcaataagctgaaaaacatactgtataatggcagcaacattcagctcagtaaaatctgtctttctcattctgaagagttcatcaaaaaggagcctctatcagataccacgagccagtgcatgaaagatgtacaaattattctggattcaaatataaccaaagacactaatgtagataaagtacaactacaaaactgtaaatggtatcaagagaatgcacttttggataaagttactgatgctgagattaaaaagggtttattgcactgtactcaaaagaaaattgtacctggccactcaaatgtgcctgttagttcttcagctgctgaaaaagaggaggaagtacatgctcgtttacttcattgtgtaagcaaacagaaaattttacttagccaggctagaagaactcagaaacatttgcagatgctcctggcaaagcatgttgttaagcactatggtcagcagatgaaattgtctatgaaacatcaactccccaaaatgaagacatttcatgaacctaccacaattttgggtaatagtttacctaaatgcactgaaattaagccagaagttaacacattgactgcagagaataaattgtgggatgatgcaaaaaatggctttgcacggtgtacagctgcggaaatccaaagatttgcattttctgctacagggctgttgtctcatgttgaagagggtttggattccgatgcaactgatagcagctctgatgacgatttggatgaatatacccttagaaaaaatgtggcagttaactgtagtactgaatggaagtggcttgtagacagagcacgagttggcagccgatggacttggcttcaagctcagatttcagacctagaatgcaaaatccaacaactaacagacattcacaggcaaattcgtgcctccaaggggatagtggtcctagaagaatgtcagcttccaaaagatattttgaaaaaacaaatgcaatttgcagaccaagcagcttcactaaacattctagggaatcctcaggttccccaggagtgtcaagatcctgtaccggaacaagattttgaaatgtcaccaagcagccctactttacttcttcgaaacatcgaaaaacagagtgcacagttgactgagatcatcaacagtttgattgcccctctcaacttgtccccaacttcatcacccctctcttccaaatcctgtagccataaatgtctggctaatggcatttacaggagaacacagagaacaagggaaagcatcatgcaagatgagacaagggaaagcatcatgcaagatgagaacaagttatgttatatgcctgcaacccaaaggatctaaactacatcatttggaagatttttattattctccagcttccagttagaaatctaaa

SEQ ID NO: 27734 - DNA, 379 bp, Homo sapiens
cacagcaaaattaagaaatagttaagtcactgaaacggaagttgtgggccctggattcaaacccaagcaggccaattagaaagtccatgcttttggccaggtgcggtggctcacgcctgtagtcccagcactttgggaggctgaggcgagcagatcatttgaggtcgggagttcgagaccagcctgaccaacatagagaaaccccatccgtactaaaaatacaaaattagctgggcatggtggcctttgcctgtaatcccagctactcaggagggtcaggcagaagaatcgcttgaacctgggaggcagaggttgcagtgagccgagatcaagccattgcacactccagcctgggcaacaagagctaaactccgtctca

SEQ ID NO: 27735 - DNA, 1018 bp, Homo sapiens
tgagactcctgctgttgcccaggctggagtgcagtggtgcaatctcggctcactgcaagctccacctcctgggttcatgccattctcctgcctcagcctcccgagtagctgggactacaggcgcccgccaccacacccagctaattttttgtatttttagtagagacagggtttcactgtgttagccaggatggtctcaatctcctgacctcgtgatctgcctgcctcggcctcccaaagtgctaagattactggcgtaagccactgcgcctggccgatgggctgcttttcatccttcagatcagagttccaatgtcccctcctctgtgattccttccctgaccaccctgaagcagctcatacccgtctttacctcctcgtcctgtttcattttcatccaagcacctactgccctctgagatgatcttattgctggttctattcccctatcagtgattctgttttgctcacagatgtatccacagtgcctacaaaagtgcttattgcaccgcagtggtagaagcctagacaatgaagcaggccaggaaggcctttcagactcagaggaggttccactttgatgtcacatgtagtaagatggttccttttcctagacctcatctgtgagatgaggggttgggctagataatctctaaagaacctttgggcactgacatcctttgattctgagagaccccacgactcatcccccaagttgaaggccacagacattaagtgggagtaggcagcagagggtattgggtgacagatcaagctctgggactcaggccctttctttagtcccactgaaggttactgaaggtcagagatgggaatggacatgattaactacctactgcgagctgaagatgtgtgtgggtgactttcagaaactgtgtcctgtcctcctcggttgtgacacagtcccattttacagaggagaaactgagtttcaagtgaaataaagaagttgttcctgatcagagacagagccaggaagagggaggcgggagttgga

SEQ ID NO: 27736 - DNA, 451 bp, Homo sapiens
atatgcctgtcacaacaaatctctggtcctaatttgctgtctggtactgatttcctgcttcctcccaccccgcaaggatatacaaggagtccacacaacacatgttatcgccaaggcatgattcgtgcagggctttggctctggtagaaatcaaaggttcagctgccatgagctcatcattgcttttgaatagtgctgttggactctttttgattccaaatttattccctgctcccagtagtttggtccctccctttttaacattgtagtggccatatgaagctctcagtgtccaacgtccaggtcactttagtgatattcggtgtgctacagtcaggtggtcctcaaaggcctttcgggacaaagcccttgggatgattaacagacctacagagaacaaaaagcatgtatggctcttgtttctcctcctgtggggaggctgcctgcatgg

SEQ ID NO: 27737 - DNA, 373 bp, Homo sapiens
aatggatgtattataaaatataattatattatgcttaaaaatttatacaaattaatgagaaaaacaggctattgtttgtcttttcatttaataactcagttggctcagtgccctggctcacacctgcaatcccagaactttggtaggctgaggctggtggatcactggagccaagtagttcaagaccagcctgggcaacatagcatgactctttctactaaaaaacaaaaaaaattaactgggtttggtgacatgtgcttgtagtcctagcaactcaggaggactgatgggacgaatccttgagcccagaaatttgaggttacagtgagctatgatcacaccactcaagcctgggtgactgagaccatgtcac

SEQ ID NO: 27738 - DNA, 477 bp, Homo sapiens
ttgccttgcacttttatattatggagatagtttctttaaacctcatgaatcaacttctgctagcttcacacttttcttttgcagcttcctcgcctctctcatcctgtgtagaattgaagagagctagggccttgctctggagtaggctttggcttaagtgaatgttgtggctggtttgattgtctatggagaccactaaaacttaggctgggcacagtggttcacacctataatcccagcactttgggaggccgagaggggcggatcacttgaggtcaggagttcgagaccagcctggccaacatggtgaaactccatctctactaaaaatacaaaaattgagctgcaacaatagaaagatggtggagcaagaacaaagaaacaatccctttgactgggcgcggtggttcatgcctgtaatctcagcactttgggaggctgaggcgggtggatcacctgaggtcgggagttcgagag

SEQ ID NO: 27739 - DNA, 4476 bp, Homo sapiens
  misc_feature (386)..(386): n is a, c, g, or t
  misc_feature (1160)..(1160): n is a, c, g, or t
  misc_feature (1420)..(1420): n is a, c, g, or t
  misc_feature (1898)..(1898): n is a, c, g, or t
aatagcttatccactcactatgagcagattatttaacatttctgattttcaaatatctccgtctgtaaaggagactaatattagagctttgtgagagctggagatggtgtcagtaaagtaagtagcacacactggacactcagaattgttactagtattgccaaacacagcagaaaccagaacaggctgggcagagaggcctctctctggaggcaaagcctcgagcatcccaaatgccttagagctgatatcctgcctattccatgcagcccctcagccccggcccctgctttgaccgaggctgattttcatgtgcaaagccttgagttcagtctcccatgaagcaccaagtcagaaacactgtcagcctttccaagcggtagatntgtggctccagccaaaaaaaaccaggaccccctcaatctccagaagacaaaggggagccaatactaataacaccttattttcttatagtactgggtacttttagaaatattctagctgtattaatccattctcacactgctataaagaactgcctgagactgggtaatttataaagaaaagaagttcaactgactcacagttccacatggctggggaggcctcaagaaacttacagtcatggcagagggggaagcaaacacatccttcttcacaaggcggcaggagagagaagtgctgagcaaagaggaaaaagccccttataaaaccatcagatctcatgagaactcactcactatcatgagaacagcagcatgggggtaactgcccccatgattccattacctcccaccaggtctctcctatgacacctggggattacggtaactacagttcaagataagatttgggtggggacgtagccaaccgtatcactagcaacgtgggataggaagtatagctatcactccattgtttagatggggaatagggctcaaagaggttaaatcagcactgtccaatataatacaagctgcatatgtgatattattttctaaggtaaagagaaacaggtaaaattcatcttaataatgtatcttatttaaaccagtatacctcaaatattatcgttttaacatgtaaccaacactttaaaattattaatgagttctttcatactcttttcatcctaagtcttggaaatctggtgtgtatcncacactcacagcacatgtcagttcataccagtcacattttaagtgcagagtcatcacctgtggccagtggcttccttcctgggtagcacagggttaatggttaaacgctgcatctcaggtcacacagcaggttaaggaaagcagaaatgagagtgagggttccgaatttctcacgccctgttctttgcatgcatcacctgcttctcgagtgttcctgcctgcctggaggcagtatattgtggtggcgaggggtgtgaacngtggcttagattagagattcacatcccagcagtgctgctttttagccatggggccttgagcaagttccctgtctgcactccagttttacatgtgtaaaatggtgatgataatgaggcctgccacatgaggtcgaggtgaagagtaaattcattttattaataaattagctccgtacagcacccggcatattcaagccctcagtaaatattcaggggctccccttttaaaggagtcctgcctgtgctgtaaaggctcatctgctactggaaggaggagctgcttgggcagcttttgggttgactaagagcttattcgatcagcctacttcccatgagcttgcacttccagggaccaggagggggaatggaggttgctgctggaatgtttggatttgagggtttggagttttccagtgcatccagacaaggatgcagccactctgatagcttttcacacagcaaacgctggttggccccnaccaggtgccagtcttgtgcgagataccctgggggacgctgacagtcagcagcatgacgtttcctcacttagcacggtgccaggcggacttcctgttcccgtgggtactgcatgatttgtcgtctctgtgtccttgctgacgttttatcctcccctcagtgcctttccctctcccaaatttcctcttgtccaaacccacttaaatgccacctcccctgagcctcattccttgacccttgccccagccatcctccttaccccaaaagctggaaacagacacactcctttcagattcctgtaatgctgtctctacctcccggagtcccttatgcaccctctgtcttgagggggctgccccactacaccaacatctcctgaaggactctcattgacctcgagattcttccagcacctccctcacaactggcatgggatgaacaaactcattagagaatgaatgaatggagttaatcttatctcccagtttaactgaaaagacagagacagtggcttcttctgtaaacaccacagcagaacaaacgtccatgctggcctactgagtaatagttgtcaaaggagcatgttcaaaaacacagagccctaggctgcctcccgcaaggattgtttcagcaggtctgaggtggggcccagcgagctgtatattttttcatctctctaagagattctacaacacagacaggcttggagagacccccaacttggaccatttaactagtgagaggactaacatgtacatatttatgatgcagctacagggcccatgtggacaaagtactgtgatttcatttcacaagtactcttaggtgttaattgtgtaaaggaacttcgggtcccatttggttaaaatgtagctcttatgaaaggaagttgtaggaaagaaagggggatgcctggaagggccttggattccctggaagacacttggactgtgttcagggagcagcatggaacaccgccgctgggggaatggcattatcgggccacatgagagcatgtggccaggacatctgcaccttcacaccatgttcttcttctctgacaggtctcccgtgatggccggtggactgttcgccgtggatcggaagtggttctgggaactcggcgggtatgacccaggcttggagatctggggaggggagcagtatgaaatctccttcaaggtgagccagctctccagacgccccgttcttggcacagcctcctgagtgcctgtcccagtaggtgtctcagcttctgcctgagcttggaaagactggaggcctcagggttctgtagcccttctgcccatcaggtgaagaagacaggggctcatgggccactctttgttgtggggtgggggggtgtgggagggaaggggagtactctccagctgccaaaggctggtcctcaccacagctctgactggcatttgccttgtgtcttcttaagatgttggaataaggtcttgcttctactcagatggcaggtctgagattgagatgtccagcaaataagcagtgggccagagaagctaggaaggccaaacaggatacgtaggcctagaggagtcctctcagtcaccccaagttttccctttgtacctgttgctctaggagtttgacaaagaccagtgagcataagctccagttgtaaagttacaaaggcctggattcagatcccagctccatcatcaggagctatctgactttgggcaagttagatcacccccccgagctttctttcctcatctgaaataagggaataataatactacctagcttacagagctatcgtgaagattaaatgagatcatgtctagaaagtgcttagcatacaacctgggaacatgaccagcaattaataattggtagaaattgttaaagtttcggtgagtaaatatttactgtaacctacttgaccagcctatggactctggaagctttctgacagtagtggtaaaggagttactagttaactaataactaattaagcacccaaacttccaaggctacattctccactttatttgtgggagtctgtcttgttctcaagtgaaagcttggaccttctgaggggagggttagcttgtcccatgcccttgtggcctgtcagagtcagcttctaacagcttagacccctggctaaggcatatccccagcccacaagggacagatagcaccattactgatctgacccctgtgaacacacaactctgatgccccctcatcgggcctcaactttcagtgcaaaggaccattgtcaggcacagtgaattaaggctttggtattggtgccagagtgccacgatcagatcctagctctgccgtgtcctgccagctgtgtgatcttgggcaaggaatcctcacctcactgagccttggtttctacttccataaagtgggtttaatgaaacgttaatcctcacagagttgttgagaggattaagtgagaccatgcttattaggtgcttcttaataaattatcctaaagattattatcaatacattaatattattatctgcaacagtggttgagtagttcagaactggagaacataaattcttgattagccaaaaaa

SEQ ID NO: 27740 - DNA, 743 bp, Homo sapiens
agcgggttggagcggggccggcgccgcagccgcttctgctggctgagctgctgccgccgccgggcggacgggcggacgcgcggagctgggggcggcgcggcggggccggcggggctgcggcggggctgaccggccccgatgaggcggaaggagaagcggctcctgcaggcggtggcgctggtgctggcggccctggtcctcctgcccaacgtggggctttgggcgctgtaccgcgagcggcagcccgacggcacccctgggggatcgggggcggcggtggcgccggcggcgggacagggctcacacagtcgacaaaagaaaacgtttttcttgggagatgggcagaagctgaaggactggcatgacaaggaggccatccggagggacgctcagcgcgtaggaaatggagaacaaggaagacctaaccccatgaccgatgctgagagagtggatcaggcataccgagaaaatggatttaacatctacgtcagtgataaaatctccttgaatcgctctctcccagatatccggcacccaaactgcaacagcaagcgctacctggagacacttcccaacacaagcatcatcatccccttccacaacgagggctggtcctccctcctccgcaccgtccacagtgtgctcaatcgctcgcctccagagctggtcgccgagattgtactggtcgacgacttcagtgatcgagatctgccgactgcatcaactccctctccctttgtgtg

SEQ ID NO: 27741 - DNA, 5776 bp, Homo sapiens
agcgggttggagcggggccggcgccgcagccgcttctgctggctgagctgctgccgccgccgggcggacgggcggacgcgcggagctgggggcggcgcggcggggccggcggggctgcggcggggctgaccggccccgatgaggcggaaggagaagcggctcctgcaggcggtggcgctggtgctggcggccctggtcctcctgcccaacgtggggctttgggcgctgtaccgcgagcggcagcccgacggcacccctgggggatcgggggcggcggtggcgccggcggcgggacagggctcacacagtcgacaaaagaaaacgtttttcttgggagatgggcagaagctgaaggactggcatgacaaggaggccatccggagggacgctcagcgcgtaggaaatggagaacaaggaagacctaaccccatgaccgatgctgagagagtggatcaggcataccgagaaaatggatttaacatctacgtcagtgataaaatctccttgaatcgctctctcccagatatccggcacccaaactgcaacagcaagcgctacctggagacacttcccaacacaagcatcatcatccccttccacaacgagggctggtcctccctcctccgcaccgtccacagtgtgctcaatcgctcgcctccagagctggtcgccgagattgtactggtcgacgacttcagtgatcgagaccgcattgctcggaaccgcaagaccattgtgtgcccgatgattgatgtaattgaccatgacgactttcggtacgagacacaggcaggggatgccatgcggggagcctttgactgggagatgtactacaagcggatcccgatccctccagaactgcagaaagctgaccccagcgacccatttgagtctcccgtgatggccggtggactgttcgccgtggatcggaagtggttctgggaactcggcgggtatgacccaggcttggagatctggggaggggagcagtatgaaatctccttcaaggtgtggatgtgtgggggccgcatggaggacatcccctgctccagggtgggccatatctacaggaagtatgtgccctacaaggtcccggccggagtcagcctggcccggaaccttaagcgggtggccgaagtgtggatggatgagtacgcagagtacatttaccagcgccggcctgaataccgccacctctccgctggggatgtcgcagtccagaaaaagctccgcagctcccttaactgcaagagtttcaagtggtttatgacgaagatagcctgggacctgcccaaattctacccacccgtggagcccccggctgcagcttggggggagatccgaaatgtgggcacagggctgtgtgcagacacaaagcacggggccttgggctccccactaaggctagagggctgcgtccgaggccgtggggaggctgcctggaacaacatgcaggtattcaccttcacctggagagaggacatccggcctggagacccccagcacaccaagaagttctgctttgatgccatttcccacaccagccctgtcacgctgtacgactgccacagcatgaagggcaaccagctgtggaaataccgcaaagacaagaccctgtaccaccctgtcagtggcagctgcatggactgcagtgaaagtgaccataggatcttcatgaacacctgcaacccatcctctctcacccagcagtggctgtttgaacacaccaactcaacagtcttggaaaaattcaataggaactgagccctcatgtccccttggcaggccccccagggtctggcactcactgcagacttcctctttcaagggaggcagggcccctgtgggcactaggtgtaaaaggtgctggccaaatggttcagggtgaagagggctcttgattcaggggctggggtctgcctggtccttgagcccctgagttgtgggggtagggtgaagagcatatcccacaagaggccccacagggagcagagactgctttaatccctgctgacatcacggaaaagcaacagagccttttcaactttgtcactatgtccccttgaacattatgtgggagaacaccaaggtagcctaggccacccaaaagtgagtcctgcgaggttgcccagccctcagatggctctcctacatgatggtgctttagaaacaaaggtaaaatttgcctgtttggggcagcttttagtatcgatgccactcatctgcagcagaagagaaagaagtcctcttggggctttttagtttctgccgtcctggggggaacattgcagttactgcacagcttctgttctctgtcacaaccccaggtgatttggtccggtcaaaggccatacttggggccctaagagtgttcagtattgaatgctgatcagctgccaggtgaggagtcagaagagggagcccccctagacatttctttgcagctatggacatgcgggatatctccccctgctctctgggtatttgaaatgtcaattttagcactctccaggcacaaggacagcccagcaccagctttacagggcagtgtttcagatggccctgagcccacggaaaaggccaggtagacctccaaactagaaatgctggctgatttgccctgatccatgcttccatttccctgtctctcttccccaggcaattactggcctcaaaagaggaacagaggtgctgcgaggtgctcacctcacagagtctggaggcctccaggatcaactgtgggcaaagtgcctgcctctgacctcatcatggttctagttctcatacagaactccagaatttttaaagaactctataattggattgcaaactaggatgctacataggattctggtattccacatccaatatggatttctagaatgctgtgattaaaggagccagccaggtgtaatacagtcaaggcagcccccagcctagagacaatctgtgaaatccaaagttggtggtgttgggaaagcagggggacatgtgtccctcagctcagcagaggctgtggtacaacatggtccttggtgaagacctgcacccctggaacctcccaccatcatcacaactgtagtctcatttgcagtggagaaaagaacccgacgtcccacagccagatatacacccagctccatgccagcccttcatgtttaccttttgctttgttaattacatgtcagactcctagagggcctccagactaataggaagcatttctgtaaccaacctgccacccactgattcagaaatggaaatcacattccacaatctatggcttccaccagctagcccaggaaatacttgaaatcagcattccaattagtgttgagtctcttgattgtgtcatttaccaattaaataactgagacctaagtctgggaacagagccacgaatctgcctttgagatgctggcagatctcaaggccatcaattattgggggagggagggacaaacactcccaatcatccaccagtcagactgaatgtgtagctggcgaggaattacttccacttctggcccagcacaagccctgctttggccacctgtctgcaagagaggcggcccctgtgcttgcaacgcttacgtgttgatcccagtgtccttttccaaatgagtgctgtagctttagaagtggccctctatagaaagaagtcaaaagatgaggccccttctagaatctaggataacaagagtgttgacagtttgaggagtcgaattgagattcatcatcaaagagcaatgcagcgtcgttaaaataaaaactgtgccttttaaaaagaaaaatgcaaatatagagcaaatccctaaacttgaaccatttcctagtgccttgctagacaaacataaaggggcagggttgtggggaggggaacgtttttggtggtgtgtgcagttcctactggatgagtgtgtgtttcttaatgtctcatttcaagcaggagatgttgggtctggagcaagatctgagactgagatgtcccccaagggtgacaggtcagatttatttcagtcagtgcaagtcacactccaaactaaaggctgggcagtgcgtttagtctgtggcctagaagacctcatcagcccccgagaggaggccttgcattacctcactgggacctgtttgggggccatccctgcggtccaccctctgaacccccagcatgtttgtcctgtttctcaccattgggttaaggggtgccgagcactagctagacttccacatagtcccaccccaagtgggcggcagtgttcctggcatgaccaggattcctgtgaaagcaggagcagcagcaagccgtcccgggcctgcctttcccatcctttggttctcctttccagtctgggttcacaccctgaaaagggatgggtgtgtcctctgagcactctggcatttgtcattgctgagcccatatcagtaggtcctgggacttgacaaagtatgtgggaggggaaggaaggacagaacttgactggctccatttcatggaccaactgatcaattgccagtactaagccactcattgttatggcttcctttttgaaaaccacctgtctcaaggattcaggtttctgctcacatccccagctgatgctcaataaaactcagccaggagcatatggagatgctgacagccaggtaatgggtgagactgtggggtcccttttcctctaaagcctttactctgaggataaggtcacaaagtagggtgtgacttgaaagtatcgtgaccatgtggcccaccagcagcctttccaaaggggaactccagagacatttcataatgcaaacagcactgttgctttaagaacaaggcctttggaggtggctaaacttgcacgcacgtgtgtgaaaagccatcccatcttctgcctccagttggagctttcagctgttaaaacagtcagaaactattgattcttccctttaggaaaaaatgctcaggcagaacggggtacatccacaggaggaatcggacgagaggatgtgacattcggtccaggagagaaagagcagtttctgttaaagatgtaacaaatggatttccaaagtctacatgacattcacttttcaaacttcccaccagttgaatttctttttttccttaagaaacaggtgatgtcttggaaaacagctccttatgtctctctgtgcatctccattttcctagtctctggagtctcaaaaagagtggcaaagcactttacagtagtaactgaggaatcagagtctctgcttcagcgatatctagtttgtacagttgggtgatcttttgtaattcctaggaggtaatgcatttttaatgttttctgaagctttgtaagtgtgagagagggacaagaagtgcagttctgttctggaattccttattgctttcaacggacactctttgtgaaaaatccaagtaatattttagttcaaacttgatcttgagccaaggcccactgccacctctgggatgggagtcggacctacataccaagtgacaagttcaccttaacatctgcttccagaatggctttgattcagccgtgccaggcaacagaacagggtcagactcctgctctgttattggcttgaagactaggatcccaaaggggttggaggcagggaatatttgaaaattcagactggaattccaggccaaaagctcaagaccaccagcctctcctcctgcctggaaaaataagcctttgtgaaagactgatttaccatgtacaattgtgattgtgaacgttgttgagtaaacctccagactttctctaaa

SEQ ID NO: 27742 - DNA, 5404 bp, Homo sapiens
gactgcatcaacgccgctgactgcatcacgccgcgtgtgactgcatccaacgccgcctccctcctccgcaccgtccacagtgtgctcaatcgctcgcctccagagctggtcgccgagattgtactggtcgacgacttcagtgatcgagagcacctgaagaagcctcttgaagactacatggcccttttccccagtgtgaggattcttcgaaccaagaaacgggaagggctgataaggacccgaatgctgggggcctcagtggcaactggggatgtcatcacattcttggattcacactgtgaagccaatgtcaactggcttccccccttgcttgaccgcattgctcggaaccgcaagaccattgtgtgcccgatgattgatgtaattgaccatgacgactttcggtacgagacacaggcaggggatgccatgcggggagcctttgactgggagatgtactacaagcggatcccgatccctccagaactgcagaaagctgaccccagcgacccatttgagtctcccgtgatggccggtggactgttcgccgtggatcggaagtggttctgggaactcggcgggtatgacccaggcttggagatctggggaggggagcagtatgaaatctccttcaaggtgtggatgtgtgggggccgcatggaggacatcccctgctccagggtgggccatatctacaggaagtatgtgccctacaaggtcccggccggagtcagcctggcccggaaccttaagcgggtggccgaagtgtggatggatgagtacgcagagtacatttaccagcgccggcctgaataccgccacctctccgctggggatgtcgcagtccagaaaaagctccgcagctcccttaactgcaagagtttcaagtggtttatgacgaagatagcctgggacctgcccaaattctacccacccgtggagcccccggctgcagcttggggggagatccgaaatgtgggcacagggctgtgtgcagacacaaagcacggggccttgggctccccactaaggctagagggctgcgtccgaggccgtggggaggctgcctggaacaacatgcaggtattcaccttcacctggagagaggacatccggcctggagacccccagcacaccaagaagttctgctttgatgccatttcccacaccagccctgtcacgctgtacgactgccacagcatgaagggcaaccagctgtggaaataccgcaaagacaagaccctgtaccaccctgtcagtggcagctgcatggactgcagtgaaagtgaccataggatcttcatgaacacctgcaacccatcctctctcacccagcagtggctgtttgaacacaccaactcaacagtcttggaaaaattcaataggaactgagccctcatgtccccttggcaggccccccagggtctggcactcactgcagacttcctctttcaagggaggcagggcccctgtgggcactaggtgtaaaaggtgctggccaaatggttcagggtgaagagggctcttgattcaggggctggggtctgcctggtccttgagcccctgagttgtgggggtagggtgaagagcatatcccacaagaggccccacagggagcagagactgctttaatccctgctgacatcacggaaaagcaacagagccttttcaactttgtcactatgtccccttgaacattatgtgggagaacaccaaggtagcctaggccacccaaaagtgagtcctgcgaggttgcccagccctcagatggctctcctacatgatggtgctttagaaacaaaggtaaaatttgcctgtttggggcagcttttagtatcgatgccactcatctgcagcagaagagaaagaagtcctcttggggctttttagtttctgccgtcctggggggaacattgcagttactgcacagcttctgttctctgtcacaaccccaggtgatttggtccggtcaaaggccatacttggggccctaagagtgttcagtattgaatgctgatcagctgccaggtgaggagtcagaagagggagcccccctagacatttctttgcagctatggacatgcgggatatctccccctgctctctgggtatttgaaatgtcaattttagcactctccaggcacaaggacagcccagcaccagctttacagggcagtgtttcagatggccctgagcccacggaaaaggccaggtagacctccaaactagaaatgctggctgatttgccctgatccatgcttccatttccctgtctctcttccccaggcaattactggcctcaaaagaggaacagaggtgctgcgaggtgctcacctcacagagtctggaggcctccaggatcaactgtgggcaaagtgcctgcctctgacctcatcatggttctagttctcatacagaactccagaatttttaaagaactctataattggattgcaaactaggatgctacataggattctggtattccacatccaatatggatttctagaatgctgtgattaaaggagccagccaggtgtaatacagtcaaggcagcccccagcctagagacaatctgtgaaatccaaagttggtggtgttgggaaagcagggggacatgtgtccctcagctcagcagaggctgtggtacaacatggtccttggtgaagacctgcacccctggaacctcccaccatcatcacaactgtagtctcatttgcagtggagaaaagaacccgacgtcccacagccagatatacacccagctccatgccagcccttcatgtttaccttttgctttgttaattacatgtcagactcctagagggcctccagactaataggaagcatttctgtaaccaacctgccacccactgattcagaaatggaaatcacattccacaatctatggcttccaccagctagcccaggaaatacttgaaatcagcattccaattagtgttgagtctcttgattgtgtcatttaccaattaaataactgagacctaagtctgggaacagagccacgaatctgcctttgagatgctggcagatctcaaggccatcaattattgggggagggagggacaaacactcccaatcatccaccagtcagactgaatgtgtagctggcgaggaattacttccacttctggcccagcacaagccctgctttggccacctgtctgcaagagaggcggcccctgtgcttgcaacgcttacgtgttgatcccagtgtccttttccaaatgagtgctgtagctttagaagtggccctctatagaaagaagtcaaaagatgaggccccttctagaatctaggataacaagagtgttgacagtttgaggagtcgaattgagattcatcatcaaagagcaatgcagcgtcgttaaaataaaaactgtgccttttaaaaagaaaaatgcaaatatagagcaaatccctaaacttgaaccatttcctagtgccttgctagacaaacataaaggggcagggttgtggggaggggaacgtttttggtggtgtgtgcagttcctactggatgagtgtgtgtttcttaatgtctcatttcaagcaggagatgttgggtctggagcaagatctgagactgagatgtcccccaagggtgacaggtcagatttatttcagtcagtgcaagtcacactccaaactaaaggctgggcagtgcgtttagtctgtggcctagaagacctcatcagcccccgagaggaggccttgcattacctcactgggacctgtttgggggccatccctgcggtccaccctctgaacccccagcatgtttgtcctgtttctcaccattgggttaaggggtgccgagcactagctagacttccacatagtcccaccccaagtgggcggcagtgttcctggcatgaccaggattcctgtgaaagcaggagcagcagcaagccgtcccgggcctgcctttcccatcctttggttctcctttccagtctgggttcacaccctgaaaagggatgggtgtgtcctctgagcactctggcatttgtcattgctgagcccatatcagtaggtcctgggacttgacaaagtatgtgggaggggaaggaaggacagaacttgactggctccatttcatggaccaactgatcaattgccagtactaagccactcattgttatggcttcctttttgaaaaccacctgtctcaaggattcaggtttctgctcacatccccagctgatgctcaataaaactcagccaggagcatatggagatgctgacagccaggtaatgggtgagactgtggggtcccttttcctctaaagcctttactctgaggataaggtcacaaagtagggtgtgacttgaaagtatcgtgaccatgtggcccaccagcagcctttccaaaggggaactccagagacatttcataatgcaaacagcactgttgctttaagaacaaggcctttggaggtggctaaacttgcacgcacgtgtgtgaaaagccatcccatcttctgcctccagttggagctttcagctgttaaaacagtcagaaactattgattcttccctttaggaaaaaatgctcaggcagaacggggtacatccacaggaggaatcggacgagaggatgtgacattcggtccaggagagaaagagcagtttctgttaaagatgtaacaaatggatttccaaagtctacatgacattcacttttcaaacttcccaccagttgaatttctttttttccttaagaaacaggtgatgtcttggaaaacagctccttatgtctctctgtgcatctccattttcctagtctctggagtctcaaaaagagtggcaaagcactttacagtagtaactgaggaatcagagtctctgcttcagcgatatctagtttgtacagttgggtgatcttttgtaattcctaggaggtaatgcatttttaatgttttctgaagctttgtaagtgtgagagagggacaagaagtgcagttctgttctggaattccttattgctttcaacggacactctttgtgaaaaatccaagtaatattttagttcaaacttgatcttgagccaaggcccactgccacctctgggatgggagtcggacctacataccaagtgacaagttcaccttaacatctgcttccagaatggctttgattcagccgtgccaggcaacagaacagggtcagactcctgctctgttattggcttgaagactaggatcccaaaggggttggaggcagggaatatttgaaaattcagactggaattccaggccaaaagctcaagaccaccagcctctcctcctgcctggaaaaataagcctttgtgaaagactgatttaccatgtacaattgtgattgtgaacgttgttgagtaaacctccagactttctctaaa

SEQ ID NO: 27743 - DNA, 4605 bp, Homo sapiens
ttgagaggctcaaggtacttccaacagcccagggcaagctttatcaagacgatttgaaggttaatccagctaatgtctcccacttggtttcccctttcacctggcagggacccggtgggcaccttaaggcacctcagtggtccacttcttccctctttccctttcagatccgaaatgtgggcacagggctgtgtgcagacacaaagcacggggccttgggctccccactaaggctagagggctgcgtccgaggccgtggggaggctgcctggaacaacatgcaggtattcaccttcacctggagagaggacatccggcctggagacccccagcacaccaagaagttctgctttgatgccatttcccacaccagccctgtcacgctgtacgactgccacagcatgaagggcaaccagctgtggaaataccgcaaagacaagaccctgtaccaccctgtcagtggcagctgcatggactgcagtgaaagtgaccataggatcttcatgaacacctgcaacccatcctctctcacccagcagtggctgtttgaacacaccaactcaacagtcttggaaaaattcaataggaactgagccctcatgtccccttggcaggccccccagggtctggcactcactgcagacttcctctttcaagggaggcagggcccctgtgggcactaggtgtaaaaggtgctggccaaatggttcagggtgaagagggctcttgattcaggggctggggtctgcctggtccttgagcccctgagttgtgggggtagggtgaagagcatatcccacaagaggccccacagggagcagagactgctttaatccctgctgacatcacggaaaagcaacagagccttttcaactttgtcactatgtccccttgaacattatgtgggagaacaccaaggtagcctaggccacccaaaagtgagtcctgcgaggttgcccagccctcagatggctctcctacatgatggtgctttagaaacaaaggtaaaatttgcctgtttggggcagcttttagtatcgatgccactcatctgcagcagaagagaaagaagtcctcttggggctttttagtttctgccgtcctggggggaacattgcagttactgcacagcttctgttctctgtcacaaccccaggtgatttggtccggtcaaaggccatacttggggccctaagagtgttcagtattgaatgctgatcagctgccaggtgaggagtcagaagagggagcccccctagacatttctttgcagctatggacatgcgggatatctccccctgctctctgggtatttgaaatgtcaattttagcactctccaggcacaaggacagcccagcaccagctttacagggcagtgtttcagatggccctgagcccacggaaaaggccaggtagacctccaaactagaaatgctggctgatttgccctgatccatgcttccatttccctgtctctcttccccaggcaattactggcctcaaaagaggaacagaggtgctgcgaggtgctcacctcacagagtctggaggcctccaggatcaactgtgggcaaagtgcctgcctctgacctcatcatggttctagttctcatacagaactccagaatttttaaagaactctataattggattgcaaactaggatgctacataggattctggtattccacatccaatatggatttctagaatgctgtgattaaaggagccagccaggtgtaatacagtcaaggcagcccccagcctagagacaatctgtgaaatccaaagttggtggtgttgggaaagcagggggacatgtgtccctcagctcagcagaggctgtggtacaacatggtccttggtgaagacctgcacccctggaacctcccaccatcatcacaactgtagtctcatttgcagtggagaaaagaacccgacgtcccacagccagatatacacccagctccatgccagcccttcatgtttaccttttgctttgttaattacatgtcagactcctagagggcctccagactaataggaagcatttctgtaaccaacctgccacccactgattcagaaatggaaatcacattccacaatctatggcttccaccagctagcccaggaaatacttgaaatcagcattccaattagtgttgagtctcttgattgtgtcatttaccaattaaataactgagacctaagtctgggaacagagccacgaatctgcctttgagatgctggcagatctcaaggccatcaattattgggggagggagggacaaacactcccaatcatccaccagtcagactgaatgtgtagctggcgaggaattacttccacttctggcccagcacaagccctgctttggccacctgtctgcaagagaggcggcccctgtgcttgcaacgcttacgtgttgatcccagtgtccttttccaaatgagtgctgtagctttagaagtggccctctatagaaagaagtcaaaagatgaggccccttctagaatctaggataacaagagtgttgacagtttgaggagtcgaattgagattcatcatcaaagagcaatgcagcgtcgttaaaataaaaactgtgccttttaaaaagaaaaatgcaaatatagagcaaatccctaaacttgaaccatttcctagtgccttgctagacaaacataaaggggcagggttgtggggaggggaacgtttttggtggtgtgtgcagttcctactggatgagtgtgtgtttcttaatgtctcatttcaagcaggagatgttgggtctggagcaagatctgagactgagatgtcccccaagggtgacaggtcagatttatttcagtcagtgcaagtcacactccaaactaaaggctgggcagtgcgtttagtctgtggcctagaagacctcatcagcccccgagaggaggccttgcattacctcactgggacctgtttgggggccatccctgcggtccaccctctgaacccccagcatgtttgtcctgtttctcaccattgggttaaggggtgccgagcactagctagacttccacatagtcccaccccaagtgggcggcagtgttcctggcatgaccaggattcctgtgaaagcaggagcagcagcaagccgtcccgggcctgcctttcccatcctttggttctcctttccagtctgggttcacaccctgaaaagggatgggtgtgtcctctgagcactctggcatttgtcattgctgagcccatatcagtaggtcctgggacttgacaaagtatgtgggaggggaaggaaggacagaacttgactggctccatttcatggaccaactgatcaattgccagtactaagccactcattgttatggcttcctttttgaaaaccacctgtctcaaggattcaggtttctgctcacatccccagctgatgctcaataaaactcagccaggagcatatggagatgctgacagccaggtaatgggtgagactgtggggtcccttttcctctaaagcctttactctgaggataaggtcacaaagtagggtgtgacttgaaagtatcgtgaccatgtggcccaccagcagcctttccaaaggggaactccagagacatttcataatgcaaacagcactgttgctttaagaacaaggcctttggaggtggctaaacttgcacgcacgtgtgtgaaaagccatcccatcttctgcctccagttggagctttcagctgttaaaacagtcagaaactattgattcttccctttaggaaaaaatgctcaggcagaacggggtacatccacaggaggaatcggacgagaggatgtgacattcggtccaggagagaaagagcagtttctgttaaagatgtaacaaatggatttccaaagtctacatgacattcacttttcaaacttcccaccagttgaatttctttttttccttaagaaacaggtgatgtcttggaaaacagctccttatgtctctctgtgcatctccattttcctagtctctggagtctcaaaaagagtggcaaagcactttacagtagtaactgaggaatcagagtctctgcttcagcgatatctagtttgtacagttgggtgatcttttgtaattcctaggaggtaatgcatttttaatgttttctgaagctttgtaagtgtgagagagggacaagaagtgcagttctgttctggaattccttattgctttcaacggacactctttgtgaaaaatccaagtaatattttagttcaaacttgatcttgagccaaggcccactgccacctctgggatgggagtcggacctacataccaagtgacaagttcaccttaacatctgcttccagaatggctttgattcagccgtgccaggcaacagaacagggtcagactcctgctctgttattggcttgaagactaggatcccaaaggggttggaggcagggaatatttgaaaattcagactggaattccaggccaaaagctcaagaccaccagcctctcctcctgcctggaaaaataagcctttgtgaaagactgatttaccatgtacaattgtgattgtgaacgttgttgagtaaacctccagactttctctaaa

SEQ ID NO: 27744 - DNA, 5514 bp, Homo sapiens
  misc_feature (24)..(24): n is a, c, g, or t
gcgccgacttagaggatcccccanacctaaccccatgaccgatgctgagagagtggatcaggcataccgagaaaatggatttaacatctacgtcagtgataaaatctccttgaatcgctctctcccagatatccggcacccaaactgcaacagcaagcgctacctggagacacttcccaacacaagcatcatcatccccttccacaacgagggctggtcctccctcctccgcaccgtccacagtgtgctcaatcgctcgcctccagagctggtcgccgagattgtactggtcgacgacttcagtgatcgagagcacctgaagaagcctcttgaagactacatggcccttttccccagtgtgaggattcttcgaaccaagaaacgggaagggctgataaggacccgaatgctgggggcctcagtggcaactggggatgtcatcacattcttggattcacactgtgaagccaatgtcaactggcttccccccttgcttgaccgcattgctcggaaccgcaagaccattgtgtgcccgatgattgatgtaattgaccatgacgactttcggtacgagacacaggcaggggatgccatgcggggagcctttgactgggagatgtactacaagcggatcccgatccctccagaactgcagaaagctgaccccagcgacccatttgagtctcccgtgatggccggtggactgttcgccgtggatcggaagtggttctgggaactcggcgggtatgacccaggcttggagatctggggaggggagcagtatgaaatctccttcaaggtgtggatgtgtgggggccgcatggaggacatcccctgctccagggtgggccatatctacaggaagtatgtgccctacaaggtcccggccggagtcagcctggcccggaaccttaagcgggtggccgaagtgtggatggatgagtacgcagagtacatttaccagcgccggcctgaataccgccacctctccgctggggatgtcgcagtccagaaaaagctccgcagctcccttaactgcaagagtttcaagtggtttatgacgaagatagcctgggacctgcccaaattctacccacccgtggagcccccggctgcagcttggggggagatccgaaatgtgggcacagggctgtgtgcagacacaaagcacggggccttgggctccccactaaggctagagggctgcgtccgaggccgtggggaggctgcctggaacaacatgcaggtattcaccttcacctggagagaggacatccggcctggagacccccagcacaccaagaagttctgctttgatgccatttcccacaccagccctgtcacgctgtacgactgccacagcatgaagggcaaccagctgtggaaataccgcaaagacaagaccctgtaccaccctgtcagtggcagctgcatggactgcagtgaaagtgaccataggatcttcatgaacacctgcaacccatcctctctcacccagcagtggctgtttgaacacaccaactcaacagtcttggaaaaattcaataggaactgagccctcatgtccccttggcaggccccccagggtctggcactcactgcagacttcctctttcaagggaggcagggcccctgtgggcactaggtgtaaaaggtgctggccaaatggttcagggtgaagagggctcttgattcaggggctggggtctgcctggtccttgagcccctgagttgtgggggtagggtgaagagcatatcccacaagaggccccacagggagcagagactgctttaatccctgctgacatcacggaaaagcaacagagccttttcaactttgtcactatgtccccttgaacattatgtgggagaacaccaaggtagcctaggccacccaaaagtgagtcctgcgaggttgcccagccctcagatggctctcctacatgatggtgctttagaaacaaaggtaaaatttgcctgtttggggcagcttttagtatcgatgccactcatctgcagcagaagagaaagaagtcctcttggggctttttagtttctgccgtcctggggggaacattgcagttactgcacagcttctgttctctgtcacaaccccaggtgatttggtccggtcaaaggccatacttggggccctaagagtgttcagtattgaatgctgatcagctgccaggtgaggagtcagaagagggagcccccctagacatttctttgcagctatggacatgcgggatatctccccctgctctctgggtatttgaaatgtcaattttagcactctccaggcacaaggacagcccagcaccagctttacagggcagtgtttcagatggccctgagcccacggaaaaggccaggtagacctccaaactagaaatgctggctgatttgccctgatccatgcttccatttccctgtctctcttccccaggcaattactggcctcaaaagaggaacagaggtgctgcgaggtgctcacctcacagagtctggaggcctccaggatcaactgtgggcaaagtgcctgcctctgacctcatcatggttctagttctcatacagaactccagaatttttaaagaactctataattggattgcaaactaggatgctacataggattctggtattccacatccaatatggatttctagaatgctgtgattaaaggagccagccaggtgtaatacagtcaaggcagcccccagcctagagacaatctgtgaaatccaaagttggtggtgttgggaaagcagggggacatgtgtccctcagctcagcagaggctgtggtacaacatggtccttggtgaagacctgcacccctggaacctcccaccatcatcacaactgtagtctcatttgcagtggagaaaagaacccgacgtcccacagccagatatacacccagctccatgccagcccttcatgtttaccttttgctttgttaattacatgtcagactcctagagggcctccagactaataggaagcatttctgtaaccaacctgccacccactgattcagaaatggaaatcacattccacaatctatggcttccaccagctagcccaggaaatacttgaaatcagcattccaattagtgttgagtctcttgattgtgtcatttaccaattaaataactgagacctaagtctgggaacagagccacgaatctgcctttgagatgctggcagatctcaaggccatcaattattgggggagggagggacaaacactcccaatcatccaccagtcagactgaatgtgtagctggcgaggaattacttccacttctggcccagcacaagccctgctttggccacctgtctgcaagagaggcggcccctgtgcttgcaacgcttacgtgttgatcccagtgtccttttccaaatgagtgctgtagctttagaagtggccctctatagaaagaagtcaaaagatgaggccccttctagaatctaggataacaagagtgttgacagtttgaggagtcgaattgagattcatcatcaaagagcaatgcagcgtcgttaaaataaaaactgtgccttttaaaaagaaaaatgcaaatatagagcaaatccctaaacttgaaccatttcctagtgccttgctagacaaacataaaggggcagggttgtggggaggggaacgtttttggtggtgtgtgcagttcctactggatgagtgtgtgtttcttaatgtctcatttcaagcaggagatgttgggtctggagcaagatctgagactgagatgtcccccaagggtgacaggtcagatttatttcagtcagtgcaagtcacactccaaactaaaggctgggcagtgcgtttagtctgtggcctagaagacctcatcagcccccgagaggaggccttgcattacctcactgggacctgtttctcaccattgggttaaggggtgccgagcactagctagacttccacatagtcccaccccaagtgggcggcagtgttcctggcatgaccaggattcctgtgaaagcaggagcagcagcaagccgtcccgggcctgcctttcccatcctttggttctcctttccagtctgggttcacaccctgaaaagggatgggtgtgtcctctgagcactctggcatttgtcattgctgagcccatatcagtaggtcctgggacttgacaaagtatgtgggaggggaaggaaggacagaacttgactggctccatttcatggaccaactgatcaattgccagtactaagccactcattgttatggcttcctttttgaaaaccacctgtctcaaggattcaggtttctgctcacatccccagctgatgctcaataaaactcagccaggagcatatggagatgctgacagccaggtaatgggtgagactgtggggtcccttttcctctaaagcctttactctgaggataaggtcacaaagtagggtgtgacttgaaagtatcgtgaccatgtggcccaccagcagcctttccaaaggggaactccagagacatttcataatgcaaacagcactgttgctttaagaacaaggcctttggaggtggctaaacttgcacgcacgtgtgtgaaaagccatcccatcttctgcctccagttggagctttcagctgttaaaacagtcagaaactattgattcttccctttaggaaaaaatgctcaggcagaacggggtacatccacaggaggaatcggacgagaggatgtgacattcggtccaggagagaaagagcagtttctgttaaagatgtaacaaatggatttccaaagtctacatgacattcacttttcaaacttcccaccagttgaatttctttttttccttaagaaacaggtgatgtcttggaaaacagctccttatgtctctctgtgcatctccattttcctagtctctggagtctcaaaaagagtggcaaagcactttacagtagtaactgaggaatcagagtctctgcttcagcgatatctagtttgtacagttgggtgatcttttgtaattcctaggaggtaatgcatttttaatgttttctgaagctttgtaagtgtgagagagggacaagaagtgcagttctgttctggaattccttattgctttcaacggacactctttgtgaaaaatccaagtaatattttagttcaaacttgatcttgagccaaggcccactgccacctctgggatgggagtcggacctacataccaagtgacaagttcaccttaacatctgcttccagaatggctttgattcagccgtgccaggcaacagaacagggtcagactcctgctctgttattggcttgaagactaggatcccaaaggggttggaggcagggaatatttgaaaattcagactggaattccaggccaaaagctcaagaccaccagcctctcctcctgcctggaaaaataagcctttgtgaaagactgatttaccatgtacaattgtgattgtgaacgttgttgagtaaacctccagactttctctaaa

SEQ ID NO: 27745 - DNA, 761 bp, Homo sapiens
ttggaggcaggaatatttgaaaattcagactggaattccaggccaaaagctcaagaccaccagcctctcctcctgcctggaaaaataagcctttgtgaaagactgatttaccatgtcttggaaaacagctccttatgtctctctgtgcatctccattttcctagtctctggagtctcaaaaagagtggcaaagcactttacagtagtaactgaggaatcagagtctctgcttcagcgatatctagtttgtacagttgggtgatcttttgtaattcctaggaggtaatgcatttttaatgttttctgaagctttgtaagtgtgagagagggacaagaagtgcagttctgttctggaattccttattgctttcaacggacactctttgtgaaaaatccaagtaatattttagttcaaacttgatcttgagccaaggcccactgccacctctgggatgggagtcggacctacataccaagtgacaagttcaccttaacatctgcttccagaatggctttgattcagccgtgccaggcaacagaacagggtcagactcctgctctgttattggcttgaagactaggatcccaaaggggttggaggcagggaatatttgaaaattcagactggaattccaggccaaaagctcaagaccaccagcctctcctcctgcctggaaaaataagcctttgtgaaagactgatttaccatgtacaattgtgattgtgaacgttgttgagtaaacctccagactttctctaaa

SEQ ID NO: 27746 - DNA, 3575 bp, Homo sapiens
  misc_feature (24)..(24): n is a, c, g, or t
gcgccgacttagaggatcccccanacctaaccccatgaccgatgctgagagagtggatcaggcataccgagaaaatggatttaacatctacgtcagtgataaaatctccttgaatcgctctctcccagatatccggcacccaaactgcaacagcaagcgctacctggagacacttcccaacacaagcatcatcatccccttccacaacgagggctggtcctccctcctccgcaccgtccacagtgtgctcaatcgctcgcctccagagctggtcgccgagattgtactggtcgacgacttcagtgatcgagagcacctgaagaagcctcttgaagactacatggcccttttccccagtgtgaggattcttcgaaccaagaaacgggaagggctgataaggacccgaatgctgggggcctcagtggcaactggggatgtcatcacattcttggattcacactgtgaagccaatgtcaactggcttccccccttgcttgaccgcattgctcggaaccgcaagaccattgtgtgcccgatgattgatgtaattgaccatgacgactttcggtacgagacacaggcaggggatgccatgcggggagcctttgactgggagatgtactacaagcggatcccgatccctccagaactgcagaaagctgaccccagcgacccatttgagtctcccgtgatggccggtggactgttcgccgtggatcggaagtggttctgggaactcggcgggtatgacccaggcttggagatctggggaggggagcagtatgaaatctccttcaaggtgtggatgtgtgggggccgcatggaggacatcccctgctccagggtgggccatatctacaggaagtatgtgccctacaaggtcccggccggagtcagcctggcccggaaccttaagcgggtggccgaagtgtggatggatgagtacgcagagtacatttaccagcgccggcctgaataccgccacctctccgctggggatgtcgcagtccagaaaaagctccgcagctcccttaactgcaagagtttcaagtggtttatgacgaagatagcctgggacctgcccaaattctacccacccgtggagcccccggctgcagcttggggggagatccgaaatgtgggcacagggctgtgtgcagacacaaagcacggggccttgggctccccactaaggctagagggctgcgtccgaggccgtggggaggctgcctggaacaacatgcaggtattcaccttcacctggagagaggacatccggcctggagacccccagcacaccaagaagttctgctttgatgccatttcccacaccagccctgtcacgctgtacgactgccacagcatgaagggcaaccagctgtggaaataccgcaaagacaagaccctgtaccaccctgtcagtggcagctgcatggactgcagtgaaagtgaccataggatcttcatgaacacctgcaacccatcctctctcacccagcagtggctgtttgaacacaccaactcaacagtcttggaaaaattcaataggaactgagccctcatgtccccttggcaggccccccagggtctggcactcactgcagacttcctctttcaagggaggcagggcccctgtgggcactaggtgtaaaaggtgctggccaaatggttcagggtgaagagggctcttgattcaggggctggggtctgcctggtccttgagcccctgagttgtgggggtagggtgaagagcatatcccacaagaggccccacagggagcagagactgctttaatccctgctgacatcacggaaaagcaacagagccttttcaactttgtcactatgtccccttgaacattatgtgggagaacaccaaggtagcctaggccacccaaaagtgagtcctgcgaggttgcccagccctcagatggctctcctacatgatggtgctttagaaacaaaggtaaaatttgcctgtttggggcagcttttagtatcgatgccactcatctgcagcagaagagaaagaagtcctcttggggctttttagtttctgccgtcctggggggaacattgcagttactgcacagcttctgttctctgtcacaaccccaggtgatttggtccggtcaaaggccatacttggggccctaagagtgttcagtattgaatgctgatcagctgccaggtgaggagtcagaagagggagcccccctagacatttctttgcagctatggacatgcgggatatctccccctgctctctgggtatttgaaatgtcaattttagcactctccaggcacaaggacagcccagcaccagctttacagggcagtgtttcagatggccctgagcccacggaaaaggccaggtagacctccaaactagaaatgctggctgatttgccctgatccatgcttccatttccctgtctctcttccccaggcaattactggcctcaaaagaggaacagaggtgctgcgaggtgctcacctcacagagtctggaggcctccaggatcaactgtgggcaaagtgcctgcctctgacctcatcatggttctagttctcatacagaactccagaatttttaaagaactctataattggattgcaaactaggatgctacataggattctggtattccacatccaatatggatttctagaatgctgtgattaaaggagccagccaggtgtaatacagtcaaggcagcccccagcctagagacaatctgtgaaatccaaagttggtggtgttgggaaagcagggggacatgtgtccctcagctcagcagaggctgtggtacaacatggtccttggtgaagacctgcacccctggaacctcccaccatcatcacaactgtagtctcatttgcagtggagaaaagaacccgacgtcccacagccagatatacacccagctccatgccagcccttcatgtttaccttttgctttgttaattacatgtcagactcctagagggcctccagactaataggaagcatttctgtaaccaacctgccacccactgattcagaaatggaaatcacattccacaatctatggcttccaccagctagcccaggaaatacttgaaatcagcattccaattagtgttgagtctcttgattgtgtcatttaccaattaaataactgagacctaagtctgggaacagagccacgaatctgcctttgagatgctggcagatctcaaggccatcaattattgggggagggagggacaaacactcccaatcatccaccagtcagactgaatgtgtagctggcgaggaattacttccacttctggcccagcacaagccctgctttggccacctgtctgcaagagaggcggcccctgtgcttgcaacgcttacgtgttgatcccagtgtccttttccaaatgagtgctgtagctttagaagtggccctctatagaaagaagtcaaaagatgaggccccttctagaatctaggataacaagagtgttgacagtttgaggagtcgaattgagattcatcatcaaagagcaatgcagcgtcgttaaaataaaaactgtgcctttta

SEQ ID NO: 27747 - DNA, 3247 bp, Homo sapiens
acctagacgtaacacagcactccatagtggattagagctcagattctgaagtcagctaaaacagggtttaaattttggctccaccacttactctgtgacctgagtcacatttcttagcttctctgagcctccatttcagcatctgtaaaatgttactacctactttataggttttctgatgaggcttaagtgtggttgtgcatgtgaccatcttagcatagtgtgtggcaatggtaagcactcagtgctgtcagctgtttttaccgctgttattatattactgtgttttcccatgtcattaggtctgtgatccaggcttcagcagacaatccaggctgatgcttttgctgagtgcactaagggatgctggcctggcgggatggtgaactggaagcagaaacgtcatcctctctcttccttcttgccatgcaggtgtggatgtgtgggggccgcatggaggacatcccctgctccagggtgggccatatctacaggaagtatgtgccctacaaggtcccggccggagtcagcctggcccggaaccttaagcgggtggccgaagtgtggatggatgagtacgcagagtacatttaccagcgccggcctgaataccgccacctctccgctggggatgtcgcagtccagaaaaagctccgcagctcccttaactgcaagagtttcaagtggtttatgacgaagatagcctgggacctgcccaaattctacccacccgtggagcccccggctgcagcttggggggagatccgaaatgtgggcacagggctgtgtgcagacacaaagcacggggccttgggctccccactaaggctagagggctgcgtccgaggccgtggggaggctgcctggaacaacatgcaggtattcaccttcacctggagagaggacatccggcctggagacccccagcacaccaagaagttctgctttgatgccatttcccacaccagccctgtcacgctgtacgactgccacagcatgaagggcaaccagctgtggaaataccgcaaagacaagaccctgtaccaccctgtcagtggcagctgcatggactgcagtgaaagtgaccataggatcttcatgaacacctgcaacccatcctctctcacccagcagtggctgtttgaacacaccaactcaacagtcttggaaaaattcaataggaactgagccctcatgtccccttggcaggccccccagggtctggcactcactgcagacttcctctttcaagggaggcagggcccctgtgggcactaggtgtaaaaggtgctggccaaatggttcagggtgaagagggctcttgattcaggggctggggtctgcctggtccttgagcccctgagttgtgggggtagggtgaagagcatatcccacaagaggccccacagggagcagagactgctttaatccctgctgacatcacggaaaagcaacagagccttttcaactttgtcactatgtccccttgaacattatgtgggagaacaccaaggtagcctaggccacccaaaagtgagtcctgcgaggttgcccagccctcagatggctctcctacatgatggtgctttagaaacaaaggtaaaatttgcctgtttggggcagcttttagtatcgatgccactcatctgcagcagaagagaaagaagtcctcttggggctttttagtttctgccgtcctggggggaacattgcagttactgcacagcttctgttctctgtcacaaccccaggtgatttggtccggtcaaaggccatacttggggccctaagagtgttcagtattgaatgctgatcagctgccaggtgaggagtcagaagagggagcccccctagacatttctttgcagctatggacatgcgggatatctccccctgctctctgggtatttgaaatgtcaattttagcactctccaggcacaaggacagcccagcaccagctttacagggcagtgtttcagatggccctgagcccacggaaaaggccaggtagacctccaaactagaaatgctggctgatttgccctgatccatgcttccatttccctgtctctcttccccaggcaattactggcctcaaaagaggaacagaggtgctgcgaggtgctcacctcacagagtctggaggcctccaggatcaactgtgggcaaagtgcctgcctctgacctcatcatggttctagttctcatacagaactccagaatttttaaagaactctataattggattgcaaactaggatgctacataggattctggtattccacatccaatatggatttctagaatgctgtgattaaaggagccagccaggtgtaatacagtcaaggcagcccccagcctagagacaatctgtgaaatccaaagttggtggtgttgggaaagcagggggacatgtgtccctcagctcagcagaggctgtggtacaacatggtccttggtgaagacctgcacccctggaacctcccaccatcatcacaactgtagtctcatttgcagtggagaaaagaacccgacgtcccacagccagatatacacccagctccatgccagcccttcatgtttaccttttgctttgttaattacatgtcagactcctagagggcctccagactaataggaagcatttctgtaaccaacctgccacccactgattcagaaatggaaatcacattccacaatctatggcttccaccagctagcccaggaaatacttgaaatcagcattccaattagtgttgagtctcttgattgtgtcatttaccaattaaataactgagacctaagtctgggaacagagccacgaatctgcctttgagatgctggcagatctcaaggccatcaattattgggggagggagggacaaacactcccaatcatccaccagtcagactgaatgtgtagctggcgaggaattacttccacttctggcccagcacaagccctgctttggccacctgtctgcaagagaggcggcccctgtgcttgcaacgcttacgtgttgatcccagtgtccttttccaaatgagtgctgtagctttagaagtggccctctatagaaagaagtcaaaagatgaggccccttctagaatctaggataacaagagtgttgacagtttgaggagtcgaattgagattcatcatcaaagagcaatgcagcgtcgttaaaataaaaactgtgccttttaaaaagaaaaatgcaaatatagagcaaatccctaaacttg

SEQ ID NO: 27748 - DNA, 5567 bp, Homo sapiens
  misc_feature (24)..(24): n is a, c, g, or t
gcgccgacttagaggatcccccanacctaaccccatgaccgatgctgagagagtggatcaggcataccgagaaaatggatttaacatctacgtcagtgataaaatctccttgaatcgctctctcccagatatccggcacccaaactgcaacagcaagcgctacctggagacacttcccaacacaagcatcatcatccccttccacaacgagggctggtcctccctcctccgcaccgtccacagtgtgctcaatcgctcgcctccagagctggtcgccgagattgtactggtcgacgacttcagtgatcgagagcacctgaagaagcctcttgaagactacatggcccttttccccagtgtgaggattcttcgaaccaagaaacgggaagggctgataaggacccgaatgctgggggcctcagtggcaactggggatgtcatcacattcttggattcacactgtgaagccaatgtcaactggcttccccccttgcttgaccgcattgctcggaaccgcaagaccattgtgtgcccgatgattgatgtaattgaccatgacgactttcggtacgagacacaggcaggggatgccatgcggggagcctttgactgggagatgtactacaagcggatcccgatccctccagaactgcagaaagctgaccccagcgacccatttgagtctcccgtgatggccggtggactgttcgccgtggatcggaagtggttctgggaactcggcgggtatgacccaggcttggagatctggggaggggagcagtatgaaatctccttcaaggtgtggatgtgtgggggccgcatggaggacatcccctgctccagggtgggccatatctacaggaagtatgtgccctacaaggtcccggccggagtcagcctggcccggaaccttaagcgggtggccgaagtgtggatggatgagtacgcagagtacatttaccagcgccggcctgaataccgccacctctccgctggggatgtcgcagtccagaaaaagctccgcagctcccttaactgcaagagtttcaagtggtttatgacgaagatagcctgggacctgcccaaattctacccacccgtggagcccccggctgcagcttggggggagatccgaaatgtgggcacagggctgtgtgcagacacaaagcacggggccttgggctccccactaaggctagagggctgcgtccgaggccgtggggaggctgcctggaacaacatgcaggtattcaccttcacctggagagaggacatccggcctggagacccccagcacaccaagaagttctgctttgatgccatttcccacaccagccctgtcacgctgtacgactgccacagcatgaagggcaaccagctgtggaaataccgcaaagacaagaccctgtaccaccctgtcagtggcagctgcatggactgcagtgaaagtgaccataggatcttcatgaacacctgcaacccatcctctctcacccagcagtggctgtttgaacacaccaactcaacagtcttggaaaaattcaataggaactgagccctcatgtccccttggcaggccccccagggtctggcactcactgcagacttcctctttcaagggaggcagggcccctgtgggcactaggtgtaaaaggtgctggccaaatggttcagggtgaagagggctcttgattcaggggctggggtctgcctggtccttgagcccctgagttgtgggggtagggtgaagagcatatcccacaagaggccccacagggagcagagactgctttaatccctgctgacatcacggaaaagcaacagagccttttcaactttgtcactatgtccccttgaacattatgtgggagaacaccaaggtagcctaggccacccaaaagtgagtcctgcgaggttgcccagccctcagatggctctcctacatgatggtgctttagaaacaaaggtaaaatttgcctgtttggggcagcttttagtatcgatgccactcatctgcagcagaagagaaagaagtcctcttggggctttttagtttctgccgtcctggggggaacattgcagttactgcacagcttctgttctctgtcacaaccccaggtgatttggtccggtcaaaggccatacttggggccctaagagtgttcagtattgaatgctgatcagctgccaggtgaggagtcagaagagggagcccccctagacatttctttgcagctatggacatgcgggatatctccccctgctctctgggtatttgaaatgtcaattttagcactctccaggcacaaggacagcccagcaccagctttacagggcagtgtttcagatggccctgagcccacggaaaaggccaggtagacctccaaactagaaatgctggctgatttgccctgatccatgcttccatttccctgtctctcttccccaggcaattactggcctcaaaagaggaacagaggtgctgcgaggtgctcacctcacagagtctggaggcctccaggatcaactgtgggcaaagtgcctgcctctgacctcatcatggttctagttctcatacagaactccagaatttttaaagaactctataattggattgcaaactaggatgctacataggattctggtattccacatccaatatggatttctagaatgctgtgattaaaggagccagccaggtgtaatacagtcaaggcagcccccagcctagagacaatctgtgaaatccaaagttggtggtgttgggaaagcagggggacatgtgtccctcagctcagcagaggctgtggtacaacatggtccttggtgaagacctgcacccctggaacctcccaccatcatcacaactgtagtctcatttgcagtggagaaaagaacccgacgtcccacagccagatatacacccagctccatgccagcccttcatgtttaccttttgctttgttaattacatgtcagactcctagagggcctccagactaataggaagcatttctgtaaccaacctgccacccactgattcagaaatggaaatcacattccacaatctatggcttccaccagctagcccaggaaatacttgaaatcagcattccaattagtgttgagtctcttgattgtgtcatttaccaattaaataactgagacctaagtctgggaacagagccacgaatctgcctttgagatgctggcagatctcaaggccatcaattattgggggagggagggacaaacactcccaatcatccaccagtcagactgaatgtgtagctggcgaggaattacttccacttctggcccagcacaagccctgctttggccacctgtctgcaagagaggcggcccctgtgcttgcaacgcttacgtgttgatcccagtgtccttttccaaatgagtgctgtagctttagaagtggccctctatagaaagaagtcaaaagatgaggccccttctagaatctaggataacaagagtgttgacagtttgaggagtcgaattgagattcatcatcaaagagcaatgcagcgtcgttaaaataaaaactgtgccttttaaaaagaaaaatgcaaatatagagcaaatccctaaacttgaaccatttcctagtgccttgctagacaaacataaaggggcagggttgtggggaggggaacgtttttggtggtgtgtgcagttcctactggatgagtgtgtgtttcttaatgtctcatttcaagcaggagatgttgggtctggagcaagatctgagactgagatgtcccccaagggtgacaggtcagatttatttcagtcagtgcaagtcacactccaaactaaaggctgggcagtgcgtttagtctgtggcctagaagacctcatcagcccccgagaggaggccttgcattacctcactgggacctgtttgggggccatccctgcggtccaccctctgaacccccagcatgtttgtcctgtttctcaccattgggttaaggggtgccgagcactagctagacttccacatagtcccaccccaagtgggcggcagtgttcctggcatgaccaggattcctgtgaaagcaggagcagcagcaagccgtcccgggcctgcctttcccatcctttggttctcctttccagtctgggttcacaccctgaaaagggatgggtgtgtcctctgagcactctggcatttgtcattgctgagcccatatcagtaggtcctgggacttgacaaagtatgtgggaggggaaggaaggacagaacttgactggctccatttcatggaccaactgatcaattgccagtactaagccactcattgttatggcttcctttttgaaaaccacctgtctcaaggattcaggtttctgctcacatccccagctgatgctcaataaaactcagccaggagcatatggagatgctgacagccaggtaatgggtgagactgtggggtcccttttcctctaaagcctttactctgaggataaggtcacaaagtagggtgtgacttgaaagtatcgtgaccatgtggcccaccagcagcctttccaaaggggaactccagagacatttcataatgcaaacagcactgttgctttaagaacaaggcctttggaggtggctaaacttgcacgcacgtgtgtgaaaagccatcccatcttctgcctccagttggagctttcagctgttaaaacagtcagaaactattgattcttccctttaggaaaaaatgctcaggcagaacggggtacatccacaggaggaatcggacgagaggatgtgacattcggtccaggagagaaagagcagtttctgttaaagatgtaacaaatggatttccaaagtctacatgacattcacttttcaaacttcccaccagttgaatttctttttttccttaagaaacaggtgatgtcttggaaaacagctccttatgtctctctgtgcatctccattttcctagtctctggagtctcaaaaagagtggcaaagcactttacagtagtaactgaggaatcagagtctctgcttcagcgatatctagtttgtacagttgggtgatcttttgtaattcctaggaggtaatgcatttttaatgttttctgaagctttgtaagtgtgagagagggacaagaagtgcagttctgttctggaattccttattgctttcaacggacactctttgtgaaaaatccaagtaatattttagttcaaacttgatcttgagccaaggcccactgccacctctgggatgggagtcggacctacataccaagtgacaagttcaccttaacatctgcttccagaatggctttgattcagccgtgccaggcaacagaacagggtcagactcctgctctgttattggcttgaagactaggatcccaaaggggttggaggcagggaatatttgaaaattcagactggaattccaggccaaaagctcaagaccaccagcctctcctcctgcctggaaaaataagcctttgtgaaagactgatttaccatgtacaattgtgattgtgaacgttgttgagtaaacctccagactttctctaaa

SEQ ID NO: 27749 - DNA, 5962 bp, Homo sapiens
agcgggttggagcggggccggcgccgcagccgcttctgctggctgagctgctgccgccgccgggcggacgggcggacgcgcggagctgggggcggcgcggcggggccggcggggctgcggcggggctgaccggccccgatgaggcggaaggagaagcggctcctgcaggcggtggcgctggtgctggcggccctggtcctcctgcccaacgtggggctttgggcgctgtaccgcgagcggcagcccgacggcacccctgggggatcgggggcggcggtggcgccggcggcgggacagggctcacacagtcgacaaaagaaaacgtttttcttgggagatgggcagaagctgaaggactggcatgacaaggaggccatccggagggacgctcagcgcgtaggaaatggagaacaaggaagacctaaccccatgaccgatgctgagagagtggatcaggcataccgagaaaatggatttaacatctacgtcagtgataaaatctccttgaatcgctctctcccagatatccggcacccaaactgcaacagcaagcgctacctggagacacttcccaacacaagcatcatcatccccttccacaacgagggctggtcctccctcctccgcaccgtccacagtgtgctcaatcgctcgcctccagagctggtcgccgagattgtactggtcgacgacttcagtgatcgagagcacctgaagaagcctcttgaagactacatggcccttttccccagtgtgaggattcttcgaaccaagaaacgggaagggctgataaggacccgaatgctgggggcctcagtggcaactggggatgtcatcacattcttggattcacactgtgaagccaatgtcaactggcttccccccttgcttgaccgcattgctcggaaccgcaagaccattgtgtgcccgatgattgatgtaattgaccatgacgactttcggtacgagacacaggcaggggatgccatgcggggagcctttgactgggagatgtactacaagcggatcccgatccctccagaactgcagaaagctgaccccagcgacccatttgagtctcccgtgatggccggtggactgttcgccgtggatcggaagtggttctgggaactcggcgggtatgacccaggcttggagatctggggaggggagcagtatgaaatctccttcaaggtgtggatgtgtgggggccgcatggaggacatcccctgctccagggtgggccatatctacaggaagtatgtgccctacaaggtcccggccggagtcagcctggcccggaaccttaagcgggtggccgaagtgtggatggatgagtacgcagagtacatttaccagcgccggcctgaataccgccacctctccgctggggatgtcgcagtccagaaaaagctccgcagctcccttaactgcaagagtttcaagtggtttatgacgaagatagcctgggacctgcccaaattctacccacccgtggagcccccggctgcagcttggggggagatccgaaatgtgggcacagggctgtgtgcagacacaaagcacggggccttgggctccccactaaggctagagggctgcgtccgaggccgtggggaggctgcctggaacaacatgcaggtattcaccttcacctggagagaggacatccggcctggagacccccagcacaccaagaagttctgctttgatgccatttcccacaccagccctgtcacgctgtacgactgccacagcatgaagggcaaccagctgtggaaataccgcaaagacaagaccctgtaccaccctgtcagtggcagctgcatggactgcagtgaaagtgaccataggatcttcatgaacacctgcaacccatcctctctcacccagcagtggctgtttgaacacaccaactcaacagtcttggaaaaattcaataggaactgagccctcatgtccccttggcaggccccccagggtctggcactcactgcagacttcctctttcaagggaggcagggcccctgtgggcactaggtgtaaaaggtgctggccaaatggttcagggtgaagagggctcttgattcaggggctggggtctgcctggtccttgagcccctgagttgtgggggtagggtgaagagcatatcccacaagaggccccacagggagcagagactgctttaatccctgctgacatcacggaaaagcaacagagccttttcaactttgtcactatgtccccttgaacattatgtgggagaacaccaaggtagcctaggccacccaaaagtgagtcctgcgaggttgcccagccctcagatggctctcctacatgatggtgctttagaaacaaaggtaaaatttgcctgtttggggcagcttttagtatcgatgccactcatctgcagcagaagagaaagaagtcctcttggggctttttagtttctgccgtcctggggggaacattgcagttactgcacagcttctgttctctgtcacaaccccaggtgatttggtccggtcaaaggccatacttggggccctaagagtgttcagtattgaatgctgatcagctgccaggtgaggagtcagaagagggagcccccctagacatttctttgcagctatggacatgcgggatatctccccctgctctctgggtatttgaaatgtcaattttagcactctccaggcacaaggacagcccagcaccagctttacagggcagtgtttcagatggccctgagcccacggaaaaggccaggtagacctccaaactagaaatgctggctgatttgccctgatccatgcttccatttccctgtctctcttccccaggcaattactggcctcaaaagaggaacagaggtgctgcgaggtgctcacctcacagagtctggaggcctccaggatcaactgtgggcaaagtgcctgcctctgacctcatcatggttctagttctcatacagaactccagaatttttaaagaactctataattggattgcaaactaggatgctacataggattctggtattccacatccaatatggatttctagaatgctgtgattaaaggagccagccaggtgtaatacagtcaaggcagcccccagcctagagacaatctgtgaaatccaaagttggtggtgttgggaaagcagggggacatgtgtccctcagctcagcagaggctgtggtacaacatggtccttggtgaagacctgcacccctggaacctcccaccatcatcacaactgtagtctcatttgcagtggagaaaagaacccgacgtcccacagccagatatacacccagctccatgccagcccttcatgtttaccttttgctttgttaattacatgtcagactcctagagggcctccagactaataggaagcatttctgtaaccaacctgccacccactgattcagaaatggaaatcacattccacaatctatggcttccaccagctagcccaggaaatacttgaaatcagcattccaattagtgttgagtctcttgattgtgtcatttaccaattaaataactgagacctaagtctgggaacagagccacgaatctgcctttgagatgctggcagatctcaaggccatcaattattgggggagggagggacaaacactcccaatcatccaccagtcagactgaatgtgtagctggcgaggaattacttccacttctggcccagcacaagccctgctttggccacctgtctgcaagagaggcggcccctgtgcttgcaacgcttacgtgttgatcccagtgtccttttccaaatgagtgctgtagctttagaagtggccctctatagaaagaagtcaaaagatgaggccccttctagaatctaggataacaagagtgttgacagtttgaggagtcgaattgagattcatcatcaaagagcaatgcagcgtcgttaaaataaaaactgtgccttttaaaaagaaaaatgcaaatatagagcaaatccctaaacttgaaccatttcctagtgccttgctagacaaacataaaggggcagggttgtggggaggggaacgtttttggtggtgtgtgcagttcctactggatgagtgtgtgtttcttaatgtctcatttcaagcaggagatgttgggtctggagcaagatctgagactgagatgtcccccaagggtgacaggtcagatttatttcagtcagtgcaagtcacactccaaactaaaggctgggcagtgcgtttagtctgtggcctagaagacctcatcagcccccgagaggaggccttgcattacctcactgggacctgtttgggggccatccctgcggtccaccctctgaacccccagcatgtttgtcctgtttctcaccattgggttaaggggtgccgagcactagctagacttccacatagtcccaccccaagtgggcggcagtgttcctggcatgaccaggattcctgtgaaagcaggagcagcagcaagccgtcccgggcctgcctttcccatcctttggttctcctttccagtctgggttcacaccctgaaaagggatgggtgtgtcctctgagcactctggcatttgtcattgctgagcccatatcagtaggtcctgggacttgacaaagtatgtgggaggggaaggaaggacagaacttgactggctccatttcatggaccaactgatcaattgccagtactaagccactcattgttatggcttcctttttgaaaaccacctgtctcaaggattcaggtttctgctcacatccccagctgatgctcaataaaactcagccaggagcatatggagatgctgacagccaggtaatgggtgagactgtggggtcccttttcctctaaagcctttactctgaggataaggtcacaaagtagggtgtgacttgaaagtatcgtgaccatgtggcccaccagcagcctttccaaaggggaactccagagacatttcataatgcaaacagcactgttgctttaagaacaaggcctttggaggtggctaaacttgcacgcacgtgtgtgaaaagccatcccatcttctgcctccagttggagctttcagctgttaaaacagtcagaaactattgattcttccctttaggaaaaaatgctcaggcagaacggggtacatccacaggaggaatcggacgagaggatgtgacattcggtccaggagagaaagagcagtttctgttaaagatgtaacaaatggatttccaaagtctacatgacattcacttttcaaacttcccaccagttgaatttctttttttccttaagaaacaggtgatgtcttggaaaacagctccttatgtctctctgtgcatctccattttcctagtctctggagtctcaaaaagagtggcaaagcactttacagtagtaactgaggaatcagagtctctgcttcagcgatatctagtttgtacagttgggtgatcttttgtaattcctaggaggtaatgcatttttaatgttttctgaagctttgtaagtgtgagagagggacaagaagtgcagttctgttctggaattccttattgctttcaacggacactctttgtgaaaaatccaagtaatattttagttcaaacttgatcttgagccaaggcccactgccacctctgggatgggagtcggacctacataccaagtgacaagttcaccttaacatctgcttccagaatggctttgattcagccgtgccaggcaacagaacagggtcagactcctgctctgttattggcttgaagactaggatcccaaaggggttggaggcagggaatatttgaaaattcagactggaattccaggccaaaagctcaagaccaccagcctctcctcctgcctggaaaaataagcctttgtgaaagactgatttaccatgtacaattgtgattgtgaacgttgttgagtaaacctccagactttctctaaa

SEQ ID NO: 27750 - DNA, 5200 bp, Homo sapiens
acctagacgtaacacagcactccatagtggattagagctcagattctgaagtcagctaaaacagggtttaaattttggctccaccacttactctgtgacctgagtcacatttcttagcttctctgagcctccatttcagcatctgtaaaatgttactacctactttataggttttctgatgaggcttaagtgtggttgtgcatgtgaccatcttagcatagtgtgtggcaatggtaagcactcagtgctgtcagctgtttttaccgctgttattatattactgtgttttcccatgtcattaggtctgtgatccaggcttcagcagacaatccaggctgatgcttttgctgagtgcactaagggatgctggcctggcgggatggtgaactggaagcagaaacgtcatcctctctcttccttcttgccatgcaggtgtggatgtgtgggggccgcatggaggacatcccctgctccagggtgggccatatctacaggaagtatgtgccctacaaggtcccggccggagtcagcctggcccggaaccttaagcgggtggccgaagtgtggatggatgagtacgcagagtacatttaccagcgccggcctgaataccgccacctctccgctggggatgtcgcagtccagaaaaagctccgcagctcccttaactgcaagagtttcaagtggtttatgacgaagatagcctgggacctgcccaaattctacccacccgtggagcccccggctgcagcttggggggagatccgaaatgtgggcacagggctgtgtgcagacacaaagcacggggccttgggctccccactaaggctagagggctgcgtccgaggccgtggggaggctgcctggaacaacatgcaggtattcaccttcacctggagagaggacatccggcctggagacccccagcacaccaagaagttctgctttgatgccatttcccacaccagccctgtcacgctgtacgactgccacagcatgaagggcaaccagctgtggaaataccgcaaagacaagaccctgtaccaccctgtcagtggcagctgcatggactgcagtgaaagtgaccataggatcttcatgaacacctgcaacccatcctctctcacccagcagtggctgtttgaacacaccaactcaacagtcttggaaaaattcaataggaactgagccctcatgtccccttggcaggccccccagggtctggcactcactgcagacttcctctttcaagggaggcagggcccctgtgggcactaggtgtaaaaggtgctggccaaatggttcagggtgaagagggctcttgattcaggggctggggtctgcctggtccttgagcccctgagttgtgggggtagggtgaagagcatatcccacaagaggccccacagggagcagagactgctttaatccctgctgacatcacggaaaagcaacagagccttttcaactttgtcactatgtccccttgaacattatgtgggagaacaccaaggtagcctaggccacccaaaagtgagtcctgcgaggttgcccagccctcagatggctctcctacatgatggtgctttagaaacaaaggtaaaatttgcctgtttggggcagcttttagtatcgatgccactcatctgcagcagaagagaaagaagtcctcttggggctttttagtttctgccgtcctggggggaacattgcagttactgcacagcttctgttctctgtcacaaccccaggtgatttggtccggtcaaaggccatacttggggccctaagagtgttcagtattgaatgctgatcagctgccaggtgaggagtcagaagagggagcccccctagacatttctttgcagctatggacatgcgggatatctccccctgctctctgggtatttgaaatgtcaattttagcactctccaggcacaaggacagcccagcaccagctttacagggcagtgtttcagatggccctgagcccacggaaaaggccaggtagacctccaaactagaaatgctggctgatttgccctgatccatgcttccatttccctgtctctcttccccaggcaattactggcctcaaaagaggaacagaggtgctgcgaggtgctcacctcacagagtctggaggcctccaggatcaactgtgggcaaagtgcctgcctctgacctcatcatggttctagttctcatacagaactccagaatttttaaagaactctataattggattgcaaactaggatgctacataggattctggtattccacatccaatatggatttctagaatgctgtgattaaaggagccagccaggtgtaatacagtcaaggcagcccccagcctagagacaatctgtgaaatccaaagttggtggtgttgggaaagcagggggacatgtgtccctcagctcagcagaggctgtggtacaacatggtccttggtgaagacctgcacccctggaacctcccaccatcatcacaactgtagtctcatttgcagtggagaaaagaacccgacgtcccacagccagatatacacccagctccatgccagcccttcatgtttaccttttgctttgttaattacatgtcagactcctagagggcctccagactaataggaagcatttctgtaaccaacctgccacccactgattcagaaatggaaatcacattccacaatctatggcttccaccagctagcccaggaaatacttgaaatcagcattccaattagtgttgagtctcttgattgtgtcatttaccaattaaataactgagacctaagtctgggaacagagccacgaatctgcctttgagatgctggcagatctcaaggccatcaattattgggggagggagggacaaacactcccaatcatccaccagtcagactgaatgtgtagctggcgaggaattacttccacttctggcccagcacaagccctgctttggccacctgtctgcaagagaggcggcccctgtgcttgcaacgcttacgtgttgatcccagtgtccttttccaaatgagtgctgtagctttagaagtggccctctatagaaagaagtcaaaagatgaggccccttctagaatctaggataacaagagtgttgacagtttgaggagtcgaattgagattcatcatcaaagagcaatgcagcgtcgttaaaataaaaactgtgccttttaaaaagaaaaatgcaaatatagagcaaatccctaaacttgaaccatttcctagtgccttgctagacaaacataaaggggcagggttgtggggaggggaacgtttttggtggtgtgtgcagttcctactggatgagtgtgtgtttcttaatgtctcatttcaagcaggagatgttgggtctggagcaagatctgagactgagatgtcccccaagggtgacaggtcagatttatttcagtcagtgcaagtcacactccaaactaaaggctgggcagtgcgtttagtctgtggcctagaagacctcatcagcccccgagaggaggccttgcattacctcactgggacctgtttgggggccatccctgcggtccaccctctgaacccccagcatgtttgtcctgtttctcaccattgggttaaggggtgccgagcactagctagacttccacatagtcccaccccaagtgggcggcagtgttcctggcatgaccaggattcctgtgaaagcaggagcagcagcaagccgtcccgggcctgcctttcccatcctttggttctcctttccagtctgggttcacaccctgaaaagggatgggtgtgtcctctgagcactctggcatttgtcattgctgagcccatatcagtaggtcctgggacttgacaaagtatgtgggaggggaaggaaggacagaacttgactggctccatttcatggaccaactgatcaattgccagtactaagccactcattgttatggcttcctttttgaaaaccacctgtctcaaggattcaggtttctgctcacatccccagctgatgctcaataaaactcagccaggagcatatggagatgctgacagccaggtaatgggtgagactgtggggtcccttttcctctaaagcctttactctgaggataaggtcacaaagtagggtgtgacttgaaagtatcgtgaccatgtggcccaccagcagcctttccaaaggggaactccagagacatttcataatgcaaacagcactgttgctttaagaacaaggcctttggaggtggctaaacttgcacgcacgtgtgtgaaaagccatcccatcttctgcctccagttggagctttcagctgttaaaacagtcagaaactattgattcttccctttaggaaaaaatgctcaggcagaacggggtacatccacaggaggaatcggacgagaggatgtgacattcggtccaggagagaaagagcagtttctgttaaagatgtaacaaatggatttccaaagtctacatgacattcacttttcaaacttcccaccagttgaatttctttttttccttaagaaacaggtgatgtcttggaaaacagctccttatgtctctctgtgcatctccattttcctagtctctggagtctcaaaaagagtggcaaagcactttacagtagtaactgaggaatcagagtctctgcttcagcgatatctagtttgtacagttgggtgatcttttgtaattcctaggaggtaatgcatttttaatgttttctgaagctttgtaagtgtgagagagggacaagaagtgcagttctgttctggaattccttattgctttcaacggacactctttgtgaaaaatccaagtaatattttagttcaaacttgatcttgagccaaggcccactgccacctctgggatgggagtcggacctacataccaagtgacaagttcaccttaacatctgcttccagaatggctttgattcagccgtgccaggcaacagaacagggtcagactcctgctctgttattggcttgaagactaggatcccaaaggggttggaggcagggaatatttgaaaattcagactggaattccaggccaaaagctcaagaccaccagcctctcctcctgcctggaaaaataagcctttgtgaaagactgatttaccatgtacaattgtgattgtgaacgttgttgagtaaacctccagactttctctaaa

SEQ ID NO: 27751 - DNA, 3823 bp, Homo sapiens
agcgggttggagcggggccggcgccgcagccgcttctgctggctgagctgctgccgccgccgggcggacgggcggacgcgcggagctgggggcggcgcggcggggccggcggggctgcggcggggctgaccggccccgatgaggcggaaggagaagcggctcctgcaggcggtggcgctggtgctggcggccctggtcctcctgcccaacgtggggctttgggcgctgtaccgcgagcggcagcccgacggcacccctgggggatcgggggcggcggtggcgccggcggcgggacagggctcacacagtcgacaaaagaaaacgtttttcttgggagatgggcagaagctgaaggactggcatgacaaggaggccatccggagggacgctcagcgcgtaggaaatggagaacaaggaagacctaaccccatgaccgatgctgagagagtggatcaggcataccgagaaaatggatttaacatctacgtcagtgataaaatctccttgaatcgctctctcccagatatccggcacccaaactgcaacagcaagcgctacctggagacacttcccaacacaagcatcatcatccccttccacaacgagggctggtcctccctcctccgcaccgtccacagtgtgctcaatcgctcgcctccagagctggtcgccgagattgtactggtcgacgacttcagtgatcgagaccgcattgctcggaaccgcaagaccattgtgtgcccgatgattgatgtaattgaccatgacgactttcggtacgagacacaggcaggggatgccatgcggggagcctttgactgggagatgtactacaagcggatcccgatccctccagaactgcagaaagctgaccccagcgacccatttgagtctcccgtgatggccggtggactgttcgccgtggatcggaagtggttctgggaactcggcgggtatgacccaggcttggagatctggggaggggagcagtatgaaatctccttcaaggtgtggatgtgtgggggccgcatggaggacatcccctgctccagggtgggccatatctacaggaagtatgtgccctacaaggtcccggccggagtcagcctggcccggaaccttaagcgggtggccgaagtgtggatggatgagtacgcagagtacatttaccagcgccggcctgaataccgccacctctccgctggggatgtcgcagtccagaaaaagctccgcagctcccttaactgcaagagtttcaagtggtttatgacgaagatagcctgggacctgcccaaattctacccacccgtggagcccccggctgcagcttggggggagatccgaaatgtgggcacagggctgtgtgcagacacaaagcacggggccttgggctccccactaaggctagagggctgcgtccgaggccgtggggaggctgcctggaacaacatgcaggtattcaccttcacctggagagaggacatccggcctggagacccccagcacaccaagaagttctgctttgatgccatttcccacaccagccctgtcacgctgtacgactgccacagcatgaagggcaaccagctgtggaaataccgcaaagacaagaccctgtaccaccctgtcagtggcagctgcatggactgcagtgaaagtgaccataggatcttcatgaacacctgcaacccatcctctctcacccagcagtggctgtttgaacacaccaactcaacagtcttggaaaaattcaataggaactgagccctcatgtccccttggcaggccccccagggtctggcactcactgcagacttcctctttcaagggaggcagggcccctgtgggcactaggtgtaaaaggtgctggccaaatggttcagggtgaagagggctcttgattcaggggctggggtctgcctggtccttgagcccctgagttgtgggggtagggtgaagagcatatcccacaagaggccccacagggagcagagactgctttaatccctgctgacatcacggaaaagcaacagagccttttcaactttgtcactatgtccccttgaacattatgtgggagaacaccaaggtagcctaggccacccaaaagtgagtcctgcgaggttgcccagccctcagatggctctcctacatgatggtgctttagaaacaaaggtaaaatttgcctgtttggggcagcttttagtatcgatgccactcatctgcagcagaagagaaagaagtcctcttggggctttttagtttctgccgtcctggggggaacattgcagttactgcacagcttctgttctctgtcacaaccccaggtgatttggtccggtcaaaggccatacttggggccctaagagtgttcagtattgaatgctgatcagctgccaggtgaggagtcagaagagggagcccccctagacatttctttgcagctatggacatgcgggatatctccccctgctctctgggtatttgaaatgtcaattttagcactctccaggcacaaggacagcccagcaccagctttacagggcagtgtttcagatggccctgagcccacggaaaaggccaggtagacctccaaactagaaatgctggctgatttgccctgatccatgcttccatttccctgtctctcttccccaggcaattactggcctcaaaagaggaacagaggtgctgcgaggtgctcacctcacagagtctggaggcctccaggatcaactgtgggcaaagtgcctgcctctgacctcatcatggttctagttctcatacagaactccagaatttttaaagaactctataattggattgcaaactaggatgctacataggattctggtattccacatccaatatggatttctagaatgctgtgattaaaggagccagccaggtgtaatacagtcaaggcagcccccagcctagagacaatctgtgaaatccaaagttggtggtgttgggaaagcagggggacatgtgtccctcagctcagcagaggctgtggtacaacatggtccttggtgaagacctgcacccctggaacctcccaccatcatcacaactgtagtctcatttgcagtggagaaaagaacccgacgtcccacagccagatatacacccagctccatgccagcccttcatgtttaccttttgctttgttaattacatgtcagactcctagagggcctccagactaataggaagcatttctgtaaccaacctgccacccactgattcagaaatggaaatcacattccacaatctatggcttccaccagctagcccaggaaatacttgaaatcagcattccaattagtgttgagtctcttgattgtgtcatttaccaattaaataactgagacctaagtctgggaacagagccacgaatctgcctttgagatgctggcagatctcaaggccatcaattattgggggagggagggacaaacactcccaatcatccaccagtcagactgaatgtgtagctggcgaggaattacttccacttctggcccagcacaagccctgctttggccacctgtctgcaagagaggcggcccctgtgcttgcaacgcttacgtgttgatcccagtgtccttttccaaatgagtgctgtagctttagaagtggccctctatagaaagaagtcaaaagatgaggccccttctagaatctaggataacaagagtgttgacagtttgaggagtcgaattgagattcatcatcaaagagcaatgcagcgtcgttaaaataaaaactgtgccttttaaaaagaaaaatgcaaatatagagcaaatccctaaacttg

SEQ ID NO: 27752 - DNA, 822 bp, Homo sapiens
gtttaaattttggctccaccacttactctgtgacctgagtcacatttcttagcttctctgagcctccatttcagcatctgtaaaatgttactacctactttataggttttctgatgaggcttaagtgtggttgtgcatgtgaccatcttagcatagtgtgtggcaatggtaagcactcagtgctgtcagctgtttttaccgctgttattatattactgtgttttcccatgtcattaggtctgtgatccaggcttcagcagacaatccaggctgatgcttttgctgagtgcactaagggatgctggcctggcgggatggtgaactggaagcagaaacgtcatcctctctcttccttcttgccatgcaggtgtggatgtgtgggggccgcatggaggacatcccctgctccagggtgggccatatctacaggaagtatgtgccctacaaggtcccggccggagtcagcctggcccgggtaaggtggtggctttccttggcgggtagaaggggttggcctaggaccatcagctgcactgaggcaccctggggccctagactgtgttatgtgatctctgggtttgaggatgtgcctcccattctccaggtgaaatctgatttaaaagaactcccttaaatccctacttaaccattcattgctatgtgacctggggagggttgcttaagtcctctgaacctgtgtttcctcctttgtttaaagagagctaattctttccaactcccagcattgccaggagaattaaggaggtgatactgtttcccagagtgtgacagaggagacgatcttaggcagcaaacacagga

SEQ ID NO: 27753 - DNA, 370 bp, Homo sapiens
ggaggatcccagctgcgttgacatcgacgagaaaaggtgtggaggagcagctggcccagctacgctgtgagatggagcagcagagccaggagtaccagatcttgctggatgtgaagacgcggctggagcaggagattgccacctaccgccgcctgctggagggcgaggatgcccacctttcctcccagcaagcatctggccaatcctattcttcccgcgaggtcttcacctcctcctcgtcctcttcgagccgtcagacccggccagacgttatgaacaacgtcctccacctacattccaggccagcaggcttcgtctcttgaggatcccctatatcgacagccaggcccacaactcccctctcctccag

SEQ ID NO: 27754 - DNA, 1653 bp, Homo sapiens
gcatccctttccaatttacccgagcaccttctcttcactcagccaactgctcgctcgctcacctccctcctctgcaccatgaccacctgcagccgccagttcacctcctccagctccatgaagggctcctgcggcatcgggggcggcatcgggggcggctccagccgcatctcctccgtcctggccggagggtcctgccgcgcccccagcacctacgggggcggcctgtctgtctcatcctcccgcttctcctctgggggagcctacgggctggggggcggctatggcggtggcttcagcagcagcagcagcagctttggtagtggctttgggggaggatatggtggtggccttggtgctggcttgggtggtggctttggtggtggctttgctggtggtgatgggcttctggtgggcagtgagaaggtgaccatgcagaacctcaacgaccgcctggcctcctacctggacaaggtgcgtgctctggaggaggccaacgccgacctggaagtgaagatccgtgactggtaccagaggcagcggcctgctgagatcaaagactacagtccctacttcaagaccattgaggacctgaggaacaagattctcacagccacagtggacaatgccaatgtccttctgcagattgacaatgcccgtctggccgcggatgacttccgcaccaagtatgagacagagttgaacctgcgcatgagtgtggaagccgacatcaatggcctgcgcagggtgctggacgaactgaccctggccagagctgacctggagatgcagattgagagcctgaaggaggagctggcctacctgaagaagaaccacgaggaggagatgaatgccctgagaggccaggtgggtggagatgtcaatgtggagatggacgctgcacctggcgtggacctgagccgcattctgaacgagatgcgtgaccagtatgagaagatggcagagaagaaccgcaaggatgccgaggaatggttcttcaccaagacagaggagctgaaccgcgaggtggccaccaacagcgagctggtgcagagcggcaagagcgagatctcggagctccggcgcaccatgcagaacctggagattgagctgcagtcccagctcagcatgaaagcatccctggagaacagcctggaggagaccaaaggtcgctactgcatgcagctggcccagatccaggagatgattggcagcgtggaggagcagctggcccagctccgctgcgagatggagcagcagaaccaggagtacaagatcctgctggacgtgaagacgcggctggagcaggagatcgccacctaccgccgcctgctggagggcgaggacgcccacctctcctcctcccagttctcctctggatcgcagtcatccagagatgtgacctcctccagccgccaaatccgcaccaaggtcatggatgtgcacgatggcaaggtggtgtccacccacgagcaggtccttcgcaccaagaactgaggctgcccagccccgctcaggcctaggaggccccccgtgtggacacagatcccactggaagatcccctctcctgcccaagcacttcacagctggaccctgcttcaccctcaccccctcctggcaatcaatacagcttcattatctgagttgcataa

SEQ ID NO: 27755 - DNA, 669 bp, Homo sapiens
caggtccttcgcaccaagaactgaggctgctcgtgggtggacaccaccttgccatcgtgcacatcatcaggtccttcgcaccaagaactgaggctgcccagccccgctcaggcctaggaggccccccgtgtggacacagatcccactggaagatcccctctcctgcccaagcacttcacagctggaccctgcttcaccctcaccccctcctggcaatcaatacagcttcattatctgagttgcataaaaaaaaaaaaaaaaaaaaaaaaaaaaaaaaaaaaaaaaaaaaaaaaaaaaaaaaaaaaagaaacaaagaatagaaggtggcggcgggtggtgctaatattaattgtctccagcatggtggcaacgcaatgagtcaaacctgcactcgaccaggtcttattgtaagactgagggggtcgcctcacatactgccagcggaggtgttatcttaccacccgatagcgcgagggacgactatttgacacaccgctgctatcggacccggaaccaacgcgcgagtcatcgccgtggaccctctttgcgacaaggagccctccactgccctctctggcgggtgcgcccacctgacgtggcgcgacgcatgcaaccagcgctcttgatccccccccctccgggtcatcatgcaaccgttctcgaggttga

SEQ ID NO: 27756 - DNA, 278 bp, Homo sapiens
tagaggattttacgtaatatgtactgacctcctccagccgccaaatccgcaccaaggtcatggatgtgcacgatggcaaggtggtgtccacccacgagcaggtccttcgcaccaagaactgaggctgcccagccccgctcaggcctaggaggccccccgtgtggacacagatcccactggaagatcccctctcctgcccaagcacttcacagctggaccctgcttcaccctcaccccctcctggcaatcaatacagcttcattatctgagttgcataa

SEQ ID NO: 27757 - DNA, 476 bp, Homo sapiens
tcggtaccccgcctgctgccttccttggatgtggcagcgttccacaacagctggcccagctccgctgcgagatggagcagcagaaccaggagtacaagatcctgctggacgtgaagacgcggctggagcaggagatcgccacctaccgccgcctgctggagggcgaggacgcccacctctcctcctcccagttctcctctggatcgcagtcatccagagatgtgacctcctccagccgccaaatccgcaccaaggtcatggatgtgcacgatggcaaggtggtgtccacccacgagcaggtccttcgcaccaagaactgaggctgcccagccccgctcaggcctaggaggccccccgtgtggacacagatcccactggaagatcccctctcctgcccaagcacttcacagctggaccctgcttcaccctcaccccctcctggcaatcaatacagcttcattatctgagttgcataa

SEQ ID NO: 27758 - DNA, 274 bp, Homo sapiens
gtgatctagaggatcccggatgacctcctccagccgccaaatccgcaccaaggtcatggatgtgcacgatggcaaggtggtgtccacccacgagcaggtccttcgcaccaagaactgaggctgcccagccccgctcaggcctaggaggccccccgtgtggacacagatcccactggaagatcccctctcctgcccaagcacttcacagctggaccctgcttcaccctcaccccctcctggcaatcaatacagcttcattatctgagttgcataa

SEQ ID NO: 27759 - DNA, 1060 bp, Homo sapiens
tgatgctagtgattggtggcttgatggggatggcattgaatctataaattaccttgggcagtatagccattttcacgatattgattcttcctatccatgagcgtggaatgttctccatttgtttgtgtcctcttttagttcgttgagatcaggcaagtccggacatgcagaacctcaacgaccgcctggcctcctacctggacaaggtgcgtgctctggaggaggccaacgccgacctggaagtgaagatccgtgactggtaccagaggcagcggcctgctgagatcaaagactacagtccctacttcaagaccattgaggacctgaggaacaagggtgggtgaatgggcagcagaaggcaccattccagctagctccttctgggaacaattcatgccccaggccgctgagaccttaagatttctctataggacagagtccaccccagatcccttctttcgaggtcttggatgccctaagactgatcagtgagaagatgctttcccttccccagcctcctcatccccttctgatctcaaatcctcagaccgttgagatcagtgattcctatccttacattttttagaggaagcagttgaagcttcgagaggtgctgtgaccagctgcaggtcacatagcaaattaatggcagagccaaggctggggcccttgtgccctaccttccagcacaggaggcagctacttgttctccagcacaggggaggagtgaggctctaacgggaccaggcaagacatccaaaccactcattagctcactagtctgggctgtggctgccgccgcccataagccttggtacaggctggtccctccccacagccaggcgggcatggagagcctgcagagacaattagtgtggtcccttgatgtgccctgcacagagagagcctggcaggcttgtgccctgactctagccccctcctccctgctcccacattacttgggagccctccctgctggagtctgttgggctctaatgacttgcatggattagggaaattcaatgatgaggtggggaaatccaaccagactcaggggcca

SEQ ID NO: 27760 - DNA, 303 bp, Homo sapiens
taggtccattggtcattgaggtccattgatgtcggcttccacactgacatcaatggcctgcgcagggtgctggacgaactgaccctggccagagctgacctggagatgcagattgagagcctgaaggaggagctggcctacctgaagaagaaccacgaggaggagatgaatgccctgagaggccaggtgggtggagatgtcaatggacctaaatggacaatggacctaaatggacaatggacctaaatggacatatggacctaaatggacgatggacctaaatggacaatggacctaaatgga

SEQ ID NO: 27761 - DNA, 396 bp, Homo sapiens
agatggctatagtggcccttgggatacctctttttagcaattacactttacaaacagggagactgggcacctttggggagtggccaggatcacccagggaagtggtagcagagggtcccttttcagtatctctgtgcccggactggggctgttaccctaaatctcttatttccttcaagggttcagctgcaagttcagcttccctgccttgggcccaggaagggggtgatcgggatggagtgcatccctacgtagcctgagctggtggagaaggcatgccagccctgccagccagaagacttccagatttggggcggttccttttgcccctttctgcctttcatgctcaagtagtaaggtccttggctgaccagggctcctgtcctcatccccact

SEQ ID NO: 27762 - DNA, 1658 bp, Homo sapiens
agggactcccacgcgcaaacactttcccttctttggggagaaaaatctgctcactcgctcactccctccttggcaccatgaccacctgcagccgccagttcacctcctccagctccatgaagggctcctgcggcatcggaggcggcatcgggggcggctccagccgcatctcctccgtcctggccggagggtcctgccgtgcccccagcacctacgggggcggcctgtctgtctcctctcgcttctcctctgggggagcctgcgggctggggggcggctatggcggtggcttcagcagcagcagcagctttggtagtggcttcgggggaggatatggtggtggccttggtgctggcttcggtggtggcttgggtgctggctttggtggtggttttgctggtggtgatgggcttctggtgggcagtgagaaggtgaccatgcagaacctcaatgaccgcctggcctcctacctggacaaggtgcgtgctctggaggaggccaacgccgacctggaagtgaagatccgtgactggtaccagaggcagcggcccagtgagatcaaagactacagtccctacttcaagaccatcgaggacctgaggaacaagatcattgcggccaccattgagaatgcgcagcccattttgcagattgacaatgccaggctggcagccgatgacttcaggaccaagtatgagacagagttgaacctgcgcatgagtgtggaagccgacatcaatggcctgcgcagggtgctggacgaactgaccctggccagagctgacctggagatgcagattgagagcctgaaggaggagctggcctacctgaagaagaaccacgaggaggagatgaatgccctgagaggccaggtgggtggagatgtcaatgtggagatggacgctgcacctggcgtggacctgagccgcattctgaacgagatgcgtgaccagtatgagaagatggcagagaagaaccgcaaggatgccgaggaatggttcttcaccaagacagaggagctgaaccgcgaggtggccaccaacagcgagctggtgcagagcggcaagagcgagatctcggagctccggcgcaccatgcagaacctggagattgagctgcagtcccagctcagcatgaaagcatccctggagaacagcctggaggagaccaaaggtcgctactgcatgcagctggcccagatccaggagatgattggcagcgtggaggagcagctggcccagctccgctgcgagatggagcagcagaaccaggagtacaagatcctgctggacgtgaagacgcggctggagcaggagatcgccacctaccgccgcctgctggagggcgaggacgcccacctctcctcctcccagttctcctctggatcgcagtcatccagagatgtgacctcctccagccgccaaatccgcaccaaggtcatggatgtgcacgatggcaaggtggtgtccacccacgagcaggtccttcgcaccaagaactgaggctgcccagccccgctcaggcctaggaggccccccgtgtggacacagatcccactggaagatcccctctcctgcccaagcacttcacagctggaccctgcttcaccctcaccccctcctggcaatcaatacagcttcattatctgagttgcataa

SEQ ID NO: 27763 - DNA, 1830 bp, Homo sapiens
  misc_feature (1825)..(1825): n is a, c, g, or t
agggactcccacgcgcaaacactttcccttctttggggagaaaaatctgctcactcgctcactccctccttggcaccatgaccacctgcagccgccagttcacctcctccagctccatgaagggctcctgcggcatcggaggcggcatcgggggcggctccagccgcatctcctccgtcctggccggagggtcctgccgtgcccccagcacctacgggggcggcctgtctgtctcctctcgcttctcctctgggggagcctgcgggctggggggcggctatggcggtggcttcagcagcagcagcagctttggtagtggcttcgggggaggatatggtggtggccttggtgctggcttcggtggtggcttgggtgctggctttggtggtggttttgctggtggtgatgggcttctggtgggcagtgagaaggtgaccatgcagaacctcaatgaccgcctggcctcctacctggacaaggtgcgtgctctggaggaggccaacgccgacctggaagtgaagatccgtgactggtaccagaggcagcggcccagtgagatcaaagactacagtccctacttcaagaccatcgaggacctgaggaacaagatcattgcggccaccattgagaatgcgcagcccattttgcagattgacaatgccaggctggcagccgatgacttcaggaccaagtatgagacagagttgaacctgcgcatgagtgtggaagccgacatcaatggcctgcgcagggtgctggacgaactgaccctggccagagctgacctggagatgcagattgagagcctgaaggaggagctggcctacctgaagaagaaccacgaggaggagatgaatgccctgagaggccaggtgggtggagatgtcaatgtggagatggacgctgcacctggcgtggacctgagccgcattctgaacgagatgcgtgaccagtatgagaagatggcagagaagaaccgcaaggatgccgaggaatggttcttcaccaagacagaggagctgaaccgcgaggtggccaccaacagcgagctggtgcagagcggcaagagcgagatctcggagctccggcgcaccatgcagaacctggagattgagctgcagtcccagctcagcatgaaagcatccctggagaacagcctggaggagaccaaaggtcgctactgcatgcagctggcccagatccaggagatgattggcagcgtggaggagcagctggcccagctccgctgcgagatggagcagcagaaccaggagtacaagatcctgctggacgtgaagacgcggctggagcaggagatcgccacctaccgccgcctgctggagggcgaggacgcccacctctcctcctcccagttctcctctggatcgcagtcatccagagatgtgacctcctccagccgccaaatccgcaccaaggtcatggatgtgcacgatggcaaggtggtgtccacccacgagcaggtccttcgcaccaagaactgaggctgcccagccccgctcaggcctaggaggccccccgtgtggacacagatcccactggaagatcccctctcctgcccaagcacttcacagctggaccctgcttcaccctcaccccctcctggcaatcaatacagcttcattatctgagttgcataaaaaaaaaaaaaaaaaaaaaaaaaaaaaaaaaaaaaaaaaaaaaaaaaaaaaaaaaaaaaaaaaaaaaaaaaaaaaaaaaaaaaaaaaaaggggggggccgccaaaaatttcccccggggggccccaattttccgcttccccttttttttgaaaagggggcccccttnagggg

SEQ ID NO: 27764 - DNA, 2707 bp, Homo sapiens
agggactcccacgcgcaaacactttcccttctttggggagaaaaatctgctcactcgctcactccctccttggcaccatgaccacctgcagccgccagttcacctcctccagctccatgaagggctcctgcggcatcggaggcggcatcgggggcggctccagccgcatctcctccgtcctggccggagggtcctgccgtgcccccagcacctacgggggcggcctgtctgtctcctctcgcttctcctctgggggagcctgcgggctggggggcggctatggcggtggcttcagcagcagcagcagctttggtagtggcttcgggggaggatatggtggtggccttggtgctggcttcggtggtggcttgggtgctggctttggtggtggttttgctggtggtgatgggcttctggtgggcagtgagaaggtgaccatgcagaacctcaatgaccgcctggcctcctacctggacaaggtgcgtgctctggaggaggccaacgccgacctggaagtgaagatccgtgactggtaccagaggcagcggcccagtgagatcaaagactacagtccctacttcaagaccatcgaggacctgaggaacaagatcattgcggccaccattgagaatgcgcagcccattttgcagattgacaatgccaggctggcagccgatgacttcaggaccaagtatgagacagagttgaacctgcgcatgagtgtggaagccgacatcaatggcctgcgcagggtgctggacgaactgaccctggccagagctgacctggagatgcagattgagagcctgaaggaggagctggcctacctgaagaagaaccacgaggaggagatgaatgccctgagaggccaggtgggtggagatgtcaatgtggagatggacgctgcacctggcgtggacctgagccgcattctgaacgagatgcgtgaccagtatgagaagatggcagagaagaaccgcaaggatgccgaggaatggttcttcaccaagacagaggagctgaaccgcgaggtggccaccaacagcgagctggtgcagagcggcaagagcgagatctcggagctccggcgcaccatgcagaacctggagattgagctgcagtcccagctcagcatgaaagcatccctggagaacagcctggaggagaccaaaggtcgctactgcatgcagctggcccagatccaggagatgattggcagcgtggaggagcagctggcccagctccgctgcgagatggagcagcagaaccaggagtacaagatcctgctggacgtgaagacgcggctggagcaggagatcgccacctaccgccgcctgctggagggcgaggacgcccacctctcctcctcccagttctcctctggatcgcagtcatccagagatgtgacctcctccagccgccaaatccgcaccaaggtcatggatgtgcacgatggcaaggtggtgtccacccacgagcaggtccttcgcaccaagaactgaggctgcccagccccgctcaggcctaggaggccccccgtgtggacacagatcccactggaagatcccctctcctgcccaagcacttcacagctggaccctgcttcaccctcaccccctcctggcaatcaatacagcttcattatctgagttgcataatatgtaacaaagaaaaataaaaaagaaaaaaaaaaaaaaaaaaaaaaaaaaaaaaaaaaaaaaaaaaaacaaaaagaaaaaaacaacaaaaaaacaagaagaggagggcggcggcgcgcgcaagaaagagatacactctcccgagaggagggcgccagcagaacgagccccgcgccacccgaagttatcttgtttataaaaagagagcgggcgcacccccaagaagagagggcgagggcgatattatataatagagaaagagaacgagagacgagagcgcggcttatatatataaacacacaaggagcagatgaaggagaggagaaaaaaaacgaagcgctagtagcagtgaggagagaataactatgtgagaggaagaaggagacacacacattatttctctgtgtggggggggagaagcgagaacaaaatatagggaggagagaacaacaaaataactatacccataggaggaagatatattaatatagaccacccactgcgacagagggagagaaaaataaaacataaaacaatatctataagcgcacaagagataataataaaggtgaggagaacaaaaccaaccaaaacgacagatataatataatctctggctgacgcattacgaaaaaaaaacaaaacttgcgccgctaacaaggaacgaagaaagagatcattacgaacaacaaaaacactatatatacaccaggcgggggcagacatgcgctccaccaccacaaacacacccagaaggacaaaaagagcagaagagagagcagagacgacaacggaagcagagcaccaaggggcaagccgacgcacaagaagcagagaagaagagacacagagaagatagaaagggggaagagcagaggagaagcggagagagccagaacaagggcgacaagccacattaaagggagcgagagaagaagcgagacggaggaggacaagcgaaaggcgcacagccagcgcaacaagggcgaggccacgacaaacgcaaacagcagacagacaacacaaccgaaaaacagcagccagagcgg

SEQ ID NO: 27765 - DNA, 2172 bp, Homo sapiens
agggactcccacgcgcaaacactttcccttctttggggagaaaaatctgctcactcgctcactccctccttggcaccatgaccacctgcagccgccagttcacctcctccagctccatgaagggctcctgcggcatcggaggcggcatcgggggcggctccagccgcatctcctccgtcctggccggagggtcctgccgtgcccccagcacctacgggggcggcctgtctgtctcctctcgcttctcctctgggggagcctgcgggctggggggcggctatggcggtggcttcagcagcagcagcagctttggtagtggcttcgggggaggatatggtggtggccttggtgctggcttcggtggtggcttgggtgctggctttggtggtggttttgctggtggtgatgggcttctggtgggcagtgagaaggtgaccatgcagaacctcaatgaccgcctggcctcctacctggacaaggtgcgtgctctggaggaggccaacgccgacctggaagtgaagatccgtgactggtaccagaggcagcggcccagtgagatcaaagactacagtccctacttcaagaccatcgaggacctgaggaacaagatcattgcggccaccattgagaatgcgcagcccattttgcagattgacaatgccaggctggcagccgatgacttcaggaccaagtatgagacagagttgaacctgcgcatgagtgtggaagccgacatcaatggcctgcgcagggtgctggacgaactgaccctggccagagctgacctggagatgcagattgagagcctgaaggaggagctggcctacctgaagaagaaccacgaggaggagatgaatgccctgagaggccaggtgggtggagatgtcaatgtggagatggacgctgcacctggcgtggacctgagccgcattctgaacgagatgcgtgaccagtatgagaagatggcagagaagaaccgcaaggatgccgaggaatggttcttcaccaagacagaggagctgaaccgcgaggtggccaccaacagcgagctggtgcagagcggcaagagcgagatctcggagctccggcgcaccatgcagaacctggagattgagctgcagtcccagctcagcatgaaagcatccctggagaacagcctggaggagaccaaaggtcgctactgcatgcagctggcccagatccaggagatgattggcagcgtggaggagcagctggcccagctccgctgcgagatggagcagcagaaccaggagtacaagatcctgctggacgtgaagacgcggctggagcaggagatcgccacctaccgccgcctgctggagggcgaggacgcccacctctcctcctcccagttctcctctggatcgcagtcatccagagatgtgacctcctccagccgccaaatccgcaccaaggtcatggatgtgcacgatggcaaggtggtgtccacccacgagcaggtccttcgcaccaagaactgaggctgcccagccccgctcaggcctaggaggccccccgtgtggacacagatcccactggaagatcccctctcctgcccaagcacttcacagctggaccctgcttcaccctcaccccctcctggcaatcaatacagcttcattatctgagttgcataaaaaaaaaaaaaaaaaaaaaaaaaaaaaaaaaaaaaaaaaaaaaaaaaaaaaaaaaaaaaaaaaaaaaaaaaagagggggcggcggcgcaaagaaagtacccccgagaggggcgcgcaacacaaacccggcccccacggttgagaaaaaagggggcgcccccaagaaggggcgagataatataaaacagaaggcgagagcgggccgcgagaaaaaaaaaaggacagaggggacaaaaaaggaaaaagagaagaacaacaatgaggcgacgaacagccccaaacgaggggggggggggacacaaataagagggggcacaaccaaccctcgctaaaaacgagaataataacgaacccgctccgatcgggaggataataatacaagacaaatagtaacgaggggtggattataaggggggggtagcaacaaagcaggagacaaggcgcctgggcagggaacaaacaaacttgtaggcaccacagaggaagtattatatgagagaaatttattacccgc

SEQ ID NO: 27766 - DNA, 1835 bp, Homo sapiens
agggactcccacgcgcaaacactttcccttctttggggagaaaaatctgctcactcgctcactccctccttggcaccatgaccacctgcagccgccagttcacctcctccagctccatgaagggctcctgcggcatcggaggcggcatcgggggcggctccagccgcatctcctccgtcctggccggagggtcctgccgtgcccccagcacctacgggggcggcctgtctgtctcctctcgcttctcctctgggggagcctgcgggctggggggcggctatggcggtggcttcagcagcagcagcagctttggtagtggcttcgggggaggatatggtggtggccttggtgctggcttcggtggtggcttgggtgctggctttggtggtggttttgctggtggtgatgggcttctggtgggcagtgagaaggtgaccatgcagaacctcaatgaccgcctggcctcctacctggacaaggtgcgtgctctggaggaggccaacgccgacctggaagtgaagatccgtgactggtaccagaggcagcggcccagtgagatcaaagactacagtccctacttcaagaccatcgaggacctgaggaacaagatcattgcggccaccattgagaatgcgcagcccattttgcagattgacaatgccaggctggcagccgatgacttcaggaccaagtatgagacagagttgaacctgcgcatgagtgtggaagccgacatcaatggcctgcgcagggtgctggacgaactgaccctggccagagctgacctggagatgcagattgagagcctgaaggaggagctggcctacctgaagaagaaccacgaggaggagatgaatgccctgagaggccaggtgggtggagatgtcaatgtggagatggacgctgcacctggcgtggacctgagccgcattctgaacgagatgcgtgaccagtatgagaagatggcagagaagaaccgcaaggatgccgaggaatggttcttcaccaagacagaggagctgaaccgcgaggtggccaccaacagcgagctggtgcagagcggcaagagcgagatctcggagctccggcgcaccatgcagaacctggagattgagctgcagtcccagctcagcatgaaagcatccctggagaacagcctggaggagaccaaaggtcgctactgcatgcagctggcccagatccaggagatgattggcagcgtggaggagcagctggcccagctccgctgcgagatggagcagcagaaccaggagtacaagatcctgctggacgtgaagacgcggctggagcaggagatcgccacctaccgccgcctgctggagggcgaggacgcccacctctcctcctcccagttctcctctggatcgcagtcatccagagatgtgacctcctccagccgccaaatccgcaccaaggtcatggatgtgcacgatggcaaggtggtgtccacccacgagcaggtccttcgcaccaagaactgaggctgcccagccccgctcaggcctaggaggccccccgtgtggacacagatcccactggaagatcccctctcctgcccaagcacttcacagctggaccctgcttcaccctcacatccgtactggcccggggccagtacggatgtgcaggcactggccaagctgggccatgccagtgaccgcatcatcgccctggatggggacaccttcaattccaccttctcgcagatcttcaaaaaggatgtcacccggacctgcttcatcgactgctacattgctgactgaacatgtgagcatccgatggctgtagccacccgcatcagacgagtgcctttc

SEQ ID NO: 27767 - DNA, 1654 bp, Homo sapiens
agggactcccacgcgcaaacactttcccttctttggggagaaaaatctgctcactcgctcactccctccttggcaccatgaccacctgcagccgccagttcacctcctccagctccatgaagggctcctgcggcatcggaggcggcatcgggggcggctccagccgcatctcctccgtcctggccggagggtcctgccgtgcccccagcacctacgggggcggcctgtctgtctcctctcgcttctcctctgggggagcctgcgggctggggggcggctatggcggtggcttcagcagcagcagcagctttggtagtggcttcgggggaggatatggtggtggccttggtgctggcttcggtggtggcttgggtgctggctttggtggtggttttgctggtggtgatgggcttctggtgggcagtgagaaggtgaccatgcagaacctcaatgaccgcctggcctcctacctggacaaggtgcgtgctctggaggaggccaacgccgacctggaagtgaagatccgtgactggtaccagaggcagcggcccagtgagatcaaagactacagtccctacttcaagaccatcgaggacctgaggaacaagatcattgcggccaccattgagaatgcgcagcccattttgcagattgacaatgccaggctggcagccgatgacttcaggaccaagtatgagacagagttgaacctgcgcatgagtgtggaagccgacatcaatggcctgcgcagggtgctggacgaactgaccctggccagagctgacctggagatgcagattgagagcctgaaggaggagctggcctacctgaagaagaaccacgaggaggagatgaatgccctgagaggccaggtgggtggagatgtcaatgtggagatggacgctgcacctggcgtggacctgagccgcattctgaacgagatgcgtgaccagtatgagaagatggcagagaagaaccgcaaggatgccgaggaatggttcttcaccaagacagaggagctgaaccgcgaggtggccaccaacagcgagctggtgcagagcggcaagagcgagatctcggagctccggcgcaccatgcagaacctggagattgagctgcagtcccagctcagcatgaaagcatccctggagaacagcctggaggagaccaaaggtcgctactgcatgcagctggcccagatccaggagatgattggcagcgtggaggagcagctggcccagctccgctgcgagatggagcagcagaaccaggagtacaagatcctgctggacgtgaagacgcggctggagcaggagatcgccacctaccgccgcctgctggagggcgaggacgcccacctctcctcctcccagttctcctctggatcgcagtcatccagagatgtgacctcctccagccgccaaatccgcaccaaggtcatggatgtgcacgatggcaaggtggtgtccacccacgagcaggtccttcgcaccaagaactgaggctgcccagccccgctcaggcctaggaggccccccgtgtggacacagatcccactggaagatcccctctcctgcccaagcacttcacagctggaccctgcttcaccctcactgttaccctattatcgtgcatacagttagtcccttctcct

SEQ ID NO: 27768 - DNA, 1646 bp, Homo sapiens
  misc_feature (1617)..(1617): n is a, c, g, or t
agggactcccacgcgcaaacactttcccttctttggggagaaaaatctgctcactcgctcactccctccttggcaccatgaccacctgcagccgccagttcacctcctccagctccatgaagggctcctgcggcatcggaggcggcatcgggggcggctccagccgcatctcctccgtcctggccggagggtcctgccgtgcccccagcacctacgggggcggcctgtctgtctcctctcgcttctcctctgggggagcctgcgggctggggggcggctatggcggtggcttcagcagcagcagcagctttggtagtggcttcgggggaggatatggtggtggccttggtgctggcttcggtggtggcttgggtgctggctttggtggtggttttgctggtggtgatgggcttctggtgggcagtgagaaggtgaccatgcagaacctcaatgaccgcctggcctcctacctggacaaggtgcgtgctctggaggaggccaacgccgacctggaagtgaagatccgtgactggtaccagaggcagcggcccagtgagatcaaagactacagtccctacttcaagaccatcgaggacctgaggaacaagatcattgcggccaccattgagaatgcgcagcccattttgcagattgacaatgccaggctggcagccgatgacttcaggaccaagtatgagacagagttgaacctgcgcatgagtgtggaagccgacatcaatggcctgcgcagggtgctggacgaactgaccctggccagagctgacctggagatgcagattgagagcctgaaggaggagctggcctacctgaagaagaaccacgaggaggagatgaatgccctgagaggccaggtgggtggagatgtcaatgtggagatggacgctgcacctggcgtggacctgagccgcattctgaacgagatgcgtgaccagtatgagaagatggcagagaagaaccgcaaggatgccgaggaatggttcttcaccaagacagaggagctgaaccgcgaggtggccaccaacagcgagctggtgcagagcggcaagagcgagatctcggagctccggcgcaccatgcagaacctggagattgagctgcagtcccagctcagcatgaaagcatccctggagaacagcctggaggagaccaaaggtcgctactgcatgcagctggcccagatccaggagatgattggcagcgtggaggagcagctggcccagctccgctgcgagatggagcagcagaaccaggagtacaagatcctgctggacgtgaagacgcggctggagcaggagatcgccacctaccgccgcctgctggagggcgaggacgcccacctctcctcctcccagttctcctctggatcgcagtcatccagagatgtgacctcctccagccgccaaatccgcaccaaggtcatggatgtgcacgatggcaaggtggtgtccacccacgagcaggtccttcgcaccaagaactgaggctgcccagccccgctcaggcctaggaggccccccgtgtggacacagatcccactggaagatcccctctcctgcccaagcacttcacagctggaccctgcttcaccctcactgntgcctctggcggtaccgacgctcgaatcg

SEQ ID NO: 27769 - DNA, 1658 bp, Homo sapiens
agggactcccacgcgcaaacactttcccttctttggggagaaaaatctgctcactcgctcactccctccttggcaccatgaccacctgcagccgccagttcacctcctccagctccatgaagggctcctgcggcatcggaggcggcatcgggggcggctccagccgcatctcctccgtcctggccggagggtcctgccgtgcccccagcacctacgggggcggcctgtctgtctcctctcgcttctcctctgggggagcctgcgggctggggggcggctatggcggtggcttcagcagcagcagcagctttggtagtggcttcgggggaggatatggtggtggccttggtgctggcttcggtggtggcttgggtgctggctttggtggtggttttgctggtggtgatgggcttctggtgggcagtgagaaggtgaccatgcagaacctcaatgaccgcctggcctcctacctggacaaggtgcgtgctctggaggaggccaacgccgacctggaagtgaagatccgtgactggtaccagaggcagcggcccagtgagatcaaagactacagtccctacttcaagaccatcgaggacctgaggaacaagatcattgcggccaccattgagaatgcgcagcccattttgcagattgacaatgccaggctggcagccgatgacttcaggaccaagtatgagacagagttgaacctgcgcatgagtgtggaagccgacatcaatggcctgcgcagggtgctggacgaactgaccctggccagagctgacctggagatgcagattgagagcctgaaggaggagctggcctacctgaagaagaaccacgaggaggagatgaatgccctgagaggccaggtgggtggagatgtcaatgtggagatggacgctgcacctggcgtggacctgagccgcattctgaacgagatgcgtgaccagtatgagaagatggcagagaagaaccgcaaggatgccgaggaatggttcttcaccaagacagaggagctgaaccgcgaggtggccaccaacagcgagctggtgcagagcggcaagagcgagatctcggagctccggcgcaccatgcagaacctggagattgagctgcagtcccagctcagcatgaaagcatccctggagaacagcctggaggagaccaaaggtcgctactgcatgcagctggcccagatccaggagatgattggcagcgtggaggagcagctggcccagctccgctgcgagatggagcagcagaaccaggagtacaagatcctgctggacgtgaagacgcggctggagcaggagatcgccacctaccgccgcctgctggagggcgaggacgcccacctctcctcctcccagttctcctctggatcgcagtcatccagagatgtgacctcctccagccgccaaatccgcaccaaggtcatggatgtgcacgatggcaaggtggtgtccacccacgagcaggtccttcgcaccaagaactgaggctgcccagccccgctcaggcctaggaggccccccgtgtggacacagatcccactggaagatcccctctcctgcccaagcacttcacagctggaccctgcttcaccctcaccttggtgcctctggcctccttgtgcctctggagagtcctatagg

SEQ ID NO: 27770 - DNA, 1640 bp, Homo sapiens
agggactcccacgcgcaaacactttcccttctttggggagaaaaatctgctcactcgctcactccctccttggcaccatgaccacctgcagccgccagttcacctcctccagctccatgaagggctcctgcggcatcggaggcggcatcgggggcggctccagccgcatctcctccgtcctggccggagggtcctgccgtgcccccagcacctacgggggcggcctgtctgtctcctctcgcttctcctctgggggagcctgcgggctggggggcggctatggcggtggcttcagcagcagcagcagctttggtagtggcttcgggggaggatatggtggtggccttggtgctggcttcggtggtggcttgggtgctggctttggtggtggttttgctggtggtgatgggcttctggtgggcagtgagaaggtgaccatgcagaacctcaatgaccgcctggcctcctacctggacaaggtgcgtgctctggaggaggccaacgccgacctggaagtgaagatccgtgactggtaccagaggcagcggcccagtgagatcaaagactacagtccctacttcaagaccatcgaggacctgaggaacaagatcattgcggccaccattgagaatgcgcagcccattttgcagattgacaatgccaggctggcagccgatgacttcaggaccaagtatgagacagagttgaacctgcgcatgagtgtggaagccgacatcaatggcctgcgcagggtgctggacgaactgaccctggccagagctgacctggagatgcagattgagagcctgaaggaggagctggcctacctgaagaagaaccacgaggaggagatgaatgccctgagaggccaggtgggtggagatgtcaatgtggagatggacgctgcacctggcgtggacctgagccgcattctgaacgagatgcgtgaccagtatgagaagatggcagagaagaaccgcaaggatgccgaggaatggttcttcaccaagacagaggagctgaaccgcgaggtggccaccaacagcgagctggtgcagagcggcaagagcgagatctcggagctccggcgcaccatgcagaacctggagattgagctgcagtcccagctcagcatgaaagcatccctggagaacagcctggaggagaccaaaggtcgctactgcatgcagctggcccagatccaggagatgattggcagcgtggaggagcagctggcccagctccgctgcgagatggagcagcagaaccaggagtacaagatcctgctggacgtgaagacgcggctggagcaggagatcgccacctaccgccgcctgctggagggcgaggacgcccacctctcctcctcccagttctcctctggatcgcagtcatccagagatgtgacctcctccagccgccaaatccgcaccaaggtcatggatgtgcacgatggcaaggtggtgtccacccacgagcaggtccttcgcaccaagaactgaggctgcccagccccgctcaggcctaggaggccccccgtgtggacacagatcccactggaagatcccctctcctgcccaagcacttcacagctggaccctgcttcaccctcactacatctaatcagaggacagagctgt

SEQ ID NO: 27771 - DNA, 1662 bp, Homo sapiens
cgcgtggtaccggcccggaattttgggatcgtttccttctttcagccaactgctcactcgctcacctccctccttggcaccatgaccacctgcagccgccagttcacctcctccagctccatgaagggctcctgcggcatcggaggcggcatcgggggcggctccagccgcatctcctccgtcctggccggagggtcctgccgtgcccccagcacctacgggggcggcctgtctgtctcctctcgcttctcctctgggggagcctgcgggctggggggcggctatggcggtggcttcagcagcagcagcagctttggtagtggcttcgggggaggatatggtggtggccttggtgctggcttcggtggtggcttgggtgctggctttggtggtggttttgctggtggtgatgggcttctggtgggcagtgagaaggtgaccatgcagaacctcaatgaccgcctggcctcctacctggacaaggtgcgtgctctggaggaggccaacgccgacctggaagtgaagatccgtgactggtaccagaggcagcggcccagtgagatcaaagactacagtccctacttcaagaccatcgaggacctgaggaacaagatcattgcggccaccattgagaatgcgcagcccattttgcagattgacaatgccaggctggcagccgatgacttcaggaccaagtatgagcatgaactggccctgcggcagactgtggaggccgacgtcaatggcctgcgccgggtgttggatgagctgaccctggccaggactgacctggagatgcagatcgaaggcctgaaggaggagctggcctacctgaggaagaaccacgaggaggagatgcttgctctgagaggtcagaccggcggagatgtgaacgtggagatggatgctgcacctggcgtggacctgagccgcatcctgaatgagatgcgtgaccagtacgagcagatggcagagaaaaaccgcagagacgctgagacctggttcctgagcaagacagaggagctgaaccgcgaggtggccaccaacagcgagctggtgcagagcggcaagagcgagatctcggagctccggcgcaccatgcagaacctggagattgagctgcagtcccagctcagcatgaaagcatccctggagaacagcctggaggagaccaaaggtcgctactgcatgcagctggcccagatccaggagatgattggcagcgtggaggagcagctggcccagctccgctgcgagatggagcagcagaaccaggagtacaagatcctgctggacgtgaagacgcggctggagcaggagatcgccacctaccgccgcctgctggagggcgaggacgcccacctctcctcctcccagttctcctctggatcgcagtcatccagagatgtgacctcctccagccgccaaatccgcaccaaggtcatggatgtgcacgatggcaaggtggtgtccacccacgagcaggtccttcgcaccaagaactgaggctgcccagccccgctcaggcctaggaggccccccgtgtggacacagatcccactggaagatcccctctcctgcccaagcacttcacagctggaccctgcttcaccctcaccccctcctggcaatcaatacagcttcattatctgagttgcataa

SEQ ID NO: 27772 - DNA, 1741 bp, Homo sapiens
agggactcccacgcgcaaacactttcccttctttggggagaaaaatctgctcactcgctcactccctccttggcaccatgaccacctgcagccgccagttcacctcctccagctccatgaagggctcctgcggcatcggaggcggcatcgggggcggctccagccgcatctcctccgtcctggccggagggtcctgccgtgcccccagcacctacgggggcggcctgtctgtctcctctcgcttctcctctgggggagcctgcgggctggggggcggctatggcggtggcttcagcagcagcagcagctttggtagtggcttcgggggaggatatggtggtggccttggtgctggcttcggtggtggcttgggtgctggctttggtggtggttttgctggtggtgatgggcttctggtgggcagtgagaaggtgaccatgcagaacctcaatgaccgcctggcctcctacctggacaaggtgcgtgctctggaggaggccaacgccgacctggaagtgaagatccgtgactggtaccagaggcagcggcccagtgagatcaaagactacagtccctacttcaagaccatcgaggacctgaggaacaagatcattgcggccaccattgagaatgcgcagcccattttgcagattgacaatgccaggctggcagccgatgacttcaggaccaagtatgagacagagttgaacctgcgcatgagtgtggaagccgacatcaatggcctgcgcagggtgctggacgaactgaccctggccagagctgacctggagatgcagattgagagcctgaaggaggagctggcctacctgaagaagaaccacgaggaggagatgaatgccctgagaggccaggtgggtggagatgtcaatgtggagatggacgctgcacctggcgtggacctgagccgcattctgaacgagatgcgtgaccagtatgagaagatggcagagaagaaccgcaaggatgccgaggaatggttcttcaccaaggtgggtgtcatttgaggtggaaggaacccagaccacctgccttctggggccttctggtgtgaatggcattctcttttttgcagacagaggagctgaaccgcgaggtggccaccaacagcgagctggtgcagagcggcaagagcgagatctcggagctccggcgcaccatgcagaacctggagattgagctgcagtcccagctcagcatgaaagcatccctggagaacagcctggaggagaccaaaggtcgctactgcatgcagctggcccagatccaggagatgattggcagcgtggaggagcagctggcccagctccgctgcgagatggagcagcagaaccaggagtacaagatcctgctggacgtgaagacgcggctggagcaggagatcgccacctaccgccgcctgctggagggcgaggacgcccacctctcctcctcccagttctcctctggatcgcagtcatccagagatgtgacctcctccagccgccaaatccgcaccaaggtcatggatgtgcacgatggcaaggtggtgtccacccacgagcaggtccttcgcaccaagaactgaggctgcccagccccgctcaggcctaggaggccccccgtgtggacacagatcccactggaagatcccctctcctgcccaagcacttcacagctggaccctgcttcaccctcaccccctcctggcaatcaatacagcttcattatctgagttgcataa

SEQ ID NO: 27773 - DNA, 1731 bp, Homo sapiens
cgcgtggtaccggcccggaattttgggatcgtttccttctttcagccaactgctcactcgctcacctccctccttggcaccatgaccacctgcagccgccagttcacctcctccagctccatgaagggctcctgcggcatcggaggcggcatcgggggcggctccagccgcatctcctccgtcctggccggagggtcctgccgtgcccccagcacctacgggggcggcctgtctgtctcctctcgcttctcctctgggggagcctgcgggctggggggcggctatggcggtggcttcagcagcagcagcagctttggtagtggcttcgggggaggatatggtggtggccttggtgctggcttcggtggtggcttgggtgctggctttggtggtggttttgctggtggtgatgggcttctggtgggcagtgagaaggtgaccatgcagaacctcaatgaccgcctggcctcctacctggacaaggtgcgtgctctggaggaggccaacgccgacctggaagtgaagatccgtgactggtaccagaggcagcggcccagtgagatcaaagactacagtccctacttcaagaccatcgaggacctgaggaacaagcatttgaggaacccttgagggaaaaccaaaagggaattttttccttttccaaacaaggggccaccaaaccaaagggttgggggaacaaaatgccacatgcccattttgcagattgacaatgccaggctggcagccgatgacttcaggaccaagtatgagcatgaactggccctgcggcagactgtggaggccgacgtcaatggcctgcgccgggtgttggatgagctgaccctggccaggactgacctggagatgcagatcgaaggcctgaaggaggagctggcctacctgaggaagaaccacgaggaggagatgcttgctctgagaggtcagaccggcggagatgtgaacgtggagatggatgctgcacctggcgtggacctgagccgcatcctgaatgagatgcgtgaccagtacgagcagatggcagagaaaaaccgcagagacgctgagacctggttcctgagcaagacagaggagctgaaccgcgaggtggccaccaacagcgagctggtgcagagcggcaagagcgagatctcggagctccggcgcaccatgcagaacctggagattgagctgcagtcccagctcagcatgaaagcatccctggagaacagcctggaggagaccaaaggtcgctactgcatgcagctggcccagatccaggagatgattggcagcgtggaggagcagctggcccagctccgctgcgagatggagcagcagaaccaggagtacaagatcctgctggacgtgaagacgcggctggagcaggagatcgccacctaccgccgcctgctggagggcgaggacgcccacctctcctcctcccagttctcctctggatcgcagtcatccagagatgtgacctcctccagccgccaaatccgcaccaaggtcatggatgtgcacgatggcaaggtggtgtccacccacgagcaggtccttcgcaccaagaactgaggctgcccagccccgctcaggcctaggaggccccccgtgtggacacagatcccactggaagatcccctctcctgcccaagcacttcacagctggaccctgcttcaccctcaccccctcctggcaatcaatacagcttcattatctgagttgcataa

SEQ ID NO: 27774 - DNA, 1501 bp, Homo sapiens
cgcgtggtaccggcccggaattttgggatcgtttccttctttcagccaactgctcactcgctcacctccctccttggcaccatgaccacctgcagccgccagttcacctcctccagctccatgaagggctcctgcggcatcggaggcggcatcgggggcggctccagccgcatctcctccgtcctggccggagggtcctgccgtgcccccagcacctacgggggcggcctgtctgtctcctctcgcttctcctctgggggagcctgcgggctggggggcggctatggcggtggcttcagcagcagcagcagctttggtagtggcttcgggggaggatatggtggtggccttggtgctggcttcggtggtggcttgggtgctggctttggtggccagtgagatcaaagactacagtccctacttcaagaccatcgaggacctgaggaacaagatcattgcggccaccattgagaatgcgcagcccattttgcagattgacaatgccaggctggcagccgatgacttcaggaccaagtatgagcatgaactggccctgcggcagactgtggaggccgacgtcaatggcctgcgccgggtgttggatgagctgaccctggccaggactgacctggagatgcagatcgaaggcctgaaggaggagctggcctacctgaggaagaaccacgaggaggagatgcttgctctgagaggtcagaccggcggagatgtgaacgtggagatggatgctgcacctggcgtggacctgagccgcatcctgaatgagatgcgtgaccagtacgagcagatggcagagaaaaaccgcagagacgctgagacctggttcctgagcaagacagaggagctgaaccgcgaggtggccaccaacagcgagctggtgcagagcggcaagagcgagatctcggagctccggcgcaccatgcagaacctggagattgagctgcagtcccagctcagcatgaaagcatccctggagaacagcctggaggagaccaaaggtcgctactgcatgcagctggcccagatccaggagatgattggcagcgtggaggagcagctggcccagctccgctgcgagatggagcagcagaaccaggagtacaagatcctgctggacgtgaagacgcggctggagcaggagatcgccacctaccgccgcctgctggagggcgaggacgcccacctctcctcctcccagttctcctctggatcgcagtcatccagagatgtgacctcctccagccgccaaatccgcaccaaggtcatggatgtgcacgatggcaaggtggtgtccacccacgagcaggtccttcgcaccaagaactgaggctgcccagccccgctcaggcctaggaggccccccgtgtggacacagatcccactggaagatcccctctcctgcccaagcacttcacagctggaccctgcttcaccctcaccccctcctggcaatcaatacagcttcattatctgagttgcataa

SEQ ID NO: 27775 - DNA, 1832 bp, Homo sapiens
  misc_feature (1827)..(1827): n is a, c, g, or t
cgcgtggtaccggcccggaattttgggatcgtttccttctttcagccaactgctcactcgctcacctccctccttggcaccatgaccacctgcagccgccagttcacctcctccagctccatgaagggctcctgcggcatcggaggcggcatcgggggcggctccagccgcatctcctccgtcctggccggagggtcctgccgtgcccccagcacctacgggggcggcctgtctgtctcctctcgcttctcctctgggggagcctgcgggctggggggcggctatggcggtggcttcagcagcagcagcagctttggtagtggcttcgggggaggatatggtggtggccttggtgctggcttcggtggtggcttgggtgctggctttggtggtggttttgctggtggtgatgggcttctggtgggcagtgagaaggtgaccatgcagaacctcaatgaccgcctggcctcctacctggacaaggtgcgtgctctggaggaggccaacgccgacctggaagtgaagatccgtgactggtaccagaggcagcggcccagtgagatcaaagactacagtccctacttcaagaccatcgaggacctgaggaacaagatcattgcggccaccattgagaatgcgcagcccattttgcagattgacaatgccaggctggcagccgatgacttcaggaccaagtatgagcatgaactggccctgcggcagactgtggaggccgacgtcaatggcctgcgccgggtgttggatgagctgaccctggccaggactgacctggagatgcagatcgaaggcctgaaggaggagctggcctacctgaggaagaaccacgaggaggagatgcttgctctgagaggtcagaccggcggagatgtgaacgtggagatggatgctgcacctggcgtggacctgagccgcatcctgaatgagatgcgtgaccagtacgagcagatggcagagaaaaaccgcagagacgctgagacctggttcctgagcaagaccgaggagctgaacaaagaagtggcctccaacagcgaactggtacagagcagccgcagtgaggtgacggagctccggagggtgctccagggcctggagattgagctgcagtcccagctcagcatgaaagcatccctggagaacagcctggaggagaccaaaggccgctactgcatgcagctgtcccagatccagggactgattggcagtgtggaggagcagctggcccagctacgctgtgagatggagcagcagagccaggagtaccagatcttgctggatgtgaagacgcggctggagcaggagattgccacctaccgccgcctgctggagggcgaggatgcccacctttcctcccagcaagcatctggccaatcctattcttcccgcgaggtcttcacctcctcctcgtcctcttcgagccgtcagacccggcccatcctcaaggagcagagctcatccagcttcagccagggccagagctcctagaactgagctgcctctaccacagcctcctgcccaccagctggcctcacctcctgaaggcccgggtcaggaccctgctctcctggcgcagttcccagctatctcccctgctcctctgctggtggtgggctaataaagctgactttctggttgatgcaaaaaaaaaaaaaaaaaaaaaaaaaaaaaaaaaaaaaaaaaaaaaaaaaaaaaaaaaaaaaaaaaaaaaaaaaaaaaaaaaaaaaaaaaaaaggggggggccgccaaaaatttcccccggggggccccaattttccgcttccccttttttttgaaaagggggcccccttnagggg

SEQ ID NO: 27776 - DNA, 1800 bp, Homo sapiens
  misc_feature (1663)..(1663): n is a, c, g, or t
  misc_feature (1667)..(1667): n is a, c, g, or t
  misc_feature (1671)..(1671): n is a, c, g, or t
  misc_feature (1680)..(1680): n is a, c, g, or t
  misc_feature (1795)..(1795): n is a, c, g, or t
cgcgtggtaccggcccggaattttgggatcgtttccttctttcagccaactgctcactcgctcacctccctccttggcaccatgaccacctgcagccgccagttcacctcctccagctccatgaagggctcctgcggcatcggaggcggcatcgggggcggctccagccgcatctcctccgtcctggccggagggtcctgccgtgcccccagcacctacgggggcggcctgtctgtctcctctcgcttctcctctgggggagcctgcgggctggggggcggctatggcggtggcttcagcagcagcagcagctttggtagtggcttcgggggaggatatggtggtggccttggtgctggcttcggtggtggcttgggtgctggctttggtggtggttttgctggtggtgatgggcttctggtgggcagtgagaaggtgaccatgcagaacctcaatgaccgcctggcctcctacctggacaaggtgcgtgctctggaggaggccaacgccgacctggaagtgaagatccgtgactggtaccagaggcagcggcccagtgagatcaaagactacagtccctacttcaagaccatcgaggacctgaggaacaagatcattgcggccaccattgagaatgcgcagcccattttgcagattgacaatgccaggctggcagccgatgacttcaggaccaagtatgagcatgaactggccctgcggcagactgtggaggccgacgtcaatggcctgcgccgggtgttggatgagctgaccctggccaggactgacctggagatgcagatcgaaggcctgaaggaggagctggcctacctgaggaagaaccacgaggaggagatgcttgctctgagaggtcagaccggcggagatgtgaacgtggagatggatgctgcacctggcgtggacctgagccgcatcctgaatgagatgcgtgaccagtacgagcagatggcagagaaaaaccgcagagacgctgagacctggttcctgagcaagaccgaggagctgaacaaagaagtggcctccaacagcgaactggtacagagcagccgcagtgaggtgacggagctccggagggtgctccagggcctggagattgagctgcagtcccagctcagcatgaaagcatccctggagaacagcctggaggagaccaaaggccgctactgcatgcagctgtcccagatccagggactgattggcagtgtggaggagcagctggcccagctacgctgtgagatggagcagcagagccaggagtaccagatcttgctggatgtgaagacgcggctggagcaggagattgccacctaccgccgcctgctggagggcgaggatgcccacctttcctcccagcaagcatctggccaatcctattcttcccgcgaggtcttcacctcctcctcgtcctcttcgagccgtcagacccggcccatcctcaaggagcagagctcatccagcttcagccagggccagagctcctagaactgagctgcctctaccacagcctcctgcccaccagctggcctcacctcctgaaggcccgggtcaggaccctgctctcctggcgcagttcccagctatctcccctgctcctctgctggtggtgggctaataaagctgactttctggttgatgcaaaaanaacnaaanacacaaaanaaaacaaaaaaaaaaaaaaaaaaaaaaaaaaaaaaaaggggggggccgccaaaaatttcccccggggggccccaattttccgcttccccttttttttgaaaagggggcccccttnagggg

SEQ ID NO: 27777 - DNA, 1773 bp, Homo sapiens
  misc_feature (1768)..(1768): n is a, c, g, or t
cgcgtggtaccggcccggaattttgggatcgtttccttctttcagccaactgctcactcgctcacctccctccttggcaccatgaccacctgcagccgccagttcacctcctccagctccatgaagggctcctgcggcatcggaggcggcatcgggggcggctccagccgcatctcctccgtcctggccggagggtcctgccgtgcccccagcacctacgggggcggcctgtctgtctcctctcgcttctcctctgggggagcctgcgggctggggggcggctatggcggtggcttcagcagcagcagcagctttggtagtggcttcgggggaggatatggtggtggccttggtgctggcttcggtggtggcttgggtgctggctttggtggtggttttgctggtggtgatgggcttctggtgggcagtgagaaggtgaccatgcagaacctcaatgaccgcctggcctcctacctggacaaggtgcgtgctctggaggaggccaacgccgacctggaagtgaagatccgtgactggtaccagaggcagcggcccagtgagatcaaagactacagtccctacttcaagaccatcgaggacctgaggaacaagatcattgcggccaccattgagaatgcgcagcccattttgcagattgacaatgccaggctggcagccgatgacttcaggaccaagtatgagcatgaactggccctgcggcagactgtggaggccgacgtcaatggcctgcgccgggtgttggatgagctgaccctggccaggactgacctggagatgcagatcgaaggcctgaaggaggagctggcctacctgaggaagaaccacgaggaggagatgcttgctctgagaggtcagaccggcggagatgtgaacgtggagatggatgctgcacctggcgtggacctgagccgcatcctgaatgagatgcgtgaccagtacgagcagatggcagagaaaaaccgcagagacgctgagacctggttcctgagcaagaccgaggagctgaacaaagaagtggcctccaacagcgaactggtacagagcagccgcagtgaggtgacggagctccggagggtgctccagggcctggagattgagctgcagtcccagctcagcatgaaagcatccctggagaacagcctggaggagaccaaaggccgctactgcatgcagctgtcccagatccagggactgattggcagtgtggaggagcagctggcccagctacgctgtgagatggagcagcagagccaggagtaccagatcttgctggatgtgaagacgcggctggagcaggagattgccacctaccgccgcctgctggagggcgaggatgcccacctttcctcccagcaagcatctggccaatcctattcttcccgcgaggtcttcacctcctcctcgtcctcttcgagccgtcagacccggcccatcctcaaggagcagagctcatccagcttcagccagggccagagctcctagaactgagctgcctctaccacagcctcctgcccaccagctggcctcacctcctgaaggcccgggtcaggaccctgctctcctggcgcagttcccagctatctcccctgctcctctgctggtggtgggctaataaagctgactttctggttgatgcaaaaaaaaaaaaaaaaaaaaaaaaaaaaaaaaaggggggggccgccaaaaatttcccccggggggccccaattttccgcttccccttttttttgaaaagggggcccccttnagggg

SEQ ID NO: 27778 - DNA, 1802 bp, Homo sapiens
cgcgtggtaccggcccggaattttgggatcgtttccttctttcagccaactgctcactcgctcacctccctccttggcaccatgaccacctgcagccgccagttcacctcctccagctccatgaagggctcctgcggcatcggaggcggcatcgggggcggctccagccgcatctcctccgtcctggccggagggtcctgccgtgcccccagcacctacgggggcggcctgtctgtctcctctcgcttctcctctgggggagcctgcgggctggggggcggctatggcggtggcttcagcagcagcagcagctttggtagtggcttcgggggaggatatggtggtggccttggtgctggcttcggtggtggcttgggtgctggctttggtggtggttttgctggtggtgatgggcttctggtgggcagtgagaaggtgaccatgcagaacctcaatgaccgcctggcctcctacctggacaaggtgcgtgctctggaggaggccaacgccgacctggaagtgaagatccgtgactggtaccagaggcagcggcccagtgagatcaaagactacagtccctacttcaagaccatcgaggacctgaggaacaagatcattgcggccaccattgagaatgcgcagcccattttgcagattgacaatgccaggctggcagccgatgacttcaggaccaagtatgagcatgaactggccctgcggcagactgtggaggccgacgtcaatggcctgcgccgggtgttggatgagctgaccctggccaggactgacctggagatgcagatcgaaggcctgaaggaggagctggcctacctgaggaagaaccacgaggaggagatgcttgctctgagaggtcagaccggcggagatgtgaacgtggagatggatgctgcacctggcgtggacctgagccgcatcctgaatgagatgcgtgaccagtacgagcagatggcagagaaaaaccgcagagacgctgagacctggttcctgagcaagaccgaggagctgaacaaagaagtggcctccaacagcgaactggtacagagcagccgcagtgaggtgacggagctccggagggtgctccagggcctggagattgagctgcagtcccagctcagcatgaaagcatccctggagaacagcctggaggagaccaaaggccgctactgcatgcagctgtcccagatccagggactgattggcagtgtggaggagcagctggcccagctacgctgtgagatggagcagcagagccaggagtaccagatcttgctggatgtgaagacgcggctggagcaggagattgccacctaccgccgcctgctggagggcgaggatgcccacctttcctcccagcaagcatctggccaatcctattcttcccgcgaggtcttcacctcctcctcgtcctcttcgagccgtcagacccggcccatcctcaaggagcagagctcatccagcttcagccagggccagagctcctagaactgagctgcctctaccacagcctcctgcccaccagctggcctcacctcctgaaggcccgggtcaggaccctgctctcctggcgcagttcccagctatctcccctgctcctctgctggtggtgggctaataaagctgactttctggttgatgcaaacaaagacaacaaaacaaacaacccaaccacaacacaaccagaaacaacaaaaacaaaggggcgcgcaccacacaaaaaaacaccacaaaggggggacacacacacaagagacccacaccagattataaacaaaggccaccca

SEQ ID NO: 27779 - DNA, 1836 bp, Homo sapiens
agggactcccacgcgcaaacactttcccttctttggggagaaaaatctgctcactcgctcactccctccttggcaccatgaccacctgcagccgccagttcacctcctccagctccatgaagggctcctgcggcatcggaggcggcatcgggggcggctccagccgcatctcctccgtcctggccggagggtcctgccgtgcccccagcacctacgggggcggcctgtctgtctcctctcgcttctcctctgggggagcctgcgggctggggggcggctatggcggtggcttcagcagcagcagcagctttggtagtggcttcgggggaggatatggtggtggccttggtgctggcttcggtggtggcttgggtgctggctttggtggtggttttgctggtggtgatgggcttctggtgggcagtgagaaggtgaccatgcagaacctcaatgaccgcctggcctcctacctggacaaggtgcgtgctctggaggaggccaacgccgacctggaagtgaagatccgtgactggtaccagaggcagcggcccagtgagatcaaagactacagtccctacttcaagaccatcgaggacctgaggaacaagatcattgcggccaccattgagaatgcgcagcccattttgcagattgacaatgccaggctggcagccgatgacttcaggaccaagtatgagacagagttgaacctgcgcatgagtgtggaagccgacatcaatggcctgcgcagggtgctggacgaactgaccctggccagagctgacctggagatgcagattgagagcctgaaggaggagctggcctacctgaagaagaaccacgaggaggagatgaatgccctgagaggccaggtgggtggagatgtcaatgtggagatggacgctgcacctggcgtggacctgagccgcattctgaacgagatgcgtgaccagtatgagaagatggcagagaagaaccgcaaggatgccgaggaatggttcttcaccaaggtgggtgtcatttgaggtggaaggaacccagaccacctgccttctggggccttctggtgtgaatggcattctcttttttgcagacagaggagctgaaccgcgaggtggccaccaacagcgagctggtgcagagcggcaagagcgagatctcggagctccggcgcaccatgcagaacctggagattgagctgcagtcccagctcagcatggtaggaatagtgccaggaagggtggtgcacccaggactggcagggagagaacggccacactcactaatcgttgattccctttccctccctcacagaaagcatccctggagaacagcctggaggagaccaaaggtcgctactgcatgcagctggcccagatccaggagatgattggcagcgtggaggagcagctggcccagctccgctgcgagatggagcagcagaaccaggagtacaagatcctgctggacgtgaagacgcggctggagcaggagatcgccacctaccgccgcctgctggagggcgaggacgcccacctctcctcctcccagttctcctctggatcgcagtcatccagagatgtgacctcctccagccgccaaatccgcaccaaggtcatggatgtgcacgatggcaaggtggtgtccacccacgagcaggtccttcgcaccaagaactgaggctgcccagccccgctcaggcctaggaggccccccgtgtggacacagatcccactggaagatcccctctcctgcccaagcacttcacagctggaccctgcttcaccctcaccccctcctggcaatcaatacagcttcattatctgagttgcataa

SEQ ID NO: 27780 - DNA, 1526 bp, Homo sapiens
agggactcccacgcgcaaacactttcccttctttggggagaaaaatctgctcactcgctcactccctccttggcaccatgaccacctgcagccgccagttcacctcctccagctccatgaagggctcctgcggcatcggaggcggcatcgggggcggctccagccgcatctcctccgtcctggccggagggtcctgccgtgcccccagcacctacgggggcggcctgtctgtctcctctcgcttctcctctgggggagcctgcgggctggggggcggctatggcggtggcttcagcagcagcagcagctttggtagtggcttcgggggaggatatggtggtggccttggtgctggcttcggtggtggcttgggtgctggctttggtggtggttttgctggtggtgatgggcttctggtgggcagtgagaaggtgaccatgcagaacctcaatgaccgcctggcctcctacctggacaaggtgcgtgctctggaggaggccaacgccgacctggaagtgaagatccgtgactggtaccagaggcagcggcccagtgagatcaaagactacagtccctacttcaagaccatcgaggacctgaggaacaagatcattgcggccaccattgagaatgcgcagcccattttgcagattgacaatgccaggctggcagccgatgacttcaggaccaagtatgagacagagttgaacctgcgcatgagtgtggaagccgacatcaatggcctgcgcagggtgctggacgaactgaccctggccagagctgacctggagatgcagattgagagcctgaaggaggagctggcctacctgaagaagaaccacgaggaggagatgaatgccctgagaggccaggtgggtggagatgtcaatgtggagatggacgctgcacctggcgtggacctgagccgcattctgaacgagatgcgtgaccagtatgagaagatggcagagaagaaccgcaaggatgccgaggaatggttcttcaccaagacagaggagctgaaccgcgaggtggccaccaacagcgagctggtgcagagcggcaagagcgagatctcggagctccggcgcaccatgcagaacctggagattgagctgcagtcccagctcagcatgaaagcatccctggagaacagcctggaggagaccaaaggtcgctactgcatgcagctggcccagatccaggagatgattggcagcgtggaggagcagctggcccagctccgctgcgagatggagcagcagaaccaggagtacaagatcctgctggacgtgaagacgcggctggagcaggagatcgccacctaccgccgcctgctggagggcgaggacgcccacctctcctcctcccagttctcctctggatcgcagtcatccagagatgtgacctcctccagccgccaaatccgcaccaaggtcatggatgtgcacgatggcaaggtggtgtccacccacgaggacggatccagttcttcggcctcatgtcagttcttcggcctcatgtga

SEQ ID NO: 27781 - DNA, 1664 bp, Homo sapiens
cgcgtggtaccggcccggaattttgggatcgtttccttctttcagccaactgctcactcgctcacctccctccttggcaccatgaccacctgcagccgccagttcacctcctccagctccatgaagggctcctgcggcatcggaggcggcatcgggggcggctccagccgcatctcctccgtcctggccggagggtcctgccgtgcccccagcacctacgggggcggcctgtctgtctcctctcgcttctcctctgggggagcctgcgggctggggggcggctatggcggtggcttcagcagcagcagcagctttggtagtggcttcgggggaggatatggtggtggccttggtgctggcttcggtggtggcttgggtgctggctttggtggtggttttgctggtggtgatgggcttctggtgggcagtgagaaggtgaccatgcagaacctcaatgaccgcctggcctcctacctggacaaggtgcgtgctctggaggaggccaacgccgacctggaagtgaagatccgtgactggtaccagaggcagcggcccagtgagatcaaagactacagtccctacttcaagaccatcgaggacctgaggaacaagatcattgcggccaccattgagaatgcgcagcccattttgcagattgacaatgccaggctggcagccgatgacttcaggaccaagtatgagcatgaactggccctgcggcagactgtggaggccgacgtcaatggcctgcgccgggtgttggatgagctgaccctggccaggactgacctggagatgcagatcgaaggcctgaaggaggagctggcctacctgaggaagaaccacgaggaggagatgcttgctctgagaggtcagaccggcggagatgtgaacgtggagatggatgctgcacctggcgtggacctgagccgcatcctgaatgagatgcgtgaccagtacgagcagatggcagagaaaaaccgcagagacgctgagacctggttcctgagcaagaccgaggagctgaacaaagaagtggcctccaacagcgaactggtacagagcagccgcagtgaggtgacggagctccggagggtgctccagggcctggagattgagctgcagtcccagctcagcatgaaagcatccctggagaacagcctggaggagaccaaaggccgctactgcatgcagctgtcccagatccagggactgattggcagtgtggaggagcagctggcccagctacgctgtgagatggagcagcagagccaggagtaccagatcttgctggatgtgaagacgcggctggagcaggagattgccacctaccgccgcctgctggagggcgaggatgcccacctttcctcccagcaagcatctggccaatcctattcttcccgcgaggtcttcacctcctcctcgtcctcttcgagccgtcagacccggcccatcctcaaggagcagagctcatccagcttcagccagggccagagctcctagaactgagctgcctctaccacagcctcctgcccaccagctggcctcacctcctgaaggcccgggtcaggaccctgctctcctggcgcagttcccagctatctcccctgctcctctgctggtggtgggcctctgctctccaaaggatcctctagagcacatct

SEQ ID NO: 27782 - DNA, 1499 bp, Homo sapiens
agggactcccacgcgcaaacactttcccttctttggggagaaaaatctgctcactcgctcactccctccttggcaccatgaccacctgcagccgccagttcacctcctccagctccatgaagggctcctgcggcatcggaggcggcatcgggggcggctccagccgcatctcctccgtcctggccggagggtcctgccgtgcccccagcacctacgggggcggcctgtctgtctcctctcgcttctcctctgggggagcctgcgggctggggggcggctatggcggtggcttcagcagcagcagcagctttggtagtggcttcgggggaggatatggtggtggccttggtgctggcttcggtggtggcttgggtgctggctttggtggtggttttgctggtggtgatgggcttctggtgggcagtgagaaggtgaccatgcagaacctcaatgaccgcctggcctcctacctggacaaggtgcgtgctctggaggaggccaacgccgacctggaagtgaagatccgtgactggtaccagaggcagcggcccagtgagatcaaagactacagtccctacttcaagaccatcgaggacctgaggaacaagatcattgcggccaccattgagaatgcgcagcccattttgcagattgacaatgccaggctggcagccgatgacttcaggaccaagtatgagacagagttgaacctgcgcatgagtgtggaagccgacatcaatggcctgcgcagggtgctggacgaactgaccctggccagagctgacctggagatgcagattgagagcctgaaggaggagctggcctacctgaagaagaaccacgaggaggagatgaatgccctgagaggccaggtgggtggagatgtcaatgtggagatggacgctgcacctggcgtggacctgagccgcattctgaacgagatgcgtgaccagtatgagaagatggcagagaagaaccgcaaggatgccgaggaatggttcttcaccaagacagaggagctgaaccgcgaggtggccaccaacagcgagctggtgcagagcggcaagagcgagatctcggagctccggcgcaccatgcagaacctggagattgagctgcagtcccagctcagcatgaaagcatccctggagaacagcctggaggagaccaaaggtcgctactgcatgcagctggcccagatccaggagatgattggcagcgtggaggagcagctggcccagctccgctgcgagatggagcagcagaaccaggagtacaagatcctgctggacgtgaagacgcggctggagcaggagatcgccacctaccgccgcctgctggagggcgaggacgcccacctctcctcctcccagttctcctctggatcgcagtcatccagagatgtgacctcctccagccgccaaatccgcaccaaggtcatggatgtgcacgatgcccctcctggcaatcaatacagcttcattatctgagttgcataa

SEQ ID NO: 27783 - DNA, 1496 bp, Homo sapiens
agggactcccacgcgcaaacactttcccttctttggggagaaaaatctgctcactcgctcactccctccttggcaccatgaccacctgcagccgccagttcacctcctccagctccatgaagggctcctgcggcatcggaggcggcatcgggggcggctccagccgcatctcctccgtcctggccggagggtcctgccgtgcccccagcacctacgggggcggcctgtctgtctcctctcgcttctcctctgggggagcctgcgggctggggggcggctatggcggtggcttcagcagcagcagcagctttggtagtggcttcgggggaggatatggtggtggccttggtgctggcttcggtggtggcttgggtgctggctttggtggtggttttgctggtggtgatgggcttctggtgggcagtgagaaggtgaccatgcagaacctcaatgaccgcctggcctcctacctggacaaggtgcgtgctctggaggaggccaacgccgacctggaagtgaagatccgtgactggtaccagaggcagcggcccagtgagatcaaagactacagtccctacttcaagaccatcgaggacctgaggaacaagatcattgcggccaccattgagaatgcgcagcccattttgcagattgacaatgccaggctggcagccgatgacttcaggaccaagtatgagacagagttgaacctgcgcatgagtgtggaagccgacatcaatggcctgcgcagggtgctggacgaactgaccctggccagagctgacctggagatgcagattgagagcctgaaggaggagctggcctacctgaagaagaaccacgaggaggagatgaatgccctgagaggccaggtgggtggagatgtcaatgtggagatggacgctgcacctggcgtggacctgagccgcattctgaacgagatgcgtgaccagtatgagaagatggcagagaagaaccgcaaggatgccgaggaatggttcttcaccaagacagaggagctgaaccgcgaggtggccaccaacagcgagctggtgcagagcggcaagagcgagatctcggagctccggcgcaccatgcagaacctggagattgagctgcagtcccagctcagcatgaaagcatccctggagaacagcctggaggagaccaaaggtcgctactgcatgcagctggcccagatccaggagatgattggcagcgtggaggagcagctggcccagctccgctgcgagatggagcagcagaaccaggagtacaagatcctgctggacgtgaagacgcggctggagcaggagatcgccacctaccgccgcctgctggagggcgaggacgcccacctttcctcccagcaagcatctggccaatcctattcttcccgcgaggtcttcacctcctcctcgtcctcttcgagccgtcagacccggcccatcctctgctggtggtgggctaataaagctgactttctggttgatgca

SEQ ID NO: 27784 - DNA, 2225 bp, Homo sapiens
agggactcccacgcgcaaacactttcccttctttggggagaaaaatctgctcactcgctcactccctccttggcaccatgaccacctgcagccgccagttcacctcctccagctccatgaagggctcctgcggcatcggaggcggcatcgggggcggctccagccgcatctcctccgtcctggccggagggtcctgccgtgcccccagcacctacgggggcggcctgtctgtctcctctcgcttctcctctgggggagcctgcgggctggggggcggctatggcggtggcttcagcagcagcagcagctttggtagtggcttcgggggaggatatggtggtggccttggtgctggcttcggtggtggcttgggtgctggctttggtggtggttttgctggtggtgatgggcttctggtgggcagtgagaaggtgaccatgcagaacctcaatgaccgcctggcctcctacctggacaaggtgcgtgctctggaggaggccaacgccgacctggaagtgaagatccgtgactggtaccagaggcagcggcccagtgagatcaaagactacagtccctacttcaagaccatcgaggacctgaggaacaagatcattgcggccaccattgagaatgcgcagcccattttgcagattgacaatgccaggctggcagccgatgacttcaggaccaagtatgagacagagttgaacctgcgcatgagtgtggaagccgacatcaatggcctgcgcagggtgctggacgaactgaccctggccagagctgacctggagatgcagattgagagcctgaaggaggagctggcctacctgaagaagaaccacgaggaggagatgaatgccctgagaggccaggtgggtggagatgtcaatgtggagatggacgctgcacctggcgtggacctgagccgcattctgaacgagatgcgtgaccagtatgagaagatggcagagaagaaccgcaaggatgccgaggaatggttcttcaccaagacagaggagctgaaccgcgaggtggccaccaacagcgagctggtgcagagcggcaagagcgagatctcggagctccggcgcaccatgcagaacctggagattgagctgcagtcccagctcagcatgaaagcatccctggagaacagcctggaggagaccaaaggtcgctactgcatgcagctggcccagatccaggagatgattggcagcgtggaggagcagctggcccagctccgctgcgagatggagcagcagaaccaggagtacaagatcctgctggacgtgaagacgcggctggagcaggagatcgccacctaccgccgcctgctggagggcgaggacgcccacctctcctcctcccagttctcctctggatcgcagtcatccagagatggtaagaccctcctcctctgcaggcctgggctccaggccaccctctgtaccccaagcaggtctaggcattggctaggggctccgtgaggggctgagctctagtgctgtcacccagtttcccttgtgaacctccttgggtggaagaagctattttctaaaccctccttagggctaggagaggcagcccccacctcttgcttctacgtggtgtctgtggcagatcctattgctgttgtggtcagcaccatgaacagggccctacagggctcttcccactgagaccactccattgggtgaatatggatggaaccagccaggtgtgagctcttaggaagctctaatctgagggcaaagactctgtctctgacctttgggagccctcgtctgaaagaaatgtgttgatggtatcagtgcttgggcaacagcagggagtgaagcagtaatcaggggagagggcaatggggagccagtttgagtttcctcaccttcttggcctccttactcctgattagtccattgtctgtccacctctggtaacgtcctcttcccacctcttccccagtgaccttgacctcctccagccgccaaatccgcaccaaggtcatggatgtgcacgatggcaaggtggtgtccacccacgagcaggtccttcgcaccaagaactgaggctgcccagccccgctcaggcctaggaggccccccgtgtggacacagatcccactggaagatcccctctcctgcccaagcacttcacagctggaccctgcttcaccctcaccccctcctggcaatcaatacagcttcattatctgagttgcataa

SEQ ID NO: 27785 - DNA, 2319 bp, Homo sapiens
agggactcccacgcgcaaacactttcccttctttggggagaaaaatctgctcactcgctcactccctccttggcaccatgaccacctgcagccgccagttcacctcctccagctccatgaagggctcctgcggcatcggaggcggcatcgggggcggctccagccgcatctcctccgtcctggccggagggtcctgccgtgcccccagcacctacgggggcggcctgtctgtctcctctcgcttctcctctgggggagcctgcgggctggggggcggctatggcggtggcttcagcagcagcagcagctttggtagtggcttcgggggaggatatggtggtggccttggtgctggcttcggtggtggcttgggtgctggctttggtggtggttttgctggtggtgatgggcttctggtgggcagtgagaaggtgaccatgcagaacctcaatgaccgcctggcctcctacctggacaaggtgcgtgctctggaggaggccaacgccgacctggaagtgaagatccgtgactggtaccagaggcagcggcccagtgagatcaaagactacagtccctacttcaagaccatcgaggacctgaggaacaagatcattgcggccaccattgagaatgcgcagcccattttgcagattgacaatgccaggctggcagccgatgacttcaggaccaagtatgagacagagttgaacctgcgcatgagtgtggaagccgacatcaatggcctgcgcagggtgctggacgaactgaccctggccagagctgacctggagatgcagattgagagcctgaaggaggagctggcctacctgaagaagaaccacgaggaggagatgaatgccctgagaggccaggtgggtggagatgtcaatgtggagatggacgctgcacctggcgtggacctgagccgcattctgaacgagatgcgtgaccagtatgagaagatggcagagaagaaccgcaaggatgccgaggaatggttcttcaccaagacagaggagctgaaccgcgaggtggccaccaacagcgagctggtgcagagcggcaagagcgagatctcggagctccggcgcaccatgcagaacctggagattgagctgcagtcccagctcagcatgaaagcatccctggagaacagcctggaggagaccaaaggtcgctactgcatgcagctggcccagatccaggagatgattggcagcgtggaggagcagctggcccagctccgctgcgagatggagcagcagaaccaggagtacaagatcctgctggacgtgaagacgcggctggagcaggagatcgccacctaccgccgcctgctggagggcgaggacgcccagtgagtcttggccctccccttagtccgccccccccatggcactctcacggccccaccatgtatctaatgatcctgtccttttctattttcacagcctctcctcctcccagttctcctctggatcgcagtcatccagagatggtaagaccctcctcctctgcaggcctgggctccaggccaccctctgtaccccaagcaggtctaggcattggctaggggctccgtgaggggctgagctctagtgctgtcacccagtttcccttgtgaacctccttgggtggaagaagctattttctaaaccctccttagggctaggagaggcagcccccacctcttgcttctacgtggtgtctgtggcagatcctattgctgttgtggtcagcaccatgaacagggccctacagggctcttcccactgagaccactccattgggtgaatatggatggaaccagccaggtgtgagctcttaggaagctctaatctgagggcaaagactctgtctctgacctttgggagccctcgtctgaaagaaatgtgttgatggtatcagtgcttgggcaacagcagggagtgaagcagtaatcaggggagagggcaatggggagccagtttgagtttcctcaccttcttggcctccttactcctgattagtccattgtctgtccacctctggtaacgtcctcttcccacctcttccccagtgaccttgacctcctccagccgccaaatccgcaccaaggtcatggatgtgcacgatggcaaggtggtgtccacccacgagcaggtccttcgcaccaagaactgaggctgcccagccccgctcaggcctaggaggccccccgtgtggacacagatcccactggaagatcccctctcctgcccaagcacttcacagctggaccctgcttcaccctcaccccctcctggcaatcaatacagcttcattatctgagttgcataa

SEQ ID NO: 27786 - DNA, 2134 bp, Homo sapiens
  misc_feature (2129)..(2129): n is a, c, g, or t
cgcgtggtaccggcccggaattttgggatcgtttccttctttcagccaactgctcactcgctcacctccctccttggcaccatgaccacctgcagccgccagttcacctcctccagctccatgaagggctcctgcggcatcggaggcggcatcgggggcggctccagccgcatctcctccgtcctggccggagggtcctgccgtgcccccagcacctacgggggcggcctgtctgtctcctctcgcttctcctctgggggagcctgcgggctggggggcggctatggcggtggcttcagcagcagcagcagctttggtagtggcttcgggggaggatatggtggtggccttggtgctggcttcggtggtggcttgggtgctggctttggtggtggttttgctggtggtgatgggcttctggtgggcagtgagaaggtgaccatgcagaacctcaatgaccgcctggcctcctacctggacaaggtgcgtgctctggaggaggccaacgccgacctggaagtgaagatccgtgactggtaccagaggcagcggcccagtgagatcaaagactacagtccctacttcaagaccatcgaggacctgaggaacaagatcattgcggccaccattgagaatgcgcagcccattttgcagattgacaatgccaggctggcagccgatgacttcaggaccaagtatgagcatgaactggccctgcggcagactgtggaggccgacgtcaatggcctgcgccgggtgttggatgagctgaccctggccaggactgacctggagatgcagatcgaaggcctgaaggaggagctggcctacctgaggaagaaccacgaggaggagatgcttgctctgagaggtcagaccggcggagatgtgaacgtggagatggatgctgcacctggcgtggacctgagccgcatcctgaatgagatgcgtgaccagtacgagcagatggcagagaaaaaccgcagagacgctgagacctggttcctgagcaagaccgaggagctgaacaaagaagtggcctccaacagcgaactggtacagagcagccgcagtgaggtgacggagctccggagggtgctccagggcctggagattgagctgcagtcccagctcagcatggtatgaaggacccagcacagcagcagcccccaagtcaccagtaatggccaccaccccctcaaaaagccacagtctagttccacctttcttttctcaggatgggaccaggggactcatgggaccgttatatagatagagaaactaagccctagaatagtgggctagcttttctccatattgtctggcccatcagtaccccaactgggatcaaaatccaggcatctctcaaaaaacatgcccagagacctggaggaacaggagtgaccacctccatggactctttttctctctctcacttgcagaaagcatccctggagaacagcctggaggagaccaaaggccgctactgcatgcagctgtcccagatccagggactgattggcagtgtggaggagcagctggcccagctacgctgtgagatggagcagcagagccaggagtaccagatcttgctggatgtgaagacgcggctggagcaggagattgccacctaccgccgcctgctggagggcgaggatgcccacctttcctcccagcaagcatctggccaatcctattcttcccgcgaggtcttcacctcctcctcgtcctcttcgagccgtcagacccggcccatcctcaaggagcagagctcatccagcttcagccagggccagagctcctagaactgagctgcctctaccacagcctcctgcccaccagctggcctcacctcctgaaggcccgggtcaggaccctgctctcctggcgcagttcccagctatctcccctgctcctctgctggtggtgggctaataaagctgactttctggttgatgcaaaaaaaaaaaaaaaaaaaaaaaaaaaaaaaaaaaaaaaaaaaaaaaaaaaaaaaaaaaaaaaaaaaaaaaaaaaaaaaaaaaaaaaaaaaaggggggggccgccaaaaatttcccccggggggccccaattttccgcttccccttttttttgaaaagggggcccccttnagggg

SEQ ID NO: 27787 - DNA, 1587 bp, Homo sapiens
agggactcccacgcgcaaacactttcccttctttggggagaaaaatctgctcactcgctcactccctccttggcaccatgaccacctgcagccgccagttcacctcctccagctccatgaagggctcctgcggcatcggaggcggcatcgggggcggctccagccgcatctcctccgtcctggccggagggtcctgccgtgcccccagcacctacgggggcggcctgtctgtctcctctcgcttctcctctgggggagcctgcgggctggggggcggctatggcggtggcttcagcagcagcagcagctttggtagtggcttcgggggaggatatggtggtggccttggtgctggcttcggtggtggcttgggtgctggctttggtggtggttttgctggtggtgatgggcttctggtgggcagtgagaaggtgaccatgcagaacctcaatgaccgcctggcctcctacctggacaaggtgcgtgctctggaggaggccaacgccgacctggaagtgaagatccgtgactggtaccagaggcagcggcccagtgagatcaaagactacagtccctacttcaagaccatcgaggacctgaggaacaagatcattgcggccaccattgagaatgcgcagcccattttgcagattgacaatgccaggctggcagccgatgacttcaggaccaagtatgagacagagttgaacctgcgcatgagtgtggaagccgacatcaatggcctgcgcagggtgctggacgaactgaccctggccagagctgacctggagatgcagattgagagcctgaaggaggagctggcctacctgaagaagaaccacgaggaggagatgaatgccctgagaggccaggtgggtggagatgtcaatgtggagatggacgctgcacctggcgtggacctgagccgcattctgaacgagatgcgtgaccagtatgagaagatggcagagaagaaccgcaaggatgccgaggaatggttcttcaccaagacagaggagctgaaccgcgaggtggccaccaacagcgagctggtgcagagcggcaagagcgagatctcggagctccggcgcaccatgcagaacctggagattgagctgcagtcccagctcagcatgaaagcatccctggagaacagcctggaggagaccaaaggtcgctactgcatgcagctggcccagatccaggagatgattggcagcgtggaggagcagctggcccagctccgctgcgagatggagcagcagaaccaggagtacaagatcctgctggacgtgaagacgcggctggagcaggagatcgccacctaccgccgcctgctggagggcgaggacgcccacctgactcagtacaagaaagaaccggtgaccacccgtcaggtgcgtaccattgtggaagaggtccaggatggcaaggtcatctcctcccgcgagcaggtccaccagaccacccgctgaggactcagctaccccggccggccacccaggaggcagggagcagccgccccatctgccccacagtctccgcctctccagcctcagctcctcctagctcagctcctccacacga

SEQ ID NO: 27788 - DNA, 1495 bp, Homo sapiens
agggactcccacgcgcaaacactttcccttctttggggagaaaaatctgctcactcgctcactccctccttggcaccatgaccacctgcagccgccagttcacctcctccagctccatgaagggctcctgcggcatcggaggcggcatcgggggcggctccagccgcatctcctccgtcctggccggagggtcctgccgtgcccccagcacctacgggggcggcctgtctgtctcctctcgcttctcctctgggggagcctgcgggctggggggcggctatggcggtggcttcagcagcagcagcagctttggtagtggcttcgggggaggatatggtggtggccttggtgctggcttcggtggtggcttgggtgctggctttggtggtggttttgctggtggtgatgggcttctggtgggcagtgagaaggtgaccatgcagaacctcaatgaccgcctggcctcctacctggacaaggtgcgtgctctggaggaggccaacgccgacctggaagtgaagatccgtgactggtaccagaggcagcggcccagtgagatcaaagactacagtccctacttcaagaccatcgaggacctgaggaacaagatcattgcggccaccattgagaatgcgcagcccattttgcagattgacaatgccaggctggcagccgatgacttcaggaccaagtatgagacagagttgaacctgcgcatgagtgtggaagccgacatcaatggcctgcgcagggtgctggacgaactgaccctggccagagctgacctggagatgcagattgagagcctgaaggaggagctggcctacctgaagaagaaccacgaggaggagatgaatgccctgagaggccaggtgggtggagatgtcaatgtggagatggacgctgcacctggcgtggacctgagccgcattctgaacgagatgcgtgaccagtatgagaagatggcagagaagaaccgcaaggatgccgaggaatggttcttcaccaagacagaggagctgaaccgcgaggtggccaccaacagcgagctggtgcagagcggcaagagcgagatctcggagctccggcgcaccatgcagaacctggagattgagctgcagtcccagctcagcatgaaagcatccctggagaacagcctggaggagaccaaaggtcgctactgcatgcagctggcccagatccaggagatgattggcagcgtggaggagcagctggcccagctccgctgcgagatggagcagcagaaccaggagtacaagatcctgctggacgtgaagacgcggctggagcaggagatcgccacctaccgccgcctgctggagggcgaggacgcccagtgagtcccaggcccctcagttctgcctcccagaccctttagcctctcctgctgctctcagctactactgaatgacactgctttgtctctacccacagcctgtgcgtacactgcaagtatcgggtacaatcctagttt

SEQ ID NO: 27789 - DNA, 1395 bp, Homo sapiens
agggactcccacgcgcaaacactttcccttctttggggagaaaaatctgctcactcgctcactccctccttggcaccatgaccacctgcagccgccagttcacctcctccagctccatgaagggctcctgcggcatcggaggcggcatcgggggcggctccagccgcatctcctccgtcctggccggagggtcctgccgtgcccccagcacctacgggggcggcctgtctgtctcctctcgcttctcctctgggggagcctgcgggctggggggcggctatggcggtggcttcagcagcagcagcagctttggtagtggcttcgggggaggatatggtggtggccttggtgctggcttcggtggtggcttgggtgctggctttggtggtggttttgctggtggtgatgggcttctggtgggcagtgagaaggtgaccatgcagaacctcaatgaccgcctggcctcctacctggacaaggtgcgtgctctggaggaggccaacgccgacctggaagtgaagatccgtgactggtaccagaggcagcggcccagtgagatcaaagactacagtccctacttcaagaccatcgaggacctgaggaacaagatcattgcggccaccattgagaatgcgcagcccattttgcagattgacaatgccaggctggcagccgatgacttcaggaccaagtatgagacagagttgaacctgcgcatgagtgtggaagccgacatcaatggcctgcgcagggtgctggacgaactgaccctggccagagctgacctggagatgcagattgagagcctgaaggaggagctggcctacctgaagaagaaccacgaggaggagatgaatgccctgagaggccaggtgggtggagatgtcaatgtggagatggacgctgcacctggcgtggacctgagccgcattctgaacgagatgcgtgaccagtatgagaagatggcagagaagaaccgcaaggatgccgaggaatggttcttcaccaagacagaggagctgaaccgcgaggtggccaccaacagcgagctggtgcagagcggcaagagcgagatctcggagctccggcgcaccatgcagaacctggagattgagctgcagtcccagctcagcatgaaagcatccctggagaacagcctggaggagaccaaaggtcgctactgcatgcagctggcccagatccaggagatgattggcagcgtggaggagcagctggcccagctccgctgcgagatggagcagcagaaccaggagtacaagatcctgctggacgtgaagacgcggctggagcaggagatcgccacctaccgccgcctgctggagggcgaggacgcccacctcagctcctcctcagtatacgggatcctctatggtc

SEQ ID NO: 27790 - DNA, 2388 bp, Homo sapiens
  misc_feature (2383)..(2383): n is a, c, g, or t
cgcgtggtaccggcccggaattttgggatcgtttccttctttcagccaactgctcactcgctcacctccctccttggcaccatgaccacctgcagccgccagttcacctcctccagctccatgaagggctcctgcggcatcggaggcggcatcgggggcggctccagccgcatctcctccgtcctggccggagggtcctgccgtgcccccagcacctacgggggcggcctgtctgtctcctctcgcttctcctctgggggagcctgcgggctggggggcggctatggcggtggcttcagcagcagcagcagctttggtagtggcttcgggggaggatatggtggtggccttggtgctggcttcggtggtggcttgggtgctggctttggtggtggttttgctggtggtgatgggcttctggtgggcagtgagaaggtgaccatgcagaacctcaatgaccgcctggcctcctacctggacaaggtgcgtgctctggaggaggccaacgccgacctggaagtgaagatccgtgactggtaccagaggcagcggcccagtgagatcaaagactacagtccctacttcaagaccatcgaggacctgaggaacaagatcattgcggccaccattgagaatgcgcagcccattttgcagattgacaatgccaggctggcagccgatgacttcaggaccaagtatgagcatgaactggccctgcggcagactgtggaggccgacgtcaatggcctgcgccgggtgttggatgagctgaccctggccaggactgacctggagatgcagatcgaaggcctgaaggaggagctggcctacctgaggaagaaccacgaggaggagatgcttgctctgagaggtcagaccggcggagatgtgaacgtggagatggatgctgcacctggcgtggacctgagccgcatcctgaatgagatgcgtgaccagtacgagcagatggcagagaaaaaccgcagagacgctgagacctggttcctgagcaagaccgaggagctgaacaaagaagtggcctccaacagcgaactggtacagagcagccgcagtgaggtgacggagctccggagggtgctccagggcctggagattgagctgcagtcccagctcagcatggtatgaaggacccagcacagcagcagcccccaagtcaccagtaatggccaccaccccctcaaaaagccacagtctagttccacctttcttttctcaggatgggaccaggggactcatgggaccgttatatagatagagaaactaagccctagaatagtgggctagcttttctccatattgtctggcccatcagtaccccaactgggatcaaaatccaggcatctctcaaaaaacatgcccagagacctggaggaacaggagtgaccacctccatggactctttttctctctctcacttgcagaaagcatccctggagaacagcctggaggagaccaaaggccgctactgcatgcagctgtcccagatccagggactgattggcagtgtggaggagcagctggcccagctacgctgtgagatggagcagcagagccaggagtaccagatcttgctggatgtgaagacgcggctggagcaggagattgccacctaccgccgcctgctggagggcgaggatgcccagtgagtcccaggcccctcagttctgcctcccagaccctttagcccccctgctgctctcagcacaactgactgccctgccttttctctcccacagcctttcctcccagcaagcatctggccaatcctattcttcccgcgagggtaaggcttctgaggctccccggcactgcagcccctctgcctgtttccatggagtgggggctgggcccttctcctcagagctcccagccctcccttctccctgccctggagtcagcttagctctcagaccccttctcacctcctcttctctctcccacagtcttcacctcctcctcgtcctcttcgagccgtcagacccggcccatcctcaaggagcagagctcatccagcttcagccagggccagagctcctagaactgagctgcctctaccacagcctcctgcccaccagctggcctcacctcctgaaggcccgggtcaggaccctgctctcctggcgcagttcccagctatctcccctgctcctctgctggtggtgggctaataaagctgactttctggttgatgcaaaaaaaaaaaaaaaaaaaaaaaaaaaaaaaaaaaaaaaaaaaaaaaaaaaaaaaaaaaaaaaaaaaaaaaaaaaaaaaaaaaaaaaaaaaaggggggggccgccaaaaatttcccccggggggccccaattttccgcttccccttttttttgaaaagggggcccccttnagggg

SEQ ID NO: 27791 - DNA, 1262 bp, Homo sapiens
agggactcccacgcgcaaacactttcccttctttggggagaaaaatctgctcactcgctcactccctccttggcaccatgaccacctgcagccgccagttcacctcctccagctccatgaagggctcctgcggcatcggaggcggcatcgggggcggctccagccgcatctcctccgtcctggccggagggtcctgccgtgcccccagcacctacgggggcggcctgtctgtctcctctcgcttctcctctgggggagcctgcgggctggggggcggctatggcggtggcttcagcagcagcagcagctttggtagtggcttcgggggaggatatggtggtggccttggtgctggcttcggtggtggcttgggtgctggctttggtggtggttttgctggtggtgatgggcttctggtgggcagtgagaaggtgaccatgcagaacctcaatgaccgcctggcctcctacctggacaaggtgcgtgctctggaggaggccaacgccgacctggaagtgaagatccgtgactggtaccagaggcagcggcccagtgagatcaaagactacagtccctacttcaagaccatcgaggacctgaggaacaagatcattgcggccaccattgagaatgcgcagcccattttgcagattgacaatgccaggctggcagccgatgacttcaggaccaagtatgagacagagttgaacctgcgcatgagtgtggaagccgacatcaatggcctgcgcagggtgctggacgaactgaccctggccagagctgacctggagatgcagattgagagcctgaaggaggagctggcctacctgaagaagaaccacgaggaggagatgaatgccctgagaggccaggtgggtggagatgtcaatgtggagatggacgctgcacctggcgtggacctgagccgcattctgaacgagatgcgtgaccagtatgagaagatggcagagaagaaccgcaaggatgccgaggaatggttcttcaccaagacagaggagctgaaccgcgaggtggccaccaacagcgagctggtgcagagcggcaagagcgagatctcggagctccggcgcaccatgcagaacctggagattgagctgcagtcccagctcagcatgaaagcatccctggagaacagcctggaggagaccaaaggtcgctactgcatgcagctggcccagatccaggagatgattggcagcgtggaggagctccactacgggatcctttagagtctagctcaa

SEQ ID NO: 27792 - DNA, 1256 bp, Homo sapiens
agggactcccacgcgcaaacactttcccttctttggggagaaaaatctgctcactcgctcactccctccttggcaccatgaccacctgcagccgccagttcacctcctccagctccatgaagggctcctgcggcatcggaggcggcatcgggggcggctccagccgcatctcctccgtcctggccggagggtcctgccgtgcccccagcacctacgggggcggcctgtctgtctcctctcgcttctcctctgggggagcctgcgggctggggggcggctatggcggtggcttcagcagcagcagcagctttggtagtggcttcgggggaggatatggtggtggccttggtgctggcttcggtggtggcttgggtgctggctttggtggtggttttgctggtggtgatgggcttctggtgggcagtgagaaggtgaccatgcagaacctcaatgaccgcctggcctcctacctggacaaggtgcgtgctctggaggaggccaacgccgacctggaagtgaagatccgtgactggtaccagaggcagcggcccagtgagatcaaagactacagtccctacttcaagaccatcgaggacctgaggaacaagatcattgcggccaccattgagaatgcgcagcccattttgcagattgacaatgccaggctggcagccgatgacttcaggaccaagtatgagacagagttgaacctgcgcatgagtgtggaagccgacatcaatggcctgcgcagggtgctggacgaactgaccctggccagagctgacctggagatgcagattgagagcctgaaggaggagctggcctacctgaagaagaaccacgaggaggagatgaatgccctgagaggccaggtgggtggagatgtcaatgtggagatggacgctgcacctggcgtggacctgagccgcattctgaacgagatgcgtgaccagtatgagaagatggcagagaagaaccgcaaggatgccgaggaatggttcttcaccaagacagaggagctgaaccgcgaggtggccaccaacagcgagctggtgcagagcggcaagagcgagatctcggagctccggcgcaccatgcagaacctggagattgagctgcagtcccagctcagcatgaaagcatccctggagaacagcctggaggagaccaaaggtcgctactgcatgcagctggcccagatccaggagatgattggcagcgtggaggagcaccacaacggggatccttgagtcgac

SEQ ID NO: 27793 - DNA, 1817 bp, Homo sapiens
  misc_feature (1812)..(1812): n is a, c, g, or t
cgcgtggtaccggcccggaattttgggatcgtttccttctttcagccaactgctcactcgctcacctccctccttggcaccatgaccacctgcagccgccagttcacctcctccagctccatgaagggctcctgcggcatcggaggcggcatcgggggcggctccagccgcatctcctccgtcctggccggagggtcctgccgtgcccccagcacctacgggggcggcctgtctgtctcctctcgcttctcctctgggggagcctgcgggctggggggcggctatggcggtggcttcagcagcagcagcagctttggtagtggcttcgggggaggatatggtggtggccttggtgctggcttcggtggtggcttgggtgctggctttggtggtggttttgctggtggtgatgggcttctggtgggcagtgagaaggtgaccatgcagaacctcaatgaccgcctggcctcctacctggacaaggtgcgtgctctggaggaggccaacgccgacctggaagtgaagatccgtgactggtaccagaggcagcggcccagtgagatcaaagactacagtccctacttcaagaccatcgaggacctgaggaacaagatcattgcggccaccattgagaatgcgcagcccattttgcagattgacaatgccaggctggcagccgatgacttcaggaccaagtatgagcatgaactggccctgcggcagactgtggaggccgacgtcaatggcctgcgccgggtgttggatgagctgaccctggccaggactgacctggagatgcagatcgaaggcctgaaggaggagctggcctacctgaggaagaaccacgaggaggagatgcttgctctgagaggtcagaccggcggagatgtgaacgtggagatggatgctgcacctggcgtggacctgagccgcatcctgaatgagatgcgtgaccagtacgagcagatggcagagaaaaaccgcagagacgctgagacctggttcctgagcaagaccgaggagctgaacaaagaagtggcctccaacagcgaactggtacagagcagccgcagtgaggtgacggagctccggagggtgctccagggcctggagattgagctgcagtcccagctcagcatgaaagcatccctggagaacagcctggaggagaccaaaggccgctactgcatgcagctgtcccagatccagggactgattggcagtgtggaggagcagctggcccagctacgctgtgagatggagcagcagagccaggagtaccagatcttgctggatgtgaagacgcggctggagcaggagattgccacctaccgccgcctgctggagggcgaggatgcccacctttcctcccagcaagcatctggccaatcctattcttcccgcgaggtcttcacctcctcctcgtcctcttcgagccgtcagacccggcccatcctcaaggagcagagctcatccagcttcagccagggccagactgcctctaccacagcctcctgcccaccagctggcctcacctcctgaaggcccgggtcaggaccctgctctcctggcgcagttcccagctatctcccctgctcctctgctggtggtgggctaataaagctgactttctggttgatgcaaaaaaaaaaaaaaaaaaaaaaaaaaaaaaaaaaaaaaaaaaaaaaaaaaaaaaaaaaaaaaaaaaaaaaaaaaaaaaaaaaaaaaaaaaaaggggggggccgccaaaaatttcccccggggggccccaattttccgcttccccttttttttgaaaagggggcccccttnagggg

SEQ ID NO: 27794 - DNA, 1353 bp, Homo sapiens
  misc_feature (1348)..(1348): n is a, c, g, or t
cgcgtggtaccggcccggaattttgggatcgtttccttctttcagccaactgctcactcgctcacctccctccttggcaccatgaccacctgcagccgccagttcacctcctccagctccatgaagggctcctgcggcatcggaggcggcatcgggggcggctccagccgcatctcctccgtcctggccggagggtcctgccgtgcccccagcacctacgggggcggcctgtctgtctcctctcgcttctcctctgggggagcctgcgggctggggggcggctatggcggtggcttcagcagcagcagcagctttggtagtggcttcgggggaggatatggtggtggccttggtgctggcttcggtggtggcttgggtgctggctttggtggtggttttgctggtggtgatgggcttctggtgggcagtgagaaggtgaccatgcagaacctcaatgaccgcctggcctcctacctggacaaggtgcgtgctctggaggaggccaacgccgacctggaagtgaagatccgtgactggtaccagaggcagcggcctctgccaagacagtacgcatgcagagagaatcgagaacatgagggaggagatcattgcggccaccattgagaatgcgcagcccattttgcagtcccagctcagcatgaaagcatccctggagaacagcctggaggagaccaaaggccgctactgcatgcagctgtcccagatccagggactgattggcagtgtggaggagcagctggcccagctacgctgtgagatggagcagcagagccaggagtaccagatcttgctggatgtgaagacgcggctggagcaggagattgccacctaccgccgcctgctggagggcgaggatgcccacctttcctcccagcaagcatctggccaatcctattcttcccgcgaggtcttcacctcctcctcgtcctcttcgagccgtcagacccggcccatcctcaaggagcagagctcatccagcttcagccagggccagagctcctagaactgagctgcctctaccacagcctcctgcccaccagctggcctcacctcctgaaggcccgggtcaggaccctgctctcctggcgcagttcccagctatctcccctgctcctctgctggtggtgggctaataaagctgactttctggttgatgcaaaaaaaaaaaaaaaaaaaaaaaaaaaaaaaaaaaaaaaaaaaaaaaaaaaaaaaaaaaaaaaaaaaaaaaaaaaaaaaaaaaaaaaaaaaaggggggggccgccaaaaatttcccccggggggccccaattttccgcttccccttttttttgaaaagggggcccccttnagggg

SEQ ID NO: 27795 - DNA, 1416 bp, Homo sapiens
cgcgtggtaccggcccggaattttgggatcgtttccttctttcagccaactgctcactcgctcacctccctccttggcaccatgaccacctgcagccgccagttcacctcctccagctccatgaagggctcctgcggcatcggaggcggcatcgggggcggctccagccgcatctcctccgtcctggccggagggtcctgccgtgcccccagcacctacgggggcggcctgtctgtctcctctcgcttctcctctgggggagcctgcgggctggggggcggctatggcggtggcttcagcagcagcagcagctttggtagtggcttcgggggaggatatggtggtggccttggtgctggcttcggtggtggcttgggtgctggctttggtggtggttttgctggtggtgatgggcttctggtgggcagtgagaaggtgaccatgcagaacctcaatgaccgcctggcctcctacctggacaaggtgcgtgctctggaggaggccaacgccgacctggaagtgaagatccgtgactggtaccagaggcagcggcccagtgagatcaaagactacagtccctacttcaagaccatcgaggacctgaggaacaagatcattgcggccaccattgagaatgcgcagcccattttgcagattgacaatgccaggctggcagccgatgacttcaggaccaagtatgagcatgaactggccctgcggcagactgtggaggccgacgtcaatggcctgcgccgggtgttggatgagctgaccctggccaggactgacctggagatgcagatcgaaggcctgaaggaggagctggcctacctgaggaagaaccacgaggaggagatgcttgctctgagaggtcagaccggcggagatgtgaacgtggagatggatgctgcacctggcgtggacctgagccgcatcctgaatgagatgcgtgaccagtacgagcagatggcagagaaaaaccgcagagacgctgagacctggttcctgagcaagacagaggagctgaaccgcgaggtggccaccaacagcgagctggtgcagagcggcaagagcgagatctcggagctccggcgcaccatgcagaacctggagattgagctgcagtcccagctcagcatggtaggaatagtgccaggaagggtggtgcacccaggactggcagggagagaacggccacactcactaatcgttgattccctttccctccctcacagaaagcatccctggagaacagcctggaggagaccaaaggtcgctactgcatgcagctggcccagatccaggagatgattggcagcgtggaggagcctatctccaggttctgcatggtgcccggagctccgagatctcgctcttccctctgcaccagctcgctgttggtgccacctcgcgcta

SEQ ID NO: 27796 - DNA, 1147 bp, Homo sapiens
agggactcccacgcgcaaacactttcccttctttggggagaaaaatctgctcactcgctcactccctccttggcaccatgaccacctgcagccgccagttcacctcctccagctccatgaagggctcctgcggcatcggaggcggcatcgggggcggctccagccgcatctcctccgtcctggccggagggtcctgccgtgcccccagcacctacgggggcggcctgtctgtctcctctcgcttctcctctgggggagcctgcgggctggggggcggctatggcggtggcttcagcagcagcagcagctttggtagtggcttcgggggaggatatggtggtggccttggtgctggcttcggtggtggcttgggtgctggctttggtggtggttttgctggtggtgatgggcttctggtgggcagtgagaaggtgaccatgcagaacctcaatgaccgcctggcctcctacctggacaaggtgcgtgctctggaggaggccaacgccgacctggaagtgaagatccgtgactggtaccagaggcagcggcccagtgagatcaaagactacagtccctacttcaagaccatcgaggacctgaggaacaagatcattgcggccaccattgagaatgcgcagcccattttgcagattgacaatgccaggctggcagccgatgacttcaggaccaagtatgagacagagttgaacctgcgcatgagtgtggaagccgacatcaatggcctgcgcagggtgctggacgaactgaccctggccagagctgacctggagatgcagattgagagcctgaaggaggagctggcctacctgaagaagaaccacgaggaggagatgaatgccctgagaggccaggtgggtggagatgtcaatgtggagatggacgctgcacctggcgtggacctgagccgcattctgaacgagatgcgtgaccagtatgagaagatggcagagaagaaccgcaaggatgccgaggaatggttcttcaccaagacagaggagctgaaccgcgaggtggccaccaacagcgagctggtgcagagcggcaagagcgagatctcggagctccggcgcaccatgcagaacctggagataactcaggggacctctagatcgactcacagcagcac

SEQ ID NO: 27797 - DNA, 895 bp, Homo sapiens
  misc_feature (854)..(854): n is a, c, g, or t
  misc_feature (865)..(865): n is a, c, g, or t
cgcgtggtaccggcccggaattttgggatcgtttccttctttcagccaactgctcactcgctcacctccctccttggcaccatgaccacctgcagccgccagttcacctcctccagctccatgaagggctcctgcggcatcggaggcggcatcgggggcggctccagccgcatctcctccgtcctggccggagggtcctgccgtgcccccagcacctacgggggcggcctgtctgtctcctctcgcttctcctctgggggagcctgcgggctggggggcggctatggcggtggcttcagcagcagcagcagctttggtagtggcttcgggggaggatatggtggtggccttggtgctggcttcggtggtggcttgggtgctggctttggtggtggttttgctggtggtgatgggcttctggtgggcagtgagaaggtgaccatgcagaacctcaatgaccgcctggcctcctacctggacaaggtgcgtgctctggaggaggccaacgccgacctggaagtgaagatccgtgactggtaccagaggcagcggcccagtgagatcaaagactacagtccctacttcaagaccatcgaggacctgaggaacaagatcattgcggccaccattgagaatgcgcagcccattttgcagattgacaatgccaggctggcagccgatgacttcaggaccaagtatgagcatgaactggccctgcggcagactgtggaggccgacgtcaatggcctgcgccgggtgttggatgagctgaccctggccaggactgacctggagatgcagatcgaaggcctgaaggaggagctggcctacctgaggaagaaccacgaggagcngaaaagtcaanccggggagatggtgacggcggaagactgga

SEQ ID NO: 27798 - DNA, 1029 bp, Homo sapiens
cgcgtggtaccggcccggaattttgggatcgtttccttctttcagccaactgctcactcgctcacctccctccttggcaccatgaccacctgcagccgccagttcacctcctccagctccatgaagggctcctgcggcatcggaggcggcatcgggggcggctccagccgcatctcctccgtcctggccggagggtcctgccgtgcccccagcacctacgggggcggcctgtctgtctcctctcgcttctcctctgggggagcctgcgggctggggggcggctatggcggtggcttcagcagcagcagcagctttggtagtggcttcgggggaggatatggtggtggccttggtgctggcttcggtggtggcttgggtgctggctttggtggtggttttgctggtggtgatgggcttctggtgggcagtgagaaggtgaccatgcagaacctcaatgaccgcctggcctcctacctggacaaggtgcgtgctctggaggaggccaacgccgacctggaagtgaagatccgtgactggtaccagaggcagcggcccagtgagatcaaagactacagtccctacttcaagaccatcgaggacctgaggaacaagattatgacagtgaaagaaatcagacttcattgactctatcttgtttctaacccttaagctgtccttgtgggattcctgggcttaggccgaactaaatgtaggaaggaattcagttcgtggcttgactctgaaagaaaattggtaacagccctttcccaataagacccccttcttgcctggggtccagtctgactttgcaggactaacaaattagctacaagattagaaattacaatttagaggtcatgcagcctctggctccaagagtctgaacctcctcaaattgctcctggggataacatcactattgtaaaacctaagatcagtgcgtgagatattttccagaccctgtactcgatggatcagctgacaccactcagaccagtaatctggcccaaccagttctgccattgcacc

SEQ ID NO: 27799 - DNA, 777 bp, Homo sapiens
gttcagcttccctgccttgggcccaggaagggggtgatcgggatggagtgcatccctacgtagcctgagctggtggagaaggcatgccagccctgccagccagaagacttccagatttggggcggttccttttgcccctttctgcctttcatgctcaagtagtaaggtccttggctgaccagggctcctgtcctcatccccactccagatcattgcggccaccattgagaatgcgcagcccattttgcagattgacaatgccaggctggcagccgatgacttcaggaccaagtgagcagccagcatggtgggctgggggcagagggcaagggacaaagagtggggcggtccacccagcagggccagcagaccccgagcctcagaatcctcagggctgcagcctgaggacctgacctctgtcctgccaggtatgagcatgaactggccctgcggcagactgtggaggccgacgtcaatggcctgcgccgggtgttggatgagctgaccctggccaggactgacctggagatgcagatcgaaggcctgaaggaggagctggcctacctgaggaagaaccacgaggagggtacggtcgctgctggcttccggggtgggaggctggtttggtggggttgccagatgcacccagggccaggagagaagtctgctgaactgaccgcctcctgccatcccttcccaggagatgcttgctctgagaggtcagaccggcggagatgtgaacgtggagatggatgctgcacctggcgtggacctgag

SEQ ID NO: 27800 - DNA, 462 bp, Homo sapiens
agaaataacaaaagttcaaaaaaaccaacaacatgagaaaaaccccactcttggctcaaagaaaaaatttataatagatcaattaagaaaaaaataaaaattaaaataccatatttaaaaatggtattagtagctcatattcagcttccattctagagtctttaacatgccattttcaatactcttgcttttaagttttccctcatgagcttgatccttgacccacagctgtaatgtgaaatttattctgagccctgatgaatgataggtggtgattatataagaactcaccttatatggctttttaaaatatgatacattaacgtgaaaaatcctagaatcactagaaacaagaaaattaaattgtgcttttaaaaatttgatatgcttaaatgttcagacaactcaaaaacatccaccagaatggagctaataatactgcctatttaatagaattgttag

SEQ ID NO: 27801 - DNA, 631 bp, Homo sapiens
caaaaaccagttatgtttatcacagaaatggcatagatattttaatattagtaaacctgtaaatataatctttgacatgaataggtcagtagagaaaacacatttgatttttcccaatatgtactaaaatgagtttgaataaattcagcatctatttttcacagaagtttttacaaaactagacacagaatacttcccattaaagtgaggaacaaaacaagttgtaagtattaaataagagcaaatccaagcattacaagtcctgtagcttatacaatttgggagccctttttaaaacaaaacaaaaaatacaagattttcttggcccctctcaggcctcacaaaaaaacctatgaaaaagagaagtttgaaacttaagcttccccccgccctcccctttttctcctatcctggggaaggccacctttgtacggctgttagaacttaatattttgttttagatgcttgggccaatgcagtaagaaatgacactgaaagaaaagctagaatcactagaaacaagaaaattaaattgtgcttttaaaaatttgatatgcttaaatgttcagacaactcaaaaacatccaccagaatggagctaataatactgcctatttaatagaattgttag

SEQ ID NO: 27802 - DNA, 613 bp, Homo sapiens
agaaataacaaaagttcaaaaaaaccaacaacatgagaaaaaccccactcttggctcaaagaaaaaatttataatagatcaattaagaaaaaaataaaaattaaaataccatatttaaaaatggtattagtagctcatattcagcttccattctagagtctttaacatgccattttcaatactcttgcttttaagttttccctcatgagcttgatccttgacccacagctgtaatgtgaaatttattctgagccctgatgaatgataggtggtgattatataagaactcaccttatatggctttttaaaatatgatacattaacgtgaaaaatccctagatttggatacttacagaggctgattatgaaatcagtaaaatggaaaactaaaaattataaaacagttttaataattatccctggggatataatctcataattgccaagagttagggtaccattatttaaaagtttaaaaggcagggtggggtgcagtagttcacacctgtaatcccagcactttggaaggctgaggcaggcggattgcttgagcccaagagtttgagaccagactgggcaacatggcaagactttgcctctacaaaaaatacaa

SEQ ID NO: 27803 - DNA, 2669 bp, Homo sapiens
cgcgtcctgtcccggcgccttccgcgcaccggccaccgccagtctccgagccccgtgacctgcaggtcctccggccgcgactccgggccggccctgcgtggtggctgtcggggggcgcgcggggaagcagcggaacttgcggtgtgaggggccggcggggcccggagcggtccccggcccgggaaacttggaccgagaccaggccggcgaccaccaggggcctgaggatgaagccaagtctgctgtgccggcccctgtcctgcttccttatgctgctgccctggcctctcgccaccctgacatcaacaaccctttggcagtgcccacctggggaggagcccgacctggacccagggcagggcacattatgcaggccctgccccccaggcaccttctcagctgcatggggctccagcccatgccagccccatgcccgttgcagcctttggaggaggctggaggcccaggtgggcatggcaactcgagatacactctgtggagactgctggcctgggtggtttgggccttggggggttccccgcgttccatgtcaaccatgttcctgggcacctctgggtactcatggctgtgatgagtgggggcggcgggcccgacgtggcgtggaggtggcagcaggggccagcagcggtggtgagacacggcagcctgggaacggcacccgggcaggtggcccagaggagacagccgcccagtacgcggtcatcgccatcgtccctgtcttctgcctcatggggctgttgggcatcctggtgtgcaacctcctcaagcggaagggctaccactgcacggcgcacaaggaggtcgggcccggccctggaggtggaggcagtggaatcaaccctgcctaccggactgaggatgccaatgaggacaccattggggtcctggtgcgcttgatcacagagaagaaagagaatgctgcggccctggaggagctgctgaaagagtaccacagcaaacagctggtgcagacgagccacaggcctgtgtccaagctgccgccagcgcccccgaacgtgccacacatctgcccgcaccgccaccatctccacaccgtgcagggcctggcctcgctctctggcccctgctgctcccgctgtagccagaagaagtggcccgaggtgctgctgtcccctgaggctgtagccgccactactcctgttcccagccttctgcctaacccgaccagggttcccaaggccggggccaaggcagggcgtcagggcgagatcaccatcttgtctgtgggcaggttccgcgtggctcgaattcctgagcagcggacaagttcaatggtgtctgaggtgaagaccatcacggaggctgggccctcgtggggtgatctccctgactccccacagcctggcctcccccctgagcagcaggccctgctaggaagtggcggaagccgtacaaagtggctgaagcccccagcagagaacaaggccgaggagaaccgctatgtggtccggctaagtgagagcaacctggtcatctgaggggcggtctagtctaaggacactgcggccctgccctgggaggttccgaaggcttcctggaggaggtggagctgcagctgggactgtgaggaccgagaagcaatggcccagcagacgagacagcaaagaccaaggcctggaggtgggagcgtctgccccagtgaggaggcaggtggccggcgggcactgtgtacaggagcaggctgagccccgcccctggccctgctgccatgttgctcccctgaaggatgccccgacccccgtgcctgccctggctggatcctaggagcccacgggattctctgtatcatcagaggctgggcttggcagaggggaggggcctgtgcccgtcacccctggccccattccttggtaattagccacacccttgcctctgtacagggccctagagcagatgtgcgtccccctcctcttccagcaggtctataaagggaaggggtagcagaaagtcctgggctaggagagtgagtccctgggttctaatcttgggcacatctgtggccatcgctgggtccatttttctgactgtgaagtaaggagagacgtctcagtacccagggcctcttcagctctttgtaggttctgggctgggttgtgggggactggggagctgggctctaccatccctcccattagtagctttatccagccccgtttttgctgcttccagggcctctgccttcaaggcccccatggggctgtccatccatggctctgcctacggaaggggcttaatgcatgtgcctgcccctcccccagctgtttttaatgaaactgaaaaaatagacttgatcccggcaggactgtgatacagagccctagcctgcccagccagccccaagatctcaggagctttagggagaagacttggtggggctggagcacaccttgggcctcagtggtttctgtgtccctgtggtgccagtgcttctgggcagtgcaggcggctgccaggcccagccctgacttccactctggctcagcaacctggttatttatgtggggccgtgcaggcatgggcccactgcctgtccatcctgtttctcttatttattgaaactcaccattgccctatccttgtgtctccacccccttccatgtgttgaataataaaaggtgggaaagtgc

SEQ ID NO: 27804 - DNA, 3440 bp, Homo sapiens
gggtctgcgcaccttcccggcccagccggcgattcattcaaaaggcgcgcaggctgcgcggctgtccgggcgctcgccgagccgggccgcggcgccgagtcgaacggggagccgagctggagctgccgcggcgcagccaggccggcgaccaccaggggcctgaggatgaagccaagtctgctgtgccggcccctgtcctgcttccttatgctgctgccctggcctctcgccaccctgacatcaacaaccctttggcagtgcccacctggggaggagcccgacctggacccagggcagggcacattatgcaggccctgccccccaggcaccttctcagctgcatggggctccagcccatgccagccccatgcccgttgcagcctttggaggaggctggaggcccaggtgggcatggcaactcgagatacactctgtggagactgctggcctgggtggtttgggccttggggggttccccgcgttccatgtcaaccatgttcctgggcacctctgggtactcatggctgtgatgagtgggggcggcgggcccgacgtggcgtggaggtggcagcaggggccagcagcggtggtgagacacggcagcctgggaacggcacccgggcaggtggcccagaggagacagccgcccagtacgcggtcatcgccatcgtccctgtcttctgcctcatggggctgttgggcatcctggtgtgcaacctcctcaagcggaagggctaccactgcacggcgcacaaggaggtcgggcccggccctggaggtggaggcagtggaatcaaccctgcctaccggactgaggatgccaatgaggacaccattggggtcctggtgcgcttgatcacagagaagaaagagaatgctgcggccctggaggagctgctgaaagagtaccacagcaaacagctggtgcagacgagccacaggcctgtgtccaagctgccgccagcgcccccgaacgtgccacacatctgcccgcaccgccaccatctccacaccgtgcagggcctggcctcgctctctggcccctgctgctcccgctgtagccagaagaagtggcccgaggtgctgctgtcccctgaggctgtagccgccactactcctgttcccagccttctgcctaacccgaccagggttcccaaggccggggccaaggcagggcgtcagggcgagatcaccatcttgtctgtgggcaggttccgcgtggctcgaattcctgagcagcggacaagttcaatggtgtctgaggtgaagaccatcacggaggctgggccctcgtggggtgatctccctgactccccacagcctggcctcccccctgagcagcaggccctgctaggaagtggcggaagccgtacaaagtggctgaagcccccagcagagaacaaggccgaggagaaccgctatgtggtccggctaagtgagagcaacctggtcatctgaggggcggtctagtctaaggacactgcggccctgccctgggaggttccgaaggcttcctggaggaggtggagctgcagctgggactgtgaggaccgagaagcaatggcccagcagacgagacagcaaagaccaaggcctggaggtgggagcgtctgccccagtgaggaggcaggtggccggcgggcactgtgtacaggagcaggctgagccccgcccctggccctgctgccatgttgctcccctgaaggatgccccgacccccgtgcctgccctggctggatcctaggagcccacgggattctctgtatcatcagaggctgggcttggcagaggggaggggcctgtgcccgtcacccctggccccattccttggtaattagccacacccttgcctctgtacagggccctagagcagatgtgcgtccccctcctcttccagcaggtctataaagggaaggggtagcagaaagtcctgggctaggagagtgagtccctgggttctaatcttgggcacatctgtggccatcgctgggtccatttttctgactgtgaagtaaggagagacgtctcagtacccagggcctcttcagctctttgtaggttctgggctgggttgtgggggactggggagctgggctctaccatccctcccattagtagctttatccagccccgtttttgctgcttccagggcctctgccttcaaggcccccatggggctgtccatccatggctctgcctacggaaggggcttaatgcatgtgcctgcccctcccccagctgtttttaatgaaactgaaaaaatagacttgatcccggcaggactgtgatacagagccctagcctgcccagccagccccaagatctcaggagctttagggagaagacttggtggggctggagcacaccttgggcctcagtggtttctgtgtccctgtggtgccagtgcttctgggcagtgcaggcggctgccaggcccagccctgacttccactctggctcagcaacctggttatttatgtggggccgtgcaggcatgggcccactgcctgtccatcctgtttctcttatttattgaaactcaccattgccctatccttgtgtctccacccccttccatgtgttgaataataaaaggtgggaaagtgctgtcacgaggagctccttttctctgtgcccttcccagcttatccgcctgttccacttgtacctgtccagccctgccctgtgttgggcaccgtgacaggctgccctcccctcacagttcctgcacctcagcagccagggaagcagggcccagaggagacccatcaactcatctggttctcaccaaagcccctagctagaggcagggctgtcccacagaaatagtgtgagccacatatgtgactttaaattttctgacagtcacatttcaaaaagtaaaaagaagcaggtgaacttaatttttttttaacccagtctatccaaaatattttcatttcaatataaaatcagtataaaaagtgtgaatgagctgtttttgcttttgctttgaaatctggagtgtatcttacacatcttgattggaactcaaatatttcaagggctccatagccacgtggccagcagctaccacactggtcagcgcagcacctgaggaaatgcactgtgtggagcccgggaggtaattgggggtgaggaagatgtgcgggccagggaatgtgttccacagagagggacagcatgtgcaaaggctgagcaccaacacatagtggtcacctgggccttatgcccagggagcctccaaagcattcagctcctgcttggccagtgtggagaggaaaggagccacaggagcgggtgctacacccggcaagacagagcgtctccatctaaaattcctagggcaagcttccaacccggcccaagggccgcatgtggcccaggatatggctttgaatggggcctaacacaaattcataaactttcttaaaacattg

SEQ ID NO: 27805 - DNA, 2936 bp, Homo sapiens
cgccccctcgcccgcccaattcaatgactggagttcacgtggccctgaagcctctatgcacccgggctgttgggtgcaggaagcactggtgttgaatcatgaaggtgatatgggcttctctgagcctggatcccacatttgcagggctctgggaggcttgtcacctaaatgcacatgctcagggcccttaagaaggccagggttgccctctgctggcagatcatggtttagctcaggagtgcggcttccccctcttccccaggatcagggcccttcttttccccaggaatcaaccctgcctaccggactgaggatgccaatgaggacaccattggggtcctggtgcgcttgatcacagagaagaaagagaatgctgcggccctggaggagctgctgaaagagtaccacagcaaacagctggtgcagacgagccacaggcctgtgtccaagctgccgccagcgcccccgaacgtgccacacatctgcccgcaccgccaccatctccacaccgtgcagggcctggcctcgctctctggcccctgctgctcccgctgtagccagaagaagtggcccgaggtgctgctgtcccctgaggctgtagccgccactactcctgttcccagccttctgcctaacccgaccagggttcccaaggccggggccaaggcagggcgtcagggcgagatcaccatcttgtctgtgggcaggttccgcgtggctcgaattcctgagcagcggacaagttcaatggtgtctgaggtgaagaccatcacggaggctgggccctcgtggggtgatctccctgactccccacagcctggcctcccccctgagcagcaggccctgctaggaagtggcggaagccgtacaaagtggctgaagcccccagcagagaacaaggccgaggagaaccgctatgtggtccggctaagtgagagcaacctggtcatctgaggggcggtctagtctaaggacactgcggccctgccctgggaggttccgaaggcttcctggaggaggtggagctgcagctgggactgtgaggaccgagaagcaatggcccagcagacgagacagcaaagaccaaggcctggaggtgggagcgtctgccccagtgaggaggcaggtggccggcgggcactgtgtacaggagcaggctgagccccgcccctggccctgctgccatgttgctcccctgaaggatgccccgacccccgtgcctgccctggctggatcctaggagcccacgggattctctgtatcatcagaggctgggcttggcagaggggaggggcctgtgcccgtcacccctggccccattccttggtaattagccacacccttgcctctgtacagggccctagagcagatgtgcgtccccctcctcttccagcaggtctataaagggaaggggtagcagaaagtcctgggctaggagagtgagtccctgggttctaatcttgggcacatctgtggccatcgctgggtccatttttctgactgtgaagtaaggagagacgtctcagtacccagggcctcttcagctctttgtaggttctgggctgggttgtgggggactggggagctgggctctaccatccctcccattagtagctttatccagccccgtttttgctgcttccagggcctctgccttcaaggcccccatggggctgtccatccatggctctgcctacggaaggggcttaatgcatgtgcctgcccctcccccagctgtttttaatgaaactgaaaaaatagacttgatcccggcaggactgtgatacagagccctagcctgcccagccagccccaagatctcaggagctttagggagaagacttggtggggctggagcacaccttgggcctcagtggtttctgtgtccctgtggtgccagtgcttctgggcagtgcaggcggctgccaggcccagccctgacttccactctggctcagcaacctggttatttatgtggggccgtgcaggcatgggcccactgcctgtccatcctgtttctcttatttattgaaactcaccattgccctatccttgtgtctccacccccttccatgtgttgaataataaaaggtgggaaagtgctgtcacgaggagctccttttctctgtgcccttcccagcttatccgcctgttccacttgtacctgtccagccctgccctgtgttgggcaccgtgacaggctgccctcccctcacagttcctgcacctcagcagccagggaagcagggcccagaggagacccatcaactcatctggttctcaccaaagcccctagctagaggcagggctgtcccacagaaatagtgtgagccacatatgtgactttaaattttctgacagtcacatttcaaaaagtaaaaagaagcaggtgaacttaatttttttttaacccagtctatccaaaatattttcatttcaatataaaatcagtataaaaagtgtgaatgagctgtttttgcttttgctttgaaatctggagtgtatcttacacatcttgattggaactcaaatatttcaagggctccatagccacgtggccagcagctaccacactggtcagcgcagcacctgaggaaatgcactgtgtggagcccgggaggtaattgggggtgaggaagatgtgcgggccagggaatgtgttccacagagagggacagcatgtgcaaaggctgagcaccaacacatagtggtcacctgggccttatgcccagggagcctccaaagcattcagctcctgcttggccagtgtggagaggaaaggagccacaggagcgggtgctacacccggcaagacagagcgtctccatctaaaattcctagggcaagcttccaacccggcccaagggccgcatgtggcccaggatatggctttgaatggggcctaacacaaattcataaactttcttaaaacattg

SEQ ID NO: 27806 - DNA, 2966 bp, Homo sapiens
gggtctgcgcaccttcccggcccagccggcgattcattcaaaaggcgcgcaggctgcgcggctgtccgggcgctcgccgagccgggccgcggcgccgagtcgaacggggagccgagctggagctgccgcggcgcagccaggccggcgaccaccaggggcctgaggatgaagccaagtctgctgtgccggcccctgtcctgcttccttatgctgctgccctggcctctcgccaccctgacatcaacaaccctttggcagtgcccacctggggaggagcccgacctggacccagggcagggcacattatgcaggccctgccccccaggcaccttctcagctgcatggggctccagcccatgccagccccatgcccgttgcagcctttggaggaggctggaggcccaggtgggcatggcaactcgagatacactctgtggagactgctggcctgggtggtttgggccttggggggttccccgcgttccatgtcaaccatgttcctgggcacctctgggtactcatggctgtgatgagtgggggcggcgggcccgacgtggcgtggaggtggcagcaggggccagcagcggtggtgagacacggcagcctgggaacggcacccgggcaggtggcccagaggagacagccgcccagtacgcggtcatcgccatcgtccctgtcttctgcctcatggggctgttgggcatcctggtgtgcaacctcctcaagcggaagggctaccactgcacggcgcacaaggaggtcgggcccggccctggaggtggaggcagtggaatcaaccctgcctaccggactgaggatgccaatgaggacaccattggggtcctggtgcgcttgatcacagagaagaaagagaatgctgcggccctggaggagctgctgaaagagtaccacagcaaacagctggtgcagacgagccacaggcctgtgtccaagctgccgccagcgcccccgaacgtgccacacatctgcccgcaccgccaccatctccacaccgtgcagggcctggcctcgctctctggcccctgctgctcccgctgtagccagaagaagtggcccgaggtgctgctgtcccctgaggctgtagccgccactactcctgttcccagccttctgcctaacccgaccagggttcccaaggccggggccaaggcagggcgtcagggcgagatcaccatcttgtctgtgggcaggttccgcgtggctcgaattcctgagcagcggacaagttcaatggtgtctgaggtgaagaccatcacggaggctgggccctcgtggggtgatctccctgactccccacagcctggcctcccccctgagcagcaggccctgctaggaagtggcggaagccgtacaaagtggctgaagcccccagcagagaacaaggccgaggagaaccgctatgtggtccggctaagtgagagcaacctggtcatctgaggggcggtctagtctaaggacactgcggccctgccctgggaggttccgaaggcttcctggaggaggtggagctgcagctgggactgtgaggaccgagaagcaatggcccagcagacgagacagcaaagaccaaggcctggaggtgggagcgtctgccccagtgaggaggcaggtggccggcgggcactgtgtacaggagcaggctgagccccgcccctggccctgctgccatgttgctcccctgaaggatgccccgacccccgtgcctgccctggctggatcctaggagcccacgggattctctgtatcatcagaggctgggcttggcagaggggaggggcctgtgcccgtcacccctggccccattccttggtaattagccacacccttgcctctgtacagggccctagagcagatgtgcgtccccctcctcttccagcaggtctataaagggaaggggtagcagaaagtcctgggctaggagagtgagtccctgggttctaatcttgggcacatctgtggccatcgctgggtccatttttctgactgtgaagtaaggagagacgtctcagtacccagggcctcttcagctctttgtaggttctgggctgggttgtgggggactggggagctgggctctaccatccctcccattagtagctttatccagccccgtttttgctgcttccagggcctctgccttcaaggcccccatggggctgtccatccatggctctgcctacggaaggggcttaatgcatgtgcctgcccctcccccagctgtttttaatgaaactgaaaaaatagacttgatcccggcaggactgtgatacagagccctagcctgcccagccagccccaagatctcaggagctttagggagaagacttggtggggctggagcacaccttgggcctcagtggtttctgtgtccctgtggtgccagtgcttctgggcagtgcaggcggctgccaggcccagccctgacttccactctggctcagcaacctggttatttatgtggggccgtgcaggcatgggcccactgcctgtccatcctgtttctcttatttattgaaactcaccattgccctatccttgtgtctccacccccttccatgtgttgaataataaaaggtgggaaagtgctgtcacgaggagctccttttctctgtgcccttcccagcttatccgcctgttccacttgtacctgtccagccctgccctgtgttgggcaccgtgacaggctgccctcccctcacagttcctgcacctcagcagccagggaagcagggcccagaggagacccatcaactcatctggttctcaccaaagcccctagctagaggcagggctgtcccacagaaatagtgtgagccacatatgtgactttaaattttctgacagtcacatttcaaaaagtaaaaagaagcaggtgaacttaatttttttttaacccagtctatccaaaatattttcatttcaatataaaatcagtataaaaagtg

SEQ ID NO: 27807 - DNA, 1114 bp, Homo sapiens
gggagactgctggcctgggtggtttgggccttggggggttccccgcgtcccatgccagccccatgcccgttgcagcctttggaggaggctggaggcccaggtgggcatggcaactcgagatacacttctggctcagcaacctggttatttatgtggggccgtgcaggcatgggcccactgcctgtccatcctgtttctcttatttattgaaactcaccattgccctatccttgtgtctccacccccttccatgtgttgaataataaaaggtgggaaagtgctgtcacgaggagctccttttctctgtgcccttcccagcttatccgcctgttccacttgtacctgtccagccctgccctgtgttgggcaccgtgacaggctgccctcccctcacagttcctgcacctcagcagccagggaagcagggcccagaggagacccatcaactcatctggttctcaccaaagcccctagctagaggcagggctgtcccacagaaatagtgtgagccacatatgtgactttaaattttctgacagtcacatttcaaaaagtaaaaagaagcaggtgaacttaatttttttttaacccagtctatccaaaatattttcatttcaatataaaatcagtataaaaagtgtgaatgagctgtttttgcttttgctttgaaatctggagtgtatcttacacatcttgattggaactcaaatatttcaagggctccatagccacgtggccagcagctaccacactggtcagcgcagcacctgaggaaatgcactgtgtggagcccgggaggtaattgggggtgaggaagatgtgcgggccagggaatgtgttccacagagagggacagcatgtgcaaaggctgagcaccaacacatagtggtcacctgggccttatgcccagggagcctccaaagcattcagctcctgcttggccagtgtggagaggaaaggagccacaggagcgggtgctacacccggcaagacagagcgtctccatctaaaattcctagggcaagcttccaacccggcccaagggccgcatgtggcccaggatatggctttgaatggggcctaacacaaattcataaactttcttaaaacattg

SEQ ID NO: 27808 - DNA, 2607 bp, Homo sapiens
gggtctgcgcaccttcccggcccagccggcgattcattcaaaaggcgcgcaggctgcgcggctgtccgggcgctcgccgagccgggccgcggcgccgagtcgaacggggagccgagctggagctgccgcggcgcagccaggccggcgaccaccaggggcctgaggatgaagccaagtctgctgtgccggcccctgtcctgcttccttatgctgctgccctggcctctcgccaccctgacatcaacaaccctttggcagtgcccacctggggaggagcccgacctggacccagggcagggcacattatgcaggccctgccccccaggcaccttctcagctgcatggggctccagcccatgccagccccatgcccgttgcagcctttggaggaggctggaggcccaggtgggcatggcaactcgagatacactctgtggagactgctggcctgggtggtttgggccttggggggttccccgcgttccatgtcaaccatgttcctgggcacctctgggtactcatggctgtgatgagtgggggcggcgggcccgacgtggcgtggaggtggcagcaggggccagcagcggtggtgagacacggcagcctgggaacggcacccgggcaggtggcccagaggagacagccgcccagtacgcggtcatcgccatcgtccctgtcttctgcctcatggggctgttgggcatcctggtgtgcaacctcctcaagcggaagggctaccactgcacggcgcacaaggaggtcgggcccggccctggaggtggaggcagtggaatcaaccctgcctaccggactgaggatgccaatgaggacaccattggggtcctggtgcgcttgatcacagagaagaaagagaatgctgcggccctggaggagctgctgaaagagtaccacagcaaacagctggtgcagacgagccacaggcctgtgtccaagctgccgccagcgcccccgaacgtgccacacatctgcccgcaccgccaccatctccacaccgtgcagggcctggcctcgctctctggcccctgctgctcccgctgtagccagaagaagtggcccgaggtgctgctgtcccctgaggctgtagccgccactactcctgttcccagccttctgcctaacccgaccagggttcccaaggccggggccaaggcagggcgtcagggcgagatcaccatcttgtctgtgggcaggttccgcgtggctcgaattcctgagcagcggacaagttcaatggtgtctgaggtgaagaccatcacggaggctgggccctcgtggggtgatctccctgactccccacagcctggcctcccccctgagcagcaggccctgctaggaagtggcggaagccgtacaaagtggctgaagcccccagcagagaacaaggccgaggagaaccgctatgtggtccggctaagtgagagcaacctggtcatctgaggggcggtctagtctaaggacactgcggccctgccctgggaggttccgaaggcttcctggaggaggtggagctgcagctgggactgtgaggaccgagaagcaatggcccagcagacgagacagcaaagaccaaggcctggaggtgggagcgtctgccccagtgaggaggcaggtggccggcgggcactgtgtacaggagcaggctgagccccgcccctggccctgctgccatgttgctcccctgaaggatgccccgacccccgtgcctgccctggctggatcctaggagcccacgggattctctgtatcatcagaggctgggcttggcagaggggaggggcctgtgcccgtcacccctggccccattccttggtaattagccacacccttgcctctgtacagggccctagagcagatgtgcgtccccctcctcttccagcaggtctataaagggaaggggtagcagaaagtcctgggctaggagagtgagtccctgggttctaatcttgggcacatctgtggccatcgctgggtccatttttctgactgtgaagtaaggagagacgtctcagtacccagggcctcttcagctctttgtaggttctgggctgggttgtgggggactggggagctgggctctaccatccctcccattagtagctttatccagccccgtttttgctgcttccagggcctctgccttcaaggcccccatggggctgtccatccatggctctgcctacggaaggggcttaatgcatgtgcctgcccctcccccagctgtttttaatgaaactgaaaaaatagacttgatcccggcaggactgtgatacagagccctagcctgcccagccagccccaagatctcaggagctttagggagaagacttggtggggctggagcacaccttgggcctcagtggtttctgtgtccctgtggtgccagtgcttctgggcagtgcaggcggctgccaggcccagccctgacttccactctggctcagcaacctggttatttatgtggggccgtgcaggcatgggcccactgcctgtccatcctgtttctcttatttattgaaactcaccattgccctatccttgtgtctccacccccttccatgtgttgaataataaaaggtgggaaagtgc

SEQ ID NO: 27809 - DNA, 485 bp, Homo sapiens
gggtctgcgcaccttcccggcccagccggcgattcattcaaaaggcgcgcaggctgcgcggctgtccgggcgctcgccgagccgggccgcggcgccgagtcgaacggggagccgagctggagctgccgcggcgcagccaggccggcgaccaccaggggcctgaggatgaagccaagtctgctgtgccggcccctgtcctgcttccttatgctgctgccctggcctctcgccaccctgacatcaacaaccctttggcagtgcccacctggggaggagcccgacctggacccagggcagggcacattatgcaggccctgccccccaggcaccttctcagctgcatggggctccagcccatgccagccccatgcccgttgcagcctttggaggaggctggaggcccaggtgggcatggcaactcgagatacactctgtggagactgctggcctgggtaagccaaagggagtgcggggagggctcctgg

SEQ ID NO: 27810 - DNA, 3261 bp, Homo sapiens
gggtctgcgcaccttcccggcccagccggcgattcattcaaaaggcgcgcaggctgcgcggctgtccgggcgctcgccgagccgggccgcggcgccgagtcgaacggggagccgagctggagctgccgcggcgcagccaggccggcgaccaccaggggcctgaggatgaagccaagtctgctgtgccggcccctgtcctgcttccttatgctgctgccctggcctctcgccaccctgacatcaacaaccctttggcagtgcccacctggggaggagcccgacctggacccagggcagggcacattatgcaggccctgccccccaggcaccttctcagctgcatggggctccagcccatgccagccccatgcccgttgcagcctttggaggaggctggaggcccaggtgggcatggcaactcgagatacactctgtggagactgctggcctgggaatcaaccctgcctaccggactgaggatgccaatgaggacaccattggggtcctggtgcgcttgatcacagagaagaaagagaatgctgcggccctggaggagctgctgaaagagtaccacagcaaacagctggtgcagacgagccacaggcctgtgtccaagtgagtgggctggtgggagataacggggccaaaacctacattaaccagcctgcctcctggggatctcccacttgggtctccctcaagtcaccctgttccctgctggggtctcctgcccctggcctggcctatggccacttctgcctgtgccccctgcaggctgccgccagcgcccccgaacgtgccacacatctgcccgcaccgccaccatctccacaccgtgcagggcctggcctcgctctctggcccctgctgctcccgctgtagccagaagaagtggcccgaggtgctgctgtcccctgaggctgtagccgccactactcctgttcccagccttctgcctaacccgaccagggttcccaaggccggggccaaggcagggcgtcagggcgagatcaccatcttgtctgtgggcaggttccgcgtggctcgaattcctgagcagcggacaagttcaatggtgtctgaggtgaagaccatcacggaggctgggccctcgtggggtgatctccctgactccccacagcctggcctcccccctgagcagcaggccctgctaggaagtggcggaagccgtacaaagtggctgaagcccccagcagagaacaaggccgaggagaaccgctatgtggtccggctaagtgagagcaacctggtcatctgaggggcggtctagtctaaggacactgcggccctgccctgggaggttccgaaggcttcctggaggaggtggagctgcagctgggactgtgaggaccgagaagcaatggcccagcagacgagacagcaaagaccaaggcctggaggtgggagcgtctgccccagtgaggaggcaggtggccggcgggcactgtgtacaggagcaggctgagccccgcccctggccctgctgccatgttgctcccctgaaggatgccccgacccccgtgcctgccctggctggatcctaggagcccacgggattctctgtatcatcagaggctgggcttggcagaggggaggggcctgtgcccgtcacccctggccccattccttggtaattagccacacccttgcctctgtacagggccctagagcagatgtgcgtccccctcctcttccagcaggtctataaagggaaggggtagcagaaagtcctgggctaggagagtgagtccctgggttctaatcttgggcacatctgtggccatcgctgggtccatttttctgactgtgaagtaaggagagacgtctcagtacccagggcctcttcagctctttgtaggttctgggctgggttgtgggggactggggagctgggctctaccatccctcccattagtagctttatccagccccgtttttgctgcttccagggcctctgccttcaaggcccccatggggctgtccatccatggctctgcctacggaaggggcttaatgcatgtgcctgcccctcccccagctgtttttaatgaaactgaaaaaatagacttgatcccggcaggactgtgatacagagccctagcctgcccagccagccccaagatctcaggagctttagggagaagacttggtggggctggagcacaccttgggcctcagtggtttctgtgtccctgtggtgccagtgcttctgggcagtgcaggcggctgccaggcccagccctgacttccactctggctcagcaacctggttatttatgtggggccgtgcaggcatgggcccactgcctgtccatcctgtttctcttatttattgaaactcaccattgccctatccttgtgtctccacccccttccatgtgttgaataataaaaggtgggaaagtgctgtcacgaggagctccttttctctgtgcccttcccagcttatccgcctgttccacttgtacctgtccagccctgccctgtgttgggcaccgtgacaggctgccctcccctcacagttcctgcacctcagcagccagggaagcagggcccagaggagacccatcaactcatctggttctcaccaaagcccctagctagaggcagggctgtcccacagaaatagtgtgagccacatatgtgactttaaattttctgacagtcacatttcaaaaagtaaaaagaagcaggtgaacttaatttttttttaacccagtctatccaaaatattttcatttcaatataaaatcagtataaaaagtgtgaatgagctgtttttgcttttgctttgaaatctggagtgtatcttacacatcttgattggaactcaaatatttcaagggctccatagccacgtggccagcagctaccacactggtcagcgcagcacctgaggaaatgcactgtgtggagcccgggaggtaattgggggtgaggaagatgtgcgggccagggaatgtgttccacagagagggacagcatgtgcaaaggctgagcaccaacacatagtggtcacctgggccttatgcccagggagcctccaaagcattcagctcctgcttggccagtgtggagaggaaaggagccacaggagcgggtgctacacccggcaagacagagcgtctccatctaaaattcctagggcaagcttccaacccggcccaagggccgcatgtggcccaggatatggctttgaatggggcctaacacaaattcataaactttcttaaaacattg

SEQ ID NO: 27811 - DNA, 1295 bp, Homo sapiens
cgcgtcctgtcccggcgccttccgcgcaccggccaccgccagtctccgagccccgtgacctgcaggtcctccggccgcgactccgggccggccctgcgtggtggctgtcggggggcgcgcggggaagcagcggaacttgcggtgtgaggggccggcggggcccggagcggtccccggcccgggaaacttggaccgagaccaggccggcgaccaccaggggcctgaggatgaagccaagtctgctgtgccggcccctgtcctgcttccttatgctgctgccctggcctctcgccaccctgacatcaacaaccctttggcagtgcccacctggggaggagcccgacctggacccagggcagggcacattatgcaggccctgccccccaggcaccttctcagctgcatggggctccagcccatgccagccccatgcccgttgcagcctttggaggaggctggaggcccaggtgggcatggcaactcgagatacactctgtggagactgctggcctgggtggtttgggccttggggggttccccgcgttccatgtcaaccatgttcggtggtgagacacggcagcctgggaacggcacccgggcaggtggcccagaggagacagccgcccagtacgcggtcatcgccatcgtccctgtcttctgcctgtccatcctgtttctcttatttattgaaactcaccattgccctatccttgtgtctccacccccttccatgtgttgaataataaaaggtgggaaagtgctgtcacgaggagctccttttctctgtgcccttcccagcttatccgcctgttccacttgtacctgtccagccctgccctgtgttgggcaccgtgacaggctgccctcccctcacagttcctgcacctcagcagccagggaagcagggcccagaggagacccatcaactcatctggttctcaccaaagcccctagctagaggcagggctgtcccacagaaatagtgtgagccacatatgtgactttaaattttctgacagtcacatttcaaaaagtaaaaagaagcaggtgaacttaatttttttttaacccagtctatccaaaatattttcatttcaatataaaatcagtataaaaagtgaaaacaaaaaaaaaaaaaaaaaaaaaaaaaaaaggggggcacaaatacggcggcggaaacagggctaaaaagggccatggcacaacgggtctcacaccaggttctggaccaagggggaaacacggcgaccccaatagagggcgcgaaaatgcgaaaacccgggttacccgtagag

SEQ ID NO: 27812 - DNA, 316 bp, Homo sapiens
cgacttcaaaagggctttttctaccagaatggacataatttaaataggacggtcagcttttagacaggcacaacactatatatacagatctcaagaaaaactggtgcttccttatgtcgttggttcatttaagaaatatttattgaatacctctttgtctctggtgcacatttttataaaattaccttgagccctagatcaaatgtcacctccctgtcaagcttttcccaaagctctcaggcagaatgactctttgaaaactatatgtaaataaatgtatttatttacccatctatagtttatcttgcctggtgtc

SEQ ID NO: 27813 - DNA, 413 bp, Homo sapiens
gaaaaacagcttagaaacttcaatctggtgaaagtatcattgacttacattgggttgtttcagccctgcatcagatcccaaagtaacaaataatcttaatgtaactactatttccatccaaccagttataagcatctcctaacccaaagaacacttccagatttttcttgctgctttatcagagttcaggttcactttgtcaaactttttacagttctaaaatagaaaacagaaccgatgccctatgtcttacaattaattgcatgcacttctgtttgttccaccaagtttctcgacagatacaatttctcccctttcgaaggtaagcagaaggggtcatgtattccttagtacatgctgtgataacagtccttgtctgtcatacacagtagggccgatgctaagacgaatct

SEQ ID NO: 27814 - DNA, 365 bp, Homo sapiens
cggctcactgcaagctccgcctcccaggttcatgccattctcctgcctcagcctcccgagtagctgggactacaggagcccgccaccaggcccggctaattttttgtattttcagtagagacggggtttcaccgtgttagccaggatggtgtttttgttttgttttgttttgggctaggtcttggacaaaaagtcaagtcactagggcaaatacgttaaatagtttatcagctggtgccacagttcaccggacctttttttttttttttgaaacaagatcttgctctgtcatccaggctgtagtgcagtagcaccatcacagctcactgcactccggcttgggcaacaagagcaaaacttggtgt

SEQ ID NO: 27815 - DNA, 394 bp, Homo sapiens
ccttgagtgacgcacccttcatgttgtagccttcaatgatgcacactccatgttatagccttgaatgatataccctttatgctgcagcctttctcttatggggaaaagcctgcagatatcctgctgcttaactgacaagtgtggtgagaaataagtagaaatctaaagaggggaagaccattttggacacttatctgcaaggcagatccaacacacttttccagtagtcaagctacttctaattttgttcagtatcaaaatgagaaacaggcctgattctccagcactcttgtcaacacaacttccccccatatttatatatatacacacacatatatatctttatatatatacacacatatatatctttatatatatatatttatatatatat

SEQ ID NO: 27816 - DNA, 460 bp, Homo sapiens
cagagagagattagcataaccatgtggtggaagatttatggacagaaaaaggaaagttatgtaacagaaaacagaaattaggtacagaaacagccagattggttacagcttggtgtttgcctcatttgagcctggtttgaacagttggccacctttggccaaaactcagtgattggcacaaaagtcggttgcagtctgtttacacatggaaaggttacagtttactgtgcacagagaaaccattaggtcacatttagaatatataaggaggcagcattgggctaaacttgacaattgcttatttttgaaaactcaaagcattttcaattaagtttacaataattaaacatcaaatacgtaagtttcaaattaacataattgtcttttggagaatagttactcaaaaatgtctattgagtatatactatgtgcagacattgtccttattgtttgagattct

SEQ ID NO: 27817 - DNA, 146 bp, Homo sapiens
tttattgtacagtcagttctataaaatttctcttttgagttttatacctttgtagcattttagatgacattgtgtttgtactttgttgtgtagagtggaagaattgtgttgaataaacccaagatcggaatgcaaatctaaaaaaa

SEQ ID NO: 27818 - DNA, 483 bp, Homo sapiens
cacagtcaccagttttccgagaagcacagggaggggtgcatgtcaggcccagccctgcctgctgataccacctcacagacgcaggcgaaatgtcttcaccagcttcttctcggttgccaagggggcctgctttcaaggggttgttttgtatggggtgtgggtgttaaccagggagaggttcctggcaggagttcctgtcagatgccattttccattctggttacttgaaccggggtcctttttcatcctctacctcaggggccagagcttcctcatcaccctgcaccccctagcaagggaggtgcccgctacacggtccaaagtcctctccagacattcgggccctgcccgccttgctggagggctcaggagttcaccaggtttgcttccagaagagccaggctggggatgcctgcttgcaaatgcagcaaataaaaaataaataaataaataaaaatcacctttctcccccccccacccaaa

SEQ ID NO: 27819 - DNA, 404 bp, Homo sapiens
tttgcctgcctgggaaacaggcatcctcggagggctgtgcctccttgagtgcggggcagggatgcagtggcaggtcatggaaagagattatggcttaaaatcactaaaggaggccgggcacagtggctcacacctgtaataccagcatttaggggggccaaggcgggtggatccgaggtcaggagttcgagaccagcctgacgaacacggtgaaaccccgactctactaaaaatacaaaaattagctgggtgtggtggtgcacacctaaaattcccgctactcaggaggctgaggcaggagaatcacttgaacctgggaggcggacgttccagtgagcagagatcatgccactgcactctaccctgggcaacagggtagacctgagacagcgagactccatctc

SEQ ID NO: 27820 - DNA, 623 bp, Homo sapiens
atgttatgtagcatcaagagaaatctagttaataggagattctcatgttactccttttcttaaaactctgtgtcacctcattatctacagaggtggaacttactgtgctgtaaaaggccctcattgctctagggtggaatgaatgggccaaaatgtattttgaggaattctgagcttcttcactgggctttggttgttgttgattttcaaaagggcattgctttcaaacaaatatatttatatacatacatacacacgtgtgtttgtgtgtgtgtgtggtgtgtgtggagaatctatatatatattttggagatggagtcttgctaggttgcccaggctggagtgctgtggctattcacaggcaaggtcatagtgccctacagcccggagctcctggatgcaagtgatcttcctgcctcagcctcccgagtagctcatactgcaggtgcacaccaccacatttgaccaaatgaatatatttttaaaaataaaaaatgcctcagttttgagactgggtatagtagtatgtgcctgtaatcccagctacttaggaggctgagataggaggatcggttgagtccagaagtttgagaccaacctgggaaacatagtgagactgtctc

SEQ ID NO: 27821 - DNA, 1439 bp, Homo sapiens
tgcaagttcagattagagaggccactttcccagaatccacagctgcactaagctaaggagaagccagatgccggttactgggtgtgcaggggctgttctgagctggggggatcattgtgaaggccttcttccctgggcacctggtacctggggacctacaaggtggtgagggaagggtacgagtacattccttttccctctgacctgggcgctagcaagggcaaagaacccgagcctgccagcttggcctcctcccacagcctccctcggaggcatgccatgccaagcactctttctgtctctgttcatgaataaaagagatggatgggcttattcttatagagaagtgaatttcacttactcccctggcccgaaaactagaccaaatgaggaactgttttagctcatcaaactcatatattcctcctggcttccttacaaaacaagcctttcaaacaatcattgtcctcaggaaagttgttgagcttcctccagctgtgagaataagtcctaatctccagagaaatggtggggggaggaggaggcttattgcttcccagcatttggggggaacatgatccaacccctggcctcctgccacccatctgccctgctcccacatgctcaggtcccagggcacagaaaaagggcagactccctaatcacactaacatcaaaataaagaggctgggccgctgtgtagccaggacatgcccatgccaccgcctattgaacagttcataggagtggcagtaatctactgtgtgaggagagagggcaattaaaaagctgaaagagaaggaggccctctgtgtattccgttccctcctccttaatgcctccaagggtccttgcatccctagtctcctaaactccagctctgattcgccatcaacccatggagcaattccaaggccccagttacccatcacctccacaccaggtcaagttttgtctcagccccaaaggcactgacatttctagtttgccccctctgccctgaaccccacagcatgcctgtctcagctccctgtccctcggcacttccccaggctcatttgagcaggtgtgccttcgcagctcccctaaacttcccaggtgcctcatccataatgagataatgcatgtaggggaaaagtttctcaagaaggtggaagaggcagcaggacttggataaggagtacctgctggtcagccttgagatgcacaggtgaaggttagggtgagatgagaacatgccataccctggtgctgaatccctgaggggccagcttgccaggcttaagccaaatctgccttaaattgggggtggggaggggtaagtaaggaagtggggtttgtttttgtgttgttttcatcttcatctttgtattactagcatccagcagagtgcctagcacatactggatgctcaataaacttttgatgaaatgaaatga

SEQ ID NO: 27822 - DNA, 1022 bp, Homo sapiens
gatgaccccctccagcagctttggtgctgatgggaataagtcgacctgcagcggaagttcagcccaagtctcagcccagcagcctccccaaacctggccagggtctggtcatgctgccgtctctgcggttctctgtggagttgtggtttctgtaccttgaagagaacttccccttctgggacccagaaacccagtgaaccctcaggaaaaaagggaatgaaattactgaagacaactctgtggcagggagagggaaaagaggctctttgtttttgttttttattttttatttttttattttttgagacagagcttcactcttgttgcccagactggattgtagtggctcgatctcggctcactgcaacctctgcctcccatgttcaagcacttctcgtgcctccgcctccagagtagctgggacaataggcacacaccaccacacccagctaatttttgtatttgtagtagagatggggttttgccatgttgcccaggctggtctcgaactcctggcctcaagtaatccacctgccttggcctcccaaagtgctgggactacagatgtgggccaccgtgcccagccctcactgtatggattttctaaaaaaaaaaaaagattacatttgtcttacttacgttactcctctcctctcctttttaaagagtatttccttgataaaccttgtaatataaataacttcttttgtgcctttgatatgtacctaaatcttttaaaaaggtaaatgaacttcttgccaacattacaacccaggattttttttttttgagacagaatctcgctgtcacccaggctggagtgcaggggtataatctcggctcactgcaacctccacttcccaggttcaagcaattctcccatctcaacctcctgagtagctgagactacaggcgtctgccaccacgcctggctaatttttgtatttttagtagagacagggtttcaccttgttggtctggctggtcttgaactcctgacctcaggtgatccaccagcctcg

SEQ ID NO: 27823 - DNA, 171 bp, Homo sapiens
caaaatcgtttgctctctctttcctagttaacaggctttcaaatattagaagatcaatgttctgaccccattgaaatttctcttttgtggaatgaaaagctctgatttaacccatcttcaagcctggtttgcatattcctctcgaactcgtggcctcaggtgatcagcccg

SEQ ID NO: 27824 - DNA, 816 bp, Homo sapiens
caaaatcgtttgctctctctttcctagttaacaggctttcaaatattagaagatcaatgttctgaccccattgaaatttctcttttgtggaatgaaaagctctgatttaacccatcttcaagcctggtttgcatattcctctctcttccggccatcttgtctagacacactacactgaggccgtgcccatcgtaaatgatgttgatacgttgtcaaaaaattggcaaaccaggcgcggtggctcatgcctgtaatcctaccactttaagaagcagaggcagacagatcaccagaggtctcgaactcctggcctcaagtaatccacctgccttggcctcccaaagtgctgggactacagatgtgggccaccgtgcccagccctcactgtatggattttctaaaaaaaaaaaaagattacatttgtcttacttacgttactcctctcctctcctttttaaagagtatttccttgataaaccttgtaatataaataacttcttttgtgcctttgatatgtacctaaatcttttaaaaaggtaaatgaacttcttgccaacattacaacccaggattttttttttttgagacagaatctcgctgtcacccaggctggagtgcaggggtataatctcggctcactgcaacctccacttcccaggttcaagcaattctcccatctcaacctcctgagtagctgagactacaggcgtctgccaccacgcctggctaatttttgtatttttagtagagacagggtttcaccttgttggtctggctggtcttgaactcctgacctcaggtgatccaccagcctcg

SEQ ID NO: 27825 - DNA, 335 bp, Homo sapiens
caacacggtgaaaccctgtctttactaaaaatacaaaatgagccaggcatgatggggcatgcctgtgatcccagctacttgggaggctgaggcaggagaatcgcttgaacctgggaggtggaggttgcagtgagccgagactgtgccattgcactccagcctgggcaactagagcaaaactctgtcctaaaaaaaaaaaacaaaaaaaaaaaacaattatatatcaacaaaaaaaagaaaattttaaaaagtaacaatttgaaaaagtcaaataggcaatcaaaagtattcctttcaccagccactaaaaaggcacctgtacatgggaatggtag

SEQ ID NO: 27826 - DNA, 674 bp, Homo sapiens
ctggagtgcagtgctgcaatcacagctcactacagcttctaactcctgggctcaagtcatcatcccagctcagactctcgagtaactaggactataggttttatgaaaatctttacaacctatgcctgacctttgtgtaacgtaagacggggaaaggaaagatgtgcttcccctctgatcaatttaataaagacaacttagaattaagtaggtctgtttgcttatgagaagtgtaattctcagaagactagtgtcagttttaaatttgtgaaccggcaatcaagatccattttaagtcttgttttgtttttcttttctttctttttggacagtaatgaatgacaaacaaacatgttatttatttccaaacaatactggatgtagaagccaaatgtggtttttccttctctgggggtattcctaatgttgatataaaagtacaggctgggtgtggtggctcctgcctgtaatcccagagctttgggaggctgagcggggaggactgctagagggcaggagttcaagaccatcctgggcaacatagggagaccctgtctctaaaaacataaaataaaaaaaaaggaatacttcaaaaataaagtacattttcttcagcaaaatataaataaaacaatagcaccgtggtatagtagaaaagaaagaacgctggactc

SEQ ID NO: 27827 - DNA, 672 bp, Homo sapiens
ttcaaatacttgatggatacatgtggctagtggctaacataagggatagcacagatataaaacatttgctcgtcatataaagttctattggatagtgctggtctgtagcttataggatggtatcttagtctgcttcagctgctaaaacagaataccataaattaggtagcttaaacagtagatattttgaccaggcgtggtggcttatgcctgtattcccaaagtgctgggattacaggcatgagccaccgcgccgggcctatcatatgaattttgagggaacacaaacatgcagtctgtagcagatggtaataggctgacatattacacttgttgatgtaaatctgataggtttctttctctccaaggacagctttttaaatatttaacagtatcaataatttttcaggttctgtgagaattttataatttataatttgcagacttaatgtataatctattttgtcctaacaattacaaatatattttttatttcagattgtatatattcctaccagatggagataattacagctttaaaaatttttattttttcattttatttcacacattgacattaaatttttatggacacataataactgtacatatatatggggtagaatgtgatgttttaatacatgtactcaatgtgtaatgatcaaatcaggg

SEQ ID NO: 27828 - DNA, 476 bp, Homo sapiens
acatgaaggaatctcagtattgaggaatttgtaccagaaacctcgaagacctccttagcctacagtccaatcatggagtgtgtgtgtgtgtgtgtgtgtgtgtgtgtgtgttatacagtctattttgttttgtgcacatagttttaattgttttacctgtaaagtttcttctgtgtacttcccaattttagcgggtacttttaataatgaactagacctagaggttgggcgggtaactttcttggacaagataaacctggggagctgtagagtttaatggggacataccaactctgagactttcgcagacacaaaattgtctaacacttttaaattctttttaattctttaaggagttttctttttattttcagcaagtagaatatgtgctctttggcactgttcttactattctttcttctttggcattgtttgtacttgcaatatcatagtattcagtaagtaaagaagatgga

SEQ ID NO: 27829 - DNA, 532 bp, Homo sapiens
aagatgttggaaaagcttcagagaccaaaaaagaaaagctaaaggtatttaatttggtcatatcaacatgactgtgtcatttatatcaggcacttacccataggccctatagaaacaagcatgagtattattaaaagcattcatagacctccagtaaactttatttggttttaactctaaaccctaagtatgtttttttcatagttgattcttcttctaataacattcattaaccagaatttatggtatttattttggctaatatttactgagctcttgccatatgacaggcactgtgtaaacactttaattgatatctaatttaatcttcaccacgatctttgaagtagaaatcattgatattcttattttgtagattagggaatcaaggcacaaaaaggttaatcaactcacccaggttacactacatgaaacagggatagcgaggaccagtactcaagcaatcgccagatcacaactttaaatctttcatgatcactctaacttcagccctgaatgtgcagagataaga

SEQ ID NO: 27830 - DNA, 517 bp, Homo sapiens
cggtaaagggctaatagctaaaactgtggattgtgtctagattctttacctaacccaatggtttgctggcatttaggttagtgtctttataaagagctagctctcattgggagagttgagccagagcaaccatagtaaacatagcttactgataatagcaattacgtagggataagataacattctctcacttacctaaattttaatgtgtcctgttacataggttaatttgtgcttggaaatgaattttagttaagtgagaaatacctgttgtttgctttctgacattatagtaatatgtacagagaataatttaaaattataatttatgggtctttaaaaggttttgttcctaacaacatttataaaaatttattgtactattgtaaagttttttatatatgggtttttttccagcctcaaattcttttgtgacttggaagagtattatggacagaagcttgggtactgcttaaaatttatgtttttagaagtagaacttttatttaaaaaaaaa

SEQ ID NO: 27831 - DNA, 917 bp, Homo sapiens
tggttgtttactttctgctcagggcttgctatttcagcaacactaaactgcctgcaatgaccacaggttgttaccctctactattgttgactggagtcacctcccgttgttaatgtctgttgttattgtctgggccattccttgctgttacttgcctcattgactttgcatttcctttccttagaaggctacatctctcttctatgccctgctcagttaacttgtttgttctggaagactgcttttgaaatggtcttccccaggaagacttttctgactttaccctttcctcttcctcttaatctttgtttcaactaactgattctcagtagttgattgagagtatgtccagagaaggggattgtgtagctgtagtgtccaatacagtgtctgatatgcagtaggcagtaaatgtttattgactgtattaacagattaaggtactcccaaattgtgatacttttgtcaatgaaaagtgtcaaactctaaaatattctaagagatttattctgagctaaatgtgagtgaccatggctcatgacacagccccaggagatcctgagaaaatgtgcccaaggtggtcgggctacagcttggttttatacattttagggagacctaagccatcactcagtacatgtaagatgtacattgatttggtctggaaagctgggacaactcgaagggtgaggggggcggtcttccaagtcacaggtggattcaaagatttgctgactggcaattgggtgagagttcatttaaatccctggaatcagtagaatggagtgtctaggttaagataggggtgtggaggctgggcacagtggcacgcgcctgtaatcccagcactttgggaggctgaggcgggtggatcacaagctcaggagatcgacatcattctggctaacatggtgaaa

SEQ ID NO: 27832 - DNA, 399 bp, Homo sapiens
cataactgtcacatcaaaaaagaaatcaaagagaaatcagaaagtactttgaaatgaataaaaatgaagacacagtataagagaatttaagagatgcatctaaagcaaacttagagggagaaggggagaattatagctctaaatgcctatattaagaaagaaatctcaaataagtagcctagccttctactgtaagacactcaaaaaagaagagtaaaccaaactcaaaggaagcagaagaaaggaaataataaagattagagaagaagttgatgaaatgaaattaattaaataatactaaaacagtagagaaaaatcaatgaaaccaaaaactagtcctttgaaaataacaaaattgagaaattttagctagattgaccaagaagaaaaagagaagac

SEQ ID NO: 27833 - DNA, 286 bp, Homo sapiens
actggtatgattttccagaacaagtgctccacaacataaatatcataataccatattaaactaaactaaaaccacaacataataccataatcccaccagaatggctaaaacttgaaagatagataataccaagtttgggcaaggatagagcaactaaaaatctcacactgctggtaagatgtaactggtacaaatgcttgggaaaattatttggcaatatctactaaagctgaacataacctacaacccagcacttaattccacttctaagtacctacctcagaga

SEQ ID NO: 27834 - DNA, 399 bp, Homo sapiens
gaaaaaaaaattgactctaggaaacaaaacatcttatttaccaaaaacgtactcaagtcatgtatactaagaggcatttgagttactttttatttttctgaggagatatttaatttaggccaggagcagtggctcacgcctgtaatcccagcactttgggaggccgaggtgggtggatcacaaggtcagaagatcgagaccatcgtggctaacacggtgaaaccccgtctctactaaaaatagaaacaattagccgggtgttgtggcgggcgcctgtaagtcccagctactcgggaggctgaggcaggagaatggcatcaacccgggaggtggagcttgcagtgagctgagatcacgccactgcactccagcctgggcgacagagcgagactctgtctc

SEQ ID NO: 27835 - DNA, 614 bp, Homo sapiens
caacttctgggctcaagcagtcttcccacctcagcctcccaagtagctgggactccaggtataagccagtgcattattgaacccatctgctccacgtgtctggactggggcacctcagcagccagtgtttctctccagaacactggaaagcacagtacccaccgaagcctgtggagcaggcactctacacagatgagaataccacagctccaagagatactgcagaaagaggttagggaacttcccggggatgcacaggtactaagaggcctgtctgatgtcattgcatcttcctgcggatgctgtgacctttgccccgtcttcgtgtccttgatttctctatagaggctgatccagaaccttctgccttctgaagctgcgtccagtcttttccctttcgtggtgcctggcccttctccggcctcctcagccagccttcccatcttcctcatgagctcttcttcctaaagatcttgtattctattactcagaggtcagcagtcgcttctgactttttagtatgaaaaaaatcaatgtcttttgagcaatccattctagacttatatataaaatgaaggtgtatttgtgctgtgtctaaaagggaacccattctc

SEQ ID NO: 27836 - DNA, 446 bp, Homo sapiens
taatttttttatttttagtagagacggagtttcaccatgttggtcaggctggtcttgaactcttgacctcaggtgatccacccgcctcggcctcccaaaagtgctgggattaaaggcgtgagccactgcgcccggcctacctcctgtcttatatctgagatatccagaggacccttgagaccttctccccagaaccttcacctccttggagtccaaggtcgactgttaacaggctgtacaggttataattagtacctgcttgttcctgccagaactttgagacgccaggtttacgacgtgcctgtgagaagccgggcatccagcctaggaactgccttttgtcccgctgctctctatggatcccaacctgaaggggctaccctcaggagtgagtgataccttgcagacgcgtaggtgtcctcttgagtccccagacctcagcacca

SEQ ID NO: 27837 - DNA, 1272 bp, Homo sapiens
tataagctacccacgtacttggtgctttaccccaacccttccaacagtgctgtgaggttggtattatttcattttttagatgagaaaatgggagctcagagaggttatatatttaagttggtgcaaaagtaattgcaagttttgccaccgaaaggaatggcaaaaccacaattatttttgaaccaacctaataatttaccgtaagtcctacatttagtatcaagctagagactgaatttgaactcaactctgtccaactccaaaattcatgtgctttttccttctaggcctttcataccaaactaatagtagtttatattctcttccaacaaatgcatattggattaaattgactagaatggaatctggaatatagttcttctggatggctccaaaacacatgtttttcttcccccgtcttcctcctcctcttcatgctcagtgttttatatatgtagtatacagttaaaatatacttgttgctggtactggcagcttatattttctctcttttttcatggattaaccttgcttgagggctttaacaattgtattactttttcaaagaactaagctttagcttcattgatttttttctatttaattgggttttgctcttctctttagcattggaaacatagaaatgctttctgatttctttgggtagatttacgtattcagcttcttgagatggaagtttagatcactgatccttcagcttgttttcttttttgtatacatagattttaggacgatatattttcccttgagttctgctttagctgcagctcttatgttttgatatgcctctctttattatccttcagttaaaaatatctttcaattcattgttatataaaaatatgtgcctagtttttaacatctggagattttctagttttgaaaaaaacataagccaggcatggtggctcacacctgtatccccagcactttgggaggccgagacgggaggatcgcctgagctcaggagtttttacaccagcctgggaataacagtgagacattatctccaaaaaaaattacctgggtatggtgttgtgcacctgtagtcccagctactctggagactgaggtgggaggattgtttgagcttgggaggttgaggctgcagggagctgtgatcacaccactgcactctggcctgagtgacagattgagaccctgtctcaataaaagcaaaaataaagaaaataaaccatatgtgttgaacaaagaattaataaattaatttgagactccttcagggaatga

SEQ ID NO: 27838 - DNA, 111 bp, Homo sapiens
tcatttccctctcttccctctctcatttactgtgtgctaactggggctaatactcaaaatgcttaacaatgtagatggcactggccaatcaaaatggattctggccataaa

SEQ ID NO: 27839 - DNA, 312 bp, Homo sapiens
ttttgagatggagtctcactgtcacccaggctggagtgtagtgctgcgatcctgactcgctgcaacctccacctctggagttcaggtgattctcctgcctcagccttccgagtacctgggaatacaggaatgcaccaccatgcccggcgaatttttctattttcagtagagacggagttttgccatgttggccaggctggtctcgaactcctgaactcaggtgatccacccgcctcagtctcccaatagattacatatattattaatgaattgcttcctttaacaccctattcattgaattttccagtaaac

SEQ ID NO: 27840 - DNA, 406 bp, Homo sapiens
ggagttgaaggccagcctggccaacatggtgtactaaaaatacaaaaattagcggtgatgggcgcctgtaatcccagctacttaggaggctgaggcaagagaatcgctcgaaaccgggaggcagaggctgcagtgagctgagactgcaccactgcactccagcctgggagacagagtgagactctgtcttaaaaaaaaaaaagagagcgagagagacaagtaaattatactgaaagaagtagagttttaaccatgactgtcttctaagcaacggtcaaacaaattacaagcatagagacaagagagatactatgacacttatagctgcaaatggctcttcactctacagagcctctcaataaagctttttatttttctagccaggcatggtggcacatgcctctgg

SEQ ID NO: 27841 - DNA, 486 bp, Homo sapiens
ataagtcctgacctggcatggtggatcacacctataatcctaacacattgggaggctgaggcagatggatcacttgtgcccaggagttcaagcctgggcaacatggcaaaaccctgtctctacaaaaataaaaataataataagctggcatggtggtgtgtgcctggagtcccagctacttgagaggctgaggtgggaggatcacttgagcctgggaggcagaggctgctgtgagctgataaaagaagaaatgatgagtcctatacaaaatgttaggaacacattctcaaagtccagccataacttgactatcacttgggtgaaataagtttgttacctttccacagtacccaatatttccaatattactcatctgttgtagcactttcttacttaagtccaggttaaatgctttttttaagttacgttaaatataactttggagagcagactctaattctccatacaaaagggaaacctgtagaa

SEQ ID NO: 27842 - DNA, 690 bp, Homo sapiens
tctgaagatgtattaggaattagtaatttgggtattggcaactttcatggttctgtgagaagaggccctaaattgaattgatttggatgggtggagggggacatttttcatttttgtcttacacttactgcttttctcaaaagtgacacattttaattaaattcttgattcaagataatagcatgaggaacttgtctgtcatccatagttacagtctcctttcttgacttatcatagtagctaataaagcaattccaattttagtatgcttataattgttccttggaataacagaacagtaaaaagaacaacagaacattgctgatgatgccagcttagtatccataagtttttccatttatggaaagcaaaggtagcttcagagatatgtttgcaatcccagttcagtttttaatttttctttttctttttggataagttgggaagtcttgttctataatataatgttataaaataggttcatgtaaagctaccaaccttaataggatcttttaatgttcatacagttaacatctcttctttaaaataatctcttattggtgggattagtattcaatggggaattcctcactaatttttggatattattataaaaagcatgtctccaaatagagataatgggctaaggatatgaacaggcatttcacagagaagtacattcaaatgacc

SEQ ID NO: 27843 - DNA, 558 bp, Homo sapiens
atcaatccagaggcacttcctcctccaagaagcaccaggtctaagtaaataaagctcctttggagggttccagcacaatccctccccactgggaacttcacacagagaaacctgactggcctttctagagccctctactgcgtcaggcatagccctgggcctggtgagtggcaggtggcctttcttccccacctgcctaaggaagtcagccgaacaggtcctcccactgctggggcccctgggctctcaaggaaactgagtcaggtaaaactagatcagagatgggcatgtggggccatcacctgaactgccgtggctgcgccgcggacgggcccagaagaccgagggctcctgacatcttcccaagtggaccctgcgggagctgcgcttcagaatcgttgctcacaacacagggcaggtctcgagtctgaggccccaccgcacccatgggtgcccccttctgtcatctgctcattgaaccgcggggctgctgtgactgtgagagctgctgccccgtgtgctgcctgctggcccggcccacccagtggggccatcaga

SEQ ID NO: 27844 - DNA, 443 bp, Homo sapiens
atgtggaccgggtcgacggaaggaatgaatgcggtcaggacgctggctggagaatgtctgagatggccacttgcagagaggagcaggctggctgcgtctctcactgtgcctgggatggtcgctgacagaggaaacggataccacataagagtcagagacacccaatgaagaaacaaaagcagtttacaggatgaaaagtacacagacacggacactcagaagaatgtggccaagggaccgccactgtgtatgcactgaagaggttccctaagaatgcggccacgggactactgccatgtacacactgaagacgttccctaagtatgcggccaagggaccaccgccatgtacacactgaagacattccctaagactgtggccaagggacctccaccatgtacacactgaagacgctcccaaagaatgcagccaaaggacggcac

SEQ ID NO: 27845 - DNA, 439 bp, Homo sapiens
gataacaagcttttggaagagttacagtatttgtccagcagtgaggggcaaaacataagggtcttcacagacttttccttcagctcgtagttgtcattaaacatgtaactctgtctattgtggtggcaggtttcttcacaatctcttagggtagttttgagtattccagaaaataacccacgtaagatacctggcacacacttggcacctaggctgagatcagtattagtaccttgctttcattttctccctataacctagaaccatttcaggaaaagcagaatgccattgagcagtttattttctttgaatgttcttactgcccttttctatactccggtatcatgagatcgtgacattcgttcactcattcactaacagttcactgttcccttgtgagttggaacagaaaagtggtggaagcagtgacttagtcctt

SEQ ID NO: 27846 - DNA, 462 bp, Homo sapiens
atagacggtgctatggaaatggaagtagttggggtgacaaaaaataaaaacgcaaaatgttatacggaatttacataacaacatggaggttcaaatcacagaagaggtactgtgacagcacatgacattgctaaatcaatgatagagatgatgatgccatataaattcaaagatggggccaggcgtggtggctcatgcctgtaattccagcactttgggagggcgatgcaggcagatctcctgaggtcaggagtttgagaccagcctggccaacatggtgaaaccctgtctctactaaaaatacaaaacaattagcggggtgtggtggtgcacacctgtagtcccagttacttgggaggcttaggcaggagaattgcttgaacccaggaggcggcagttgcagtgagctgagatcacaccactgcacccagcctgggcgacagagtgagactctgtctcaaa

SEQ ID NO: 27847 - DNA, 382 bp, Homo sapiens
aaggtttttttggtgggagaagtatagcaaatgtaactgcaattcacacaggttctctcaactttttcaataaaaccgattctagactctagagcagaagggtaagttattttctcctccttcaaacacccagtcctggaagtccccaacctgtagttgtcatggggacccaataagagacattctgtctcctattctcttcatacttcctccgacggaccggaatgcaagttcctccttctcttttcccactcagttttccaatagtgacctcagctccaatgcgctgactcctccagtctccggggctctggatcttctccctcaacattcgtttcctctcagagttcgtaccccaagccccttcgtccgagttccatta

SEQ ID NO: 27848 - DNA, 415 bp, Homo sapiens
caaatctggaggcatgcactacctgatttcaaactatactataaggccatagtcaccaaaacaacatggtactggttgaaaaacaggcatatagaccaatggaacagaacagagaagccagaaataaaccccaaaacttacagccaactgatcttcaacaaagcaaacaaaaacataaagtggggaaaggacatcactttcagcaaatgttgctggtataattggcaagccacatgtgggagaatgaaactggatcctcatctctcaccttatacaaaaatcaacgccaaacgaattaaggacttaaacctaagaactaaactataaaaattctagaagataatgttggaaaaatccttctagacattgggttaggcaaagatttcatgacaaagaacccaaaagcaaatgcaat

SEQ ID NO: 27849 - DNA, 537 bp, Homo sapiens
agccttgatcttttttatcttttattgcttttccttgactaagagaatttggttttggtaaagctaaatgaatttagaataaagtcatttatttgtgtcatacgtaagcttgattaagaaggtttttatggccaagagccatggctcatgcctgtaatcccagcactttgagaagctgaggcaggaggatcacatgagtcttggagttcaaaaccagcctgggcaacatagtgagatcttgtctctacaaaaaataaaaataaaaaaaatagcaaggcatagtggcctggcattgcactccggtgatcacaccattgcactccagccctgggtgacagagtgagatcctgtctcaaaaaaacaaaggaagattttttttttttctatttagaaagagagtgcataaaagagaaaccataggcagggacagtacctcatgcctgtaatctcagcactttggcagggcaaggcaagcggatcgcttgagtctaggagtttgagagaagcctgggcaacatagagagacctcatctctcc

SEQ ID NO: 27850 - DNA, 258 bp, Homo sapiens
ggcagagagttttcttttggggtgatgaaatgttttggaactagatagaggtggtgtttgcacaacattgcaaatggactaaacgtcattgagagagttaattttacattatgtggatttcaacttactaaaaatgaatgccagagtggcagctgagcctcctcactccacacccaccctcctctgcatcctgcagataggcccttcacccttatggtctgcaagactgagagagacatgccttctccatacctgtca

SEQ ID NO: 27851 - DNA, 482 bp, Homo sapiens
gtcccctcattgtgatttctgctgccactgtctcgaacattcttcaggaagactgttttgctttaaaacttcaggcccagcagagacatgcaccccgtactgtgttcctagtacagttaagactctctacagatataccaacccatgaggaagatagatggaggtgaatacagattgtatgtagatcatataggggtctaatcgtgtatggagcagtaaaggatatatatgttataaaacatgggatccagatctctatagctttttaaatatccaaggactgatcagtactttggcagacaactctgattataattgaaaaccatcattgtatacatgaagaactctttcttctaaccacagagtgccatgtttataatctgattaagaaatagtcttctgcatatagccaagatgaagactcctactaggtaaaggcaaccttgaactgtctactcaaataaacactatcaaaaatgtac

SEQ ID NO: 27852 - DNA, 535 bp, Homo sapiens
ggaaacacaaaaccacagaattgtaaagcaaaaaactccacctaatcttccttaaatttatagacttttaatctgtggcatttcatttctgacagtctgaagtcccatgacacaatgtcatgtccattgtgaataaaggtaaaagaattcagtctctttcttccttcctaatagaagctccaaatgctggagcatagagcatacagcagtttgccttccttgttagagccgatttacatagagccgatttacagctcaacaagctgtgcagattgagttaatacctagaactgtcatgggtttttatattgctgctttgtagagttgtcacagttgacgggcccttgtgatctttgaacgtcctgctgagtctagctatgaccacgttgctaaacgtaaagctctaggtgccacacacaccacaaagagtgcttttctcactttgatttccttcccatgacatctgtcccctaacctcattatttcttgaaattttgttatattcccacacatctattatagtatgtaaaatttt

SEQ ID NO: 27853 - DNA, 742 bp, Homo sapiens
gaggtttgtgcccagttggggcacctactttacccttgtgcatatcccctatttatctgtgcccaggacattttgcgtgggctacgtgtagaggtggtggccatacatagttatctttattctggcataaatcagatgtcacgttctcttttgccatatgtaataatcaagagtacccaaaagtgggtcttgaaatataattgtttctgagaggaacttattctcaggatatttttgtaagagggacaaaactacttaacagtgtgtatccttgcaataagtatattaatgaatacgatacaaccattttatacaggcaaaagatggtttaatgccaaagcacaaactcataaacccagttgatgaggagccagaacaatggtcattactgtatagagatgttttaaaaagtcaccatataagctttgaaataattctaatgaaaattatatgaccttgaggctgggcgcggtggctcatgcctgtaatcccagcactttgggaggccgaggtgggtggatcacaaggtcaggagatcgagaccatcctggccaacatggtgaaaccctgtcactactaaaatacaaaaaattagccgggcatgatggtgcatgcctgtagtcccagcttcttgggaggctgaggtgggggaatcgcttgaacctgggaggcagagattgcagcgagccgagatcacgccactgcactccagcctgacgacagagtgagactccgtctcaaa

SEQ ID NO: 27854 - DNA, 939 bp, Homo sapiens
gattatttgatagtaaagctttaaccttttatagagaactttgatttagagtaattttttggtcttatatattctttcctaaatttagaccttaaatcatacatgtgcatcttttgcacatggctgtgcagtttggatttttgcatgggacttatgaatagtcagctaataaaataagagtaaccttaatgccaaaatctatacaaatgagcagaggaaagaaagggcagtataaattatgtgtaagactttctaagtccagctctatgagcaagtcatgaaaatgaggcacttatgtgctcaaagcaagaaatagagggagaagaaataaattggtactgtgaagaggtacctaatccttcttaatatctaattttttatgggacatatcgtggttgaatacagatttcctgtggataagaagtcagatgggagtggtttgttttattctttgtattaacaagtatagggggtgatttttaattacgacatattgtttgactgaaaatgttttgttgtgactcagttctttttttttctcctagtactgtgaatatatgcctgatgttgctaaatgtagacaatggttagagaagaattttccaaatgaatttgcaaaacttactgtaggtatgaacattttttttcttgcattaaacttctgtacctgagacaaatgcatgtatggcattattctaaagataggaaagtcctcctttagtaggatattacagaattaacatttatctgttagctgtttaagttctctctgagataggataggtctgaatatcaactttcttacataaaaaagtaaatgggccgggcgcagtggctcacacctataatcctagcagtttgggaggctgaggcaggcggatcacaaggtcaggagatcaagatcatcttggctaacacagtgaaaccccatctctacta

SEQ ID NO: 27855 - DNA, 2488 bp, Homo sapiens
agcggtttgtctcgcgggagcgctgctggcggtcgggcgctcgggcggccctggccggggagacgagttgcatgtgttggttcagctggcgatagcggcgggagcggagccggcggggcctgtgcgaccgcctgggtttgtgaaatggctgctgacatttctgaatccagcggggctgactgcaaaggagacccaaggaacagtgccaagttagatgccgattacccacttcgagtcctttattgtggagtctgttcattaccaacagagtactgtgaatatatgcctgatgttgctaaatgtagacaatggttagagaagaattttccaaatgaatttgcaaaacttactgtagaaaattcacccaaacaagaagctggaattagtgagggtcaaggaacagcaggggaagaagaggagaagaaaaaacagaagagaggtggaaggggtcaaataaaacaaaaaaagaagaccgtaccacaaaaggttactatagccaaaattcccagagcaaagaagaaatatgtgacaagagtatgtggccttgcaacttttgaaattgatcttaaagaagcacaaagattttttgctcaaaaattctcctgtggtgcctcagtaacaggggaggatgaaattatcattcagggagattttacagatgacataattgatgtcattcaggaaaaatggccagaggtagatgatgacagcatcgaagatcttggagaagtaaagaagtgaatttgaaaatttgtctgtatttaatggcctgaactgagagttgatatggccaaagggagagaggccttttaaaatatatatatatatacacatatatatgtatatatacacatatatgtatgtatacacatatacacatgtatatatacatgtgtgtatgtatacatgtatatacatatatacatacacatatatgtatacatatatacacatatatgtatacatatatacacatatatgtatacatatatatatattctacagtaaaactgtagactgtcctcgtccttggcattttcactgttctgtacaaggctgcttgtttttttattgccaaagtcaaataaacgggagactgtcatgctcatgcatgaatagaatttagtcaaataaaaaattttggtcatttggtactgactttctctctctctctctctctcttttttttttttgacagagtctcgcactgttgcctgggctggaatgcagtggtgcgatctcggctcactgcaacctccgcctcccgggttcaagtgattctcctgcctcagcctcccaagtaggtgggattacaggcgcccgccaccacgcccagctaatttttgtatttttagtagagatggggtttcactatgttggccaggctggtctcgaactcctgacctcgtgattggcccacctcagcctcccaaagtgctggtattacagatgtgagccaccgcacccagcctgagtttctctttctctctttttaactttattttttgaaaaacccggtagactttgtggggagcatttttgttgataattttactgatctaaagctgagtgattttttaaaagaatttgaatttggcttcctcaccagtaatatgtctccttgcttctttgatgtgatagttttgagatgggtgagaatctaatagatctgtggttgaatttgctgtgttgttatgaagtccaccctgtgggcacaataacataactgttggtaggagttgtttgagctattctggagattatttggtaaagtatactaaaagccttaaaaccatgtatgtgcgctgtttgaaccagtaagccacttctttgacattagaagacattagaagaaataatcagccttgcataaaacttatggatgaaagtattcatcaccaatattatttataataaaaaattgcaaatgttataaatgaacaattgggaaatggttaaagaagtgatggtgcattgtgtggtagaatattatgcatatgtttaaagaatcatattttctaagattatttggaagcatgtttggtaatgtcaagtggagtaccccagatacattttagacatttatcgtcatcatctgctctgagtggaaggccgttcagagaggctagaggttcttattctggctataaattatgtgagtaaaattgtgctaaccagttaaaagtactgtacacccatgctcaatatatagtcctggaaatagcaattgaaacatgtcttctcacaagagaaaatgacagttttaatgatgtatttgatgaatttaaactttaagtcaggtgctgcaaattggaaagaagacttgtggtgttttaagttgctgtggacacttttaagaaacttagaacccatggaacccttgtttatcgccatgcaaattacaatcttgaatgagtgttttttaaaaataaagtattagaaaaatgtgtagtaaagatgtaaattaaaaaatggaattctccattaa

SEQ ID NO: 27856 - DNA, 2763 bp, Homo sapiens
gattatttgatagtaaagctttaaccttttatagagaactttgatttagagtaattttttggtcttatatattctttcctaaatttagaccttaaatcatacatgtgcatcttttgcacatggctgtgcagtttggatttttgcatgggacttatgaatagtcagctaataaaataagagtaaccttaatgccaaaatctatacaaatgagcagaggaaagaaagggcagtataaattatgtgtaagactttctaagtccagctctatgagcaagtcatgaaaatgaggcacttatgtgctcaaagcaagaaatagagggagaagaaataaattggtactgtgaagaggtacctaatccttcttaatatctaattttttatgggacatatcgtggttgaatacagatttcctgtggataagaagtcagatgggagtggtttgttttattctttgtattaacaagtatagggggtgatttttaattacgacatattgtttgactgaaaatgttttgttgtgactcagttctttttttttctcctagtactgtgaatatatgcctgatgttgctaaatgtagacaatggttagagaagaattttccaaatgaatttgcaaaacttactgtagaaaattcacccaaacaagaagctggaattagtgagggtcaaggaacagcaggggaagaagaggagaagaaaaaacagaagagaggtggaaggggtcaaataaaacaaaaaaagaagaccgtaccacaaaaggttactatagccaaaattcccagagcaaagaagaaatatgtgacaagagtatgtggccttgcaacttttgaaattgatcttaaagaagcacaaagattttttgctcaaaaattctcctgtggtgcctcagtaacaggggaggatgaaattatcattcagggagattttacagatgacataattgatgtcattcaggaaaaatggccagaggtagatgatgacagcatcgaagatcttggagaagtaaagaagtgaatttgaaaatttgtctgtatttaatggcctgaactgagagttgatatggccaaagggagagaggccttttaaaatatatatatatatacacatatatatgtatatatacacatatatgtatgtatacacatatacacatgtatatatacatgtgtgtatgtatacatgtatatacatatatacatacacatatatgtatacatatatacacatatatgtatacatatatacacatatatgtatacatatatatatattctacagtaaaactgtagactgtcctcgtccttggcattttcactgttctgtacaaggctgcttgtttttttattgccaaagtcaaataaacgggagactgtcatgctcatgcatgaatagaatttagtcaaataaaaaattttggtcatttggtactgactttctctctctctctctctctcttttttttttttgacagagtctcgcactgttgcctgggctggaatgcagtggtgcgatctcggctcactgcaacctccgcctcccgggttcaagtgattctcctgcctcagcctcccaagtaggtgggattacaggcgcccgccaccacgcccagctaatttttgtatttttagtagagatggggtttcactatgttggccaggctggtctcgaactcctgacctcgtgattggcccacctcagcctcccaaagtgctggtattacagatgtgagccaccgcacccagcctgagtttctctttctctctttttaactttattttttgaaaaacccggtagactttgtggggagcatttttgttgataattttactgatctaaagctgagtgattttttaaaagaatttgaatttggcttcctcaccagtaatatgtctccttgcttctttgatgtgatagttttgagatgggtgagaatctaatagatctgtggttgaatttgctgtgttgttatgaagtccaccctgtgggcacaataacataactgttggtaggagttgtttgagctattctggagattatttggtaaagtatactaaaagccttaaaaccatgtatgtgcgctgtttgaaccagtaagccacttctttgacattagaagacattagaagaaataatcagccttgcataaaacttatggatgaaagtattcatcaccaatattatttataataaaaaattgcaaatgttataaatgaacaattgggaaatggttaaagaagtgatggtgcattgtgtggtagaatattatgcatatgtttaaagaatcatattttctaagattatttggaagcatgtttggtaatgtcaagtggagtaccccagatacattttagacatttatcgtcatcatctgctctgagtggaaggccgttcagagaggctagaggttcttattctggctataaattatgtgagtaaaattgtgctaaccagttaaaagtactgtacacccatgctcaatatatagtcctggaaatagcaattgaaacatgtcttctcacaagagaaaatgacagttttaatgatgtatttgatgaatttaaactttaagtcaggtgctgcaaattggaaagaagacttgtggtgttttaagttgctgtggacacttttaagaaacttagaacccatggaacccttgtttatcgccatgcaaattacaatcttgaatgagtgttttttaaaaataaagtattagaaaaatgtgtagtaaagatgtaaattaaaaaatggaattctccattaa

SEQ ID NO: 27857 - DNA, 2434 bp, Homo sapiens
agcggtttgtctcgcgggagcgctgctggcggtcgggcgctcgggcggccctggccggggagacgagttgcatgtgttggttcagctggcgatagcggcgggagcggagccggcggggcctgtgcgaccgcctgggtttgtgaaatggctgctgacatttctgaatccagcggggctgactgcaaaggagacccaaggaacagtgccaagttagatgccgattacccacttcgagtcctttattgtggagtctgttcattaccaacagagtactgtgaatatatgcctgatgttgctaaatgtagacaatggttagagaagaattttccaaatgaatttgcaaaacttactgtagaaaattcacccaaacaagaagctggaattagtgagggtcaaggaacagcaggggaagaagaggagaagaaaaaacagaagagaggtggaaggggtcaaataaaacaaaaaaagaagaccgtaccacaaaaggttactatagccaaaattcccagagcaaagaagaaatatgtgacaagagtatgtggccttgcaacttttgaaattgatcttaaagaagcacaaagattttttgctcaaaaattctcctgtggtgcctcagtaacaggggaggatgaaattatcattcagggagattttacagatgacataattgatgtcattcaggaaaaatggccagaggtagatgatgacagcatcgaagatcttggagaagtaaagaagtgaatttgaaaatttgtctgtatttaatggcctgaactgagagttgatatggccaaagggagagaggccttttaaaatatatatatatatacacatatatatgtatatatacacatatatgtatgtatacacatatacacatgtatatatacatgtgtgtatgtatacatgtatatacatatatacatacacatatatgtatacatatatacacatatatgtatacatatatacacatatatgtatacatatatatatattctacagtaaaactgtagactgtcctcgtccttggcattttcactgttctgtacaaggctgcttgtttttttattgccaaagtcaaataaacgggagactgtcatgctcatgcatgaatagaatttagtcaaataaaaaattttggtcatttggtactgactttctctctctctctctctctcttttttttttttgacagagtctcgcactgttgcctgggctggaatgcagtggtgcgatctcggctcactgcaacctccgcctcccgggttcaagtgattctcctgcctcagcctcccaagtaggtgggattacaggcgcccgccaccacgcccagctaatttttgtatttttagtagagatggggtttcactatgttggccaggctggtctcgaactcctgacctcgtgattggcccacctcagcctcccaaagtgctggtattacagatgtgagccaccgcacccagcctgagtttctctttctctctttttaactttattttttgaaaaacccggtagactttgtggggagcatttttgttgataattttactgatctaaagctgagtgattttttaaaagaatttgaatttggcttcctcaccagtaatatgtctccttgcttctttgatgtgatagttttgagatgggtgagaatctaatagatctgtggttgaatttgctgtgttgttatgaagtccaccctgtgggcacaataacataactgttggtaggagttgtttgagctattctggagattatttggtaaagtatactaaaagccttaaaaccatgtatgtgcgctgtttgaaccagtaagccacttctttgacattagaagacattagaagaaataatcagccttgcataaaacttatggatgaaagtattcatcaccaatattatttataataagcattgtgtggtagaatattatgcatatgtttaaagaatcatattttctaagattatttggaagcatgtttggtaatgtcaagtggagtaccccagatacattttagacatttatcgtcatcatctgctctgagtggaaggccgttcagagaggctagaggttcttattctggctataaattatgtgagtaaaattgtgctaaccagttaaaagtactgtacacccatgctcaatatatagtcctggaaatagcaattgaaacatgtcttctcacaagagaaaatgacagttttaatgatgtatttgatgaatttaaactttaagtcaggtgctgcaaattggaaagaagacttgtggtgttttaagttgctgtggacacttttaagaaacttagaacccatggaacccttgtttatcgccatgcaaattacaatcttgaatgagtgttttttaaaaataaagtattagaaaaatgtgtagtaaagatgtaaattaaaaaatggaattctccattaa

SEQ ID NO: 27858 - DNA, 1925 bp, Homo sapiens
gattatttgatagtaaagctttaaccttttatagagaactttgatttagagtaattttttggtcttatatattctttcctaaatttagaccttaaatcatacatgtgcatcttttgcacatggctgtgcagtttggatttttgcatgggacttatgaatagtcagctaataaaataagagtaaccttaatgccaaaatctatacaaatgagcagaggaaagaaagggcagtataaattatgtgtaagactttctaagtccagctctatgagcaagtcatgaaaatgaggcacttatgtgctcaaagcaagaaatagagggagaagaaataaattggtactgtgaagaggtacctaatccttcttaatatctaattttttatgggacatatcgtggttgaatacagatttcctgtggataagaagtcagatgggagtggtttgttttattctttgtattaacaagtatagggggtgatttttaattacgacatattgtttgactgaaaatgttttgttgtgactcagttctttttttttctcctagtactgtgaatatatgcctgatgttgctaaatgtagacaatggttagagaagaattttccaaatgaatttgcaaaacttactgtagaaaattcacccaaacaagaagctggaattagtgagggtcaaggaacagcaggggaagaagaggagaagaaaaaacagaagagaggtggaaggggtcaaataaaacaaaaaaagaagaccgtaccacaaaaggttactatagccaaaattcccagagcaaagaagaaatatgtgacaagatatgttggccaggctggtctcgaactcctgacctcgtgattggcccacctcagcctcccaaagtgctggtattacagatgtgagccaccgcacccagcctgagtttctctttctctctttttaactttattttttgaaaaacccggtagactttgtggggagcatttttgttgataattttactgatctaaagctgagtgattttttaaaagaatttgaatttggcttcctcaccagtaatatgtctccttgcttctttgatgtgatagttttgagatgggtgagaatctaatagatctgtggttgaatttgctgtgttgttatgaagtccaccctgtgggcacaataacataactgttggtaggagttgtttgagctattctggagattatttggtaaagtatactaaaagccttaaaaccatgtatgtgcgctgtttgaaccagtaagccacttctttgacattagaagacattagaagaaataatcagccttgcataaaacttatggatgaaagtattcatcaccaatattatttataataaaaaattgcaaatgttataaatgaacaattgggaaatggttaaagaagtgatggtgcattgtgtggtagaatattatgcatatgtttaaagaatcatattttctaagattatttggaagcatgtttggtaatgtcaagtggagtaccccagatacattttagacatttatcgtcatcatctgctctgagtggaaggccgttcagagaggctagaggttcttattctggctataaattatgtgagtaaaattgtgctaaccagttaaaagtactgtacacccatgctcaatatatagtcctggaaatagcaattgaaacatgtcttctcacaagagaaaatgacagttttaatgatgtatttgatgaatttaaactttaagtcaggtgctgcaaattggaaagaagacttgtggtgttttaagttgctgtggacacttttaagaaacttagaacccatggaacccttgtttatcgccatgcaaattacaatcttgaatgagtgttttttaaaaataaagtattagaaaaatgtgtagtaaagatgtaaattaaaaaatggaattctccattaa

SEQ ID NO: 27859 - DNA, 1153 bp, Homo sapiens
ggccgggcgcagtggctcacgcctgtaatcccagcactatgttggccaggctggtctcgaactcctgacctcgtgattggcccacctcagcctcccaaagtgctggtattacagatgtgagccaccgcacccagcctgagtttctctttctctctttttaactttattttttgaaaaacccggtagactttgtggggagcatttttgttgataattttactgatctaaagctgagtgattttttaaaagaatttgaatttggcttcctcaccagtaatatgtctccttgcttctttgatgtgatagttttgagatgggtgagaatctaatagatctgtggttgaatttgctgtgttgttatgaagtccaccctgtgggcacaataacataactgttggtaggagttgtttgagctattctggagattatttggtaaagtatactaaaagccttaaaaccatgtatgtgcgctgtttgaaccagtaagccacttctttgacattagaagacattagaagaaataatcagccttgcataaaacttatggatgaaagtattcatcaccaatattatttataataaaaaattgcaaatgttataaatgaacaattgggaaatggttaaagaagtgatggtgcattgtgtggtagaatattatgcatatgtttaaagaatcatattttctaagattatttggaagcatgtttggtaatgtcaagtggagtaccccagatacattttagacatttatcgtcatcatctgctctgagtggaaggccgttcagagaggctagaggttcttattctggctataaattatgtgagtaaaattgtgctaaccagttaaaagtactgtacacccatgctcaatatatagtcctggaaatagcaattgaaacatgtcttctcacaagagaaaatgacagttttaatgatgtatttgatgaatttaaactttaagtcaggtgctgcaaattggaaagaagacttgtggtgttttaagttgctgtggacacttttaagaaacttagaacccatggaacccttgtttatcgccatgcaaattacaatcttgaatgagtgttttttaaaaataaagtattagaaaaatgtgtagtaaagatgtaaattaaaaaatggaattctccattaa

SEQ ID NO: 27860 - DNA, 1177 bp, Homo sapiens
aagcttgcggccgctcccacttcacattggtaacccagagtttagaagtattgaaagacactatgttggccaggctggtctcgaactcctgacctcgtgattggcccacctcagcctcccaaagtgctggtattacagatgtgagccaccgcacccagcctgagtttctctttctctctttttaactttattttttgaaaaacccggtagactttgtggggagcatttttgttgataattttactgatctaaagctgagtgattttttaaaagaatttgaatttggcttcctcaccagtaatatgtctccttgcttctttgatgtgatagttttgagatgggtgagaatctaatagatctgtggttgaatttgctgtgttgttatgaagtccaccctgtgggcacaataacataactgttggtaggagttgtttgagctattctggagattatttggtaaagtatactaaaagccttaaaaccatgtatgtgcgctgtttgaaccagtaagccacttctttgacattagaagacattagaagaaataatcagccttgcataaaacttatggatgaaagtattcatcaccaatattatttataataaaaaattgcaaatgttataaatgaacaattgggaaatggttaaagaagtgatggtgcattgtgtggtagaatattatgcatatgtttaaagaatcatattttctaagattatttggaagcatgtttggtaatgtcaagtggagtaccccagatacattttagacatttatcgtcatcatctgctctgagtggaaggccgttcagagaggctagaggttcttattctggctataaattatgtgagtaaaattgtgctaaccagttaaaagtactgtacacccatgctcaatatatagtcctggaaatagcaattgaaacatgtcttctcacaagagaaaatgacagttttaatgatgtatttgatgaatttaaactttaagtcaggtgctgcaaattggaaagaagacttgtggtgttttaagttgctgtggacacttttaagaaacttagaacccatggaacccttgtttatcgccatgcaaattacaatcttgaatgagtgttttttaaaaataaagtattagaaaaatgtgtagtaaagatgtaaattaaaaaatggaattctccattaa

SEQ ID NO: 27861 - DNA, 519 bp, Homo sapiens
atcagcaaagtcatttaatatattaataatgtgaagtcactcataattcattcatgtcaattgtcatatcaactatcataatacatatgaaattgaaaagtctttcatttcataattagattgtatagaatttaatgattatgaaaagctgagctgtttgttaaaatatgaaacaatggtagaaatgagattcaaaaaataaaaggccacataagaaactcttctcccccgaaggaaaaattacaaataattacaagaatgtaactttacttattttcctggcttagaatgatcctcttgaataggaaatcaagaagaattactgtaggtaaaactgtcttcttaaaagtgaagattcagggtctgatttgctcagtagctaaatacagagcccgtttcaaactgtggagctctttcctgtgaggtttgtctgaattgcaacactgccaaacatcgctcggtgctcttccctagcagtctctaactctggcaccagcttccacaatgacgcgctaccag

SEQ ID NO: 27862 - DNA, 4354 bp, Homo sapiens
  misc_feature (3306)..(3306): n is a, c, g, or t
gtcagtgtcaagatcaatgttgtttgttttcttaaaagcaattatgatgcttggagatgccaaaattggcaataacagtgtcagctctttaaagaatgatgacttcaccatgagaggtttgcgatgtgatgggaatgctgatgatatctggactgcctcacaaaatccaaaatcctgtgggaaaagcatttccatagaaactgccaatttaagagaatacgctagatatgtactgaggactatctgtcaacaggaatgggtaggagagcattgcttaaaagaacctgaaagattatgtacagacaaagaacttatattggaccctgtgctttcaaatatgcaagcacagaaattactgcagcttatctgttatcctcatggcattaaagaatgtaccgagggggacaatctgcaaagacagcacattaagcgtattcttcagaatcttgagcagtggacactgaggcaatcctggttagaactccagctaatgatcaaacagtgcttgaaggaccctggctctggttctgtggccgaaatgaacaacttactggacaatattgcaaaggcaacaatagaggtattccagcagtctgcagacctaaataattcttctaattctggcatgagcctcttcaacccaaacagtattggaagtgctgatacaagtagcacgagacagaatggaataaagacattcctaagttcctccgaacgcaggggtgtatggttggtggcccccctcatcgccaggttgccaacttctgtgcaaggaagagtgctgaaagccgctggggaagagctggagaagggacagcacttgggttcttcttccaaaaaggaaagggacagacagaaacagaaaagtatgtctcttttgagtcaacaacccttcctctcactggtacttacctgccttaagggacaagatgaacaaagggaaggcctcctaacatctctccagaatcaagttaaccagattttaagtaactggagagaagaacgataccaagatgacataaaagcgcggcagatgatgcacgaagcattgcaactccgcctaaatttggtaggaggaatgtttgacacggtgcagaggagcacccagtggactacagactgggccctgctactccttcagatcattacttcaggaactgttgacatgcacactaacaatgaattattcacaacagttcttgacatgctgggtgttttaatcaatggaacgttagcctctgacctatcaaatgcatcccctgggggatctgaagagaacaagcgtgcatacatgaatttagtaaagaaactgaaaaaagagctaggagacaagcgatcagaaagtattgacaaagttcgacagttactacctttgccgaaacagacatgtgatgtcatcacttgtgaacctatgggttccttgattgacacaaaaggaaacaaaattgctggatttgactctatagataaaaaacagggtctccaggtctctacgaagcagaaggtgtccccgtgggacttgtttgagggtcagaagaacccagctcctttgtcctgggcctggtttgggacagtccgagtggaccgaagagtgatcaagtacgaggagcagcatcacctcctgctgtatcacacacaccccatgcccaagccccgcagttactacctccagccactgcccctgcctcctgaggaggaagaggaagagcccacatctccagtttctcaggaaccagaaaggaagtccgctgagctgtcagatcagggaaaaaccacaacagatgaagaaaagaaaacaaaaggaaggaagcgcaagacgaaatctagctcaagagttgatgaatatccacagagcaacatataccgagtgcctcctaattactcgcctatctcctcccaaatgatgcaccatccacagtccaccttgtggggttacaacctcgtgggccagccccagcagcccggctttttccttcagaaccaatctcttactccaggtggctccagattggaccctgcaggctcctttgtcccaaccaacaccaaacaagctctgtcaaacatgctacagcggcgctcaggcgccatgatgcagccgccttctcttcatgcaatcacatcgcagcagcagttgatacagatgaagcttctgcagcagcagcagcaacagcgacttctcaggcaagcccagactcggcctttccaacagggccagccgggggaccaggctgctctctttgctgcgcaagcacggccctcccctcagctccctcagtatccagggctgcagcaagcacagaccatgccacagggctatacaatgtatgggacacagatgcctttgcagcagacatcgcagcagcaggctggcagtgtggtcctgtctcccagctataactccagagcctatccggccgcacattccaaccccgtgctaatggaaagactcagacagattcagcagcagccgagtggctatgttcagcagcaggcctcgccgtacctgcagcccctgactggctctcagagactgaaccatcaggctctacagcagagccctctggtgggcgggggaattgatgctgtgctgacttctgcacatccaaaccttccctccgtgcccctgcctcaggatcccatgagacccagacagccgcaagttcgacagcagcagagactcctccagatgcagcagccccagcagccccagccccagcagcctccccagccccagcagtcctcgcagtcccagagtcagacccttggtctccaagcaatgcagccccagcagcccttgtttcccaggcaaggcttgcagcagacccagcagcagcagcagacggccgccttggtgcggcagctccagaagcagctttccagcaaccagccacagcaaggagtgactccgtatgggcatccttcacacttctgaatctgcaagaggagaagacatgacgttttatgtttgcactgaaaaacagaaaatcaaatttaatgcattagtcatcttaaaaatgtccctttttttcatttctttgacattttactatattttatgctacatctcacaaaaaaaaaaaggtgtttaaacaaaaagccaaggagaagttgtggtttgattttgttgaattcacctttaaagtaggtttacaaatgtgaatcatgcaggcaggcctactcccggaagagtgtgctagcagaccttttgaaattggtgctttttttgaatctcacatttctagaaagaatggattatgatggatctaaggtatttatgtatttcattcattaatgatgacgttgttnttttttttttaattttattttccaaactgtgctggaccaaactactgatttgaaaggcatgtcagatcttgacagaaacatggcctgtttattctgcattcacctgtgatggtgaaacggacatttatttgcatcgctctaatttgaaatgtttgtaatctcataagcactttataaactttgttcttatttatgtaggactcttctttgcttttgttgtggtcaaaaggtgctgaaacagattgttgcttcgtacttaaacttcttaaaccaagaacctaaaccaaggtttctttgagagccgccctaagatgtgcggaaacctgttagaagtagctgtactcaaatttgttttgaggcaagatcattgatgagagtcattgtgaaggtacaacatgtaaatcctaaaggcctgaaagaactgcagtggaatcgtccaactatttattgccagttttggttctcctgaaccttatgccaccttaaggggaaaaaaaaatccagtagctggcttgagattccagtgctcacacttgacatggtttccagagaatctggccccaaagtccagaaggctctggttttcataaaaggtgtatttgctgtttattttgtatggtaagtatttgctcttttgaatttaattattactgtcagtgtcagtcttggttgtgtattgcatatactgtatttataaattggtgcaaaaagcacaagtaaattatacatcaaatttattataaagaaatagtaactattttaactttgttcaagtatgtggtaatttgctcctattagagtaaaaaagaaaccagtaaattatcagtttgtgtaacttaagagtattctatataatatttttttagatttagatgcataaaattttgaatgtgaaaattgcagggcattttaaaacatatgtgggggatattttcccatgttctctgttatttcattttcttttgccatatgattttacatataatatagtcaagcatactgtgaatagacttgtctataatgagcagaccatgtaaatctacttttt

SEQ ID NO: 27863 - DNA, 260 bp, Homo sapiens
cgaaatctagctcaagagttgatgtaagtggggaaaggaaggagaaccttggctcattagcatttagtatgagatttactcgtgcccaaatcatatccctcgaaacattaccaagagcaggataagttttgttatgacagttctcctaacaggtttctgcattaactgaatggcacacaatgacttgtcacagacaaaagattaaagcttttgattttccgtcctccacttttaataattttattttaattgtaggcttc

SEQ ID NO: 27864 - DNA, 388 bp, Homo sapiens
gagaactttcaatgttttatgaaacttttactgtattccttttgaaagttaataccaagtagtttagttcagagggagacactctggatgggccagtaacctaaatcctgcggccttgcattggcaagtgtggactgtgaataaaggtgtcccctctgcagggtggtacttgaatcccaccacaagggtttttcagggcaaggatagtactctccggccattctgtttccctgtacctgcagctggtactgagagcagtgacaagagggtagcatccatctgtgcaatagttttgtgtctgtaattttggttcaatttatttttctccttaggcaaccagccacagcaaggagtgactccgtatgggcatccttcacacttctgaatc

SEQ ID NO: 27865 - DNA, 466 bp, Homo sapiens
tataaataagaatgcctgtattttgaaaaaaaccgtatttgggtccacctaaattacatgatgtctataaattttttgatgcccttaaaaatgtaaatcgtagctcagatttattcacgaaactaaaaatattctaattcgtgtatgtactgattattgtttgttgcttaacagcattgtcaaaaatatttgaagccattgttatcttcttctcaaggttctactaagttatttgacaaatgagtattttatctgtgaatctaagaaaatgacttgtttgatgttagtgaaatatatgttaattaagtatatcacaggtgagtatttctcttttgtacaaggttactttctgtgtcttctttttcttttctaggattaacgacatagccaatttctcctctgagcttacggcttgctgcactgttcttagttcagaatggctgggggttctgaaggctctttgttg

SEQ ID NO: 27866 - DNA, 5731 bp, Homo sapiens
  misc_feature (8)..(8): n is a, c, g, or t
  misc_feature (10)..(12): n is a, c, g, or t
  misc_feature (15)..(15): n is a, c, g, or t
  misc_feature (4683)..(4683): n is a, c, g, or t
attttctntnnntcnggatgaatcttcaagtcatgaatgtaaccagcgcacaatccttctctatggagtcggcaaagagcgtgatgaagcaaggcatcagctgaagaagattaccaaagatatcctgaaaattctaaataagaagagcaccacagagacaggggttggggacgaaggacaaaaagccaggaagaacaaacaggagacatttccaacactggagactgtgttcactaaactccagctcctttcatattttgatcaacatcaagtgacatctcagatttctaacaatgtgctagaacaaatcacaagctttgcgtcaggaacatcctatcatctccctttggctcaccacattcagctcatctttgatctcatggagccagcactgaacatcaacggactaattgacttcgcaatacagttactaaatgaactgagtgttgtggaagctgaactgctcctaaaatcctccagcctggcaggaagttatacaacaggactgtgtgtctgcatcgtggctgttctcaggcgctatcacagttgtctaatcttgaatcctgatcagacagcccaggtgtttgaagggttgtgtggtgtggtcaagcatgtcgtaaacccctcagaatgttcttcccctgaaagatgcattttagcctacctctatgatctctatgtgtcatgtagccacctcagaagtaaatttggagacctcttcagtagtgcctgttcaaaagtaaagcaaaccatatataataacgtgatgcctgcaaattcgaacttgcgatgggatccagacttcatgatggattttattgagaatccctcagcccgcagcatcaactactcaatgctgggcaagatcctcagtgacaatgcggccaatcgctacagctttgtctgcaatacactcatgaatgtatgtatgggccatcaggatgctggcaggattaacgacatagccaatttctcctctgagcttacggcttgctgcactgttcttagttcagaatggctgggggttctgaaggctctttgttgttcttcaaatcacgtgtgggggtttaatgatgtactttgcactgtagatgtgagtgacctttcattccatgattcattagctactttcattgctattctgatagcacgacagtgtttttccctggaggacgtcgtgcagcatgtcgcacttccctctcttctagcagcagcttgtggggatgcggacgccgagcctggggcgagaatgacatgccgactcttgcttcatctcttccgagctccccaggcctgcttcttacctcaagcaacgggcaaacctttccctggaataagatcatcttgtgatagacacctcttagccgctgctcacaacagcattgaagtgggagccgtgtttgctgtcttaaaagcaattatgatgcttggagatgccaaaattggcaataacagtgtcagctctttaaagaatgatgacttcaccatgagaggtttgcgatgtgatgggaatgctgatgatatctggactgcctcacaaaatccaaaatcctgtgggaaaagcatttccatagaaactgccaatttaagagaatacgctagatatgtactgaggactatctgtcaacaggaatgggtaggagagcattgcttaaaagaacctgaaagattatgtacagacaaagaacttatattggaccctgtgctttcaaatatgcaagcacagaaattactgcagcttatctgttatcctcatggcattaaagaatgtaccgagggggacaatctgcaaagacagcacattaagcgtattcttcagaatcttgagcagtggacactgaggcaatcctggttagaactccagctaatgatcaaacagtgcttgaaggaccctggctctggttctgtggccgaaatgaacaacttactggacaatattgcaaaggcaacaatagaggtattccagcagtctgcagacctaaataattcttctaattctggcatgagcctcttcaacccaaacagtattggaagtgctgatacaagtagcacgagacagaatggaataaagacattcctaagttcctccgaacgcaggggtgtatggttggtggcccccctcatcgccaggttgccaacttctgtgcaaggaagagtgctgaaagccgctggggaagagctggagaagggacagcacttgggttcttcttccaaaaaggaaagggacagacagaaacagaaaagtatgtctcttttgagtcaacaacccttcctctcactggtacttacctgccttaagggacaagatgaacaaagggaaggcctcctaacatctctccagaatcaagttaaccagattttaagtaactggagagaagaacgataccaagatgacataaaagcgcggcagatgatgcacgaagcattgcaactccgcctaaatttggtaggaggaatgtttgacacggtgcagaggagcacccagtggactacagactgggccctgctactccttcagatcattacttcaggaactgttgacatgcacactaacaatgaattattcacaacagttcttgacatgctgggtgttttaatcaatggaacgttagcctctgacctatcaaatgcatcccctgggggatctgaagagaacaagcgtgcatacatgaatttagtaaagaaactgaaaaaagagctaggagacaagcgatcagaaagtattgacaaagttcgacagttactacctttgccgaaacagacatgtgatgtcatcacttgtgaacctatgggttccttgattgacacaaaaggaaacaaaattgctggatttgactctatagataaaaaacagggtctccaggtctctacgaagcagaaggtgtccccgtgggacttgtttgagggtcagaagaacccagctcctttgtcctgggcctggtttgggacagtccgagtggaccgaagagtgatcaagtacgaggagcagcatcacctcctgctgtatcacacacaccccatgcccaagccccgcagttactacctccagccactgcccctgcctcctgaggaggaagaggaagagcccacatctccagtttctcaggaaccagaaaggaagtccgctgagctgtcagatcagggaaaaaccacaacagatgaagaaaagaaaacaaaaggaaggaagcgcaagacgaaatctagctcaagagttgatgaatatccacagagcaacatataccgagtgcctcctaattactcgcctatctcctcccaaatgatgcaccatccacagtccaccttgtggggttacaacctcgtgggccagccccagcagcccggctttttccttcagaaccaatctcttactccaggtggctccagattggaccctgcaggctcctttgtcccaaccaacaccaaacaagctctgtcaaacatgctacagcggcgctcaggcgccatgatgcagccgccttctcttcatgcaatcacatcgcagcagcagttgatacagatgaagcttctgcagcagcagcagcaacagcgacttctcaggcaagcccagactcggcctttccaacagggccagccgggggaccaggctgctctctttgctgcgcaagcacggccctcccctcagctccctcagtatccagggctgcagcaagcacagaccatgccacagggctatacaatgtatgggacacagatgcctttgcagcagacatcgcagcagcaggctggcagtgtggtcctgtctcccagctataactccagagcctatccggccgcacattccaaccccgtgctaatggaaagactcagacagattcagcagcagccgagtggctatgttcagcagcaggcctcgccgtacctgcagcccctgactggctctcagagactgaaccatcaggctctacagcagagccctctggtgggcgggggaattgatgctgtgctgacttctgcacatccaaaccttccctccgtgcccctgcctcaggatcccatgagacccagacagccgcaagttcgacagcagcagagactcctccagatgcagcagccccagcagccccagccccagcagcctccccagccccagcagtcctcgcagtcccagagtcagacccttggtctccaagcaatgcagccccagcagcccttgtttcccaggcaaggcttgcagcagacccagcagcagcagcagacggccgccttggtgcggcagctccagaagcagctttccagcaaccagccacagcaaggagtgactccgtatgggcatccttcacacttctgaatctgcaagaggagaagacatgacgttttatgtttgcactgaaaaacagaaaatcaaatttaatgcattagtcatcttaaaaatgtccctttttttcatttctttgacattttactatattttatgctacatctcacaaaaaaaaaaaggtgtttaaacaaaaagccaaggagaagttgtggtttgattttgttgaattcacctttaaagtaggtttacaaatgtgaatcatgcaggcaggcctactcccggaagagtgtgctagcagaccttttgaaattggtgctttttttgaatctcacatttctagaaagaatggattatgatggatctaaggtatttatgtatttcattcattaatgatgacgttgttnttttttttttaattttattttccaaactgtgctggaccaaactactgatttgaaaggcatgtcagatcttgacagaaacatggcctgtttattctgcattcacctgtgatggtgaaacggacatttatttgcatcgctctaatttgaaatgtttgtaatctcataagcactttataaactttgttcttatttatgtaggactcttctttgcttttgttgtggtcaaaaggtgctgaaacagattgttgcttcgtacttaaacttcttaaaccaagaacctaaaccaaggtttctttgagagccgccctaagatgtgcggaaacctgttagaagtagctgtactcaaatttgttttgaggcaagatcattgatgagagtcattgtgaaggtacaacatgtaaatcctaaaggcctgaaagaactgcagtggaatcgtccaactatttattgccagttttggttctcctgaaccttatgccaccttaaggggaaaaaaaaatccagtagctggcttgagattccagtgctcacacttgacatggtttccagagaatctggccccaaagtccagaaggctctggttttcataaaaggtgtatttgctgtttattttgtatggtaagtatttgctcttttgaatttaattattactgtcagtgtcagtcttggttgtgtattgcatatactgtatttataaattggtgcaaaaagcacaagtaaattatacatcaaatttattataaagaaatagtaactattttaactttgttcaagtatgtggtaatttgctcctattagagtaaaaaagaaaccagtaaattatcagtttgtgtaacttaagagtattctatataatatttttttagatttagatgcataaaattttgaatgtgaaaattgcagggcattttaaaacatatgtgggggatattttcccatgttctctgttatttcattttcttttgccatatgattttacatataatatagtcaagcatactgtgaatagacttgtctataatgagcagaccatgtaaatctacttttt

SEQ ID NO: 27867 - DNA, 382 bp, Homo sapiens
ttggggtgtgtccgggatgagcaggggctgacagaacatgtccccccacctctcatcttcagccttttctgagccgcagggcctctccactcccagactgaagggtattagaagagaagacaagggaacatttttccactgttgcgcatttgttcaacaaatgctagctgaaaagagcctctagtgacttgtcgcagctacccaatctacccaggccgggcctagaggccaatgccatggcccaagggcacagctcatggtgaggtccagctgctgggcaggaaaaggacaagaggtcaggtggctgcagaggtgatggctgggggcctgtcagacgggggccaaagacattcctcccctcgtgatccctgacccaagcgcg

SEQ ID NO: 27868 - DNA, 448 bp, Homo sapiens
agttttttttcattgttatagtctgtattcaataaaattacccagatcttaactaggcagtttgataaatcctgacaaatgtaaacactcatgttaccatcacccaaattaagatattgtaaaacattttcattactctagaaagttcactcatgcctctctccagtcactacccctgaggcagccactgtgctgatttcccatcaccatacattagttgtacctagccttgaacttcatagaaatagagtcatacatacttccttgtctgccttgtttctcaacatgatgttttgaaattcatccatgttgcacctaacagtaatgagtcgtaatttattaatgagtagtagtgtattgtacaaatttgtttattcgttctcttgttggtatttggattgtttccagtttgggactattgttaataaacctgtgaatctgcaagcct

SEQ ID NO: 27869 - DNA, 876 bp, Homo sapiens
atgatacccatccaactcactgtcttcttcatgatcatctatgtgcttgagtccttgacaattattgtgcagagcagcctaattgttgcagtgctgggcagagaatggctgcaagtcagaaggctgatgcctgtggacatgattctcatcagcctgggcatctctcgcttctgtctacagtgggcatcaatgctgaacaatttttgctcctattttaatttgaattatgtactttgcaacttaacaatcacctgggaattttttaatatccttacattctggttaaacagcttgcttaccgtgttctactgcatcaaggtctcttctttcacccatcacatctttctctggctgaggtggagaattttgaggttgtttccctggatattactgggttctctgatgattacttgtgtaacaatcatcccttcagctattgggaattacattcaaattcagttactcaccatggagcatctaccaagaaacagcactgtaactgacaaacttgaaaattttcatcagtatcagttccaggctcatacagttgcattggttattcctttcatcctgttcctggcctccaccatctttctcatggcatcactgaccaagcagatacaacatcatagcactggtcactgcaatccaagcatgaaagcgcgcttcactgccctgaggtcccttgccgtcttatttattgtgtttacctcttactttctaaccatactcatcaccattataggtactctatttgataagagatgttggttatgggtctgggaagcttttgtctatgctttcatcttaatgcattccacttcactgatgctgagcagccctacgttgaaaaggattctaaagggaaagtgctag

SEQ ID NO: 27870 - DNA, 467 bp, Homo sapiens
acttcacttaaatctgctctgagtctctggatgcctggcaggtggagaattcaatcttgtcgttaccagtattcctttcccttctccatgggcttatgtaagaattctgggcttacacactgttggaaagccaggtaggaactacctcccccgaactctccattcttccagctgctcatgatccatcaaccttctttgggccacctgctatagcaagaccctcctcacagcatcattccactgacccacaggctcagccccagggaccctcactagaacaggtctccactatgcataggaactcacaaaaaccttctcttcatcttggcttctgctgatatccagccactcccccacttctcatcttaaacacagatggcagctccttcccatcgttccaaaacagggggattgtccagccaaattctctgcagacaccaaagcttcacccgtcctcttcagggagg

SEQ ID NO: 27871 - DNA, 439 bp, Homo sapiens
aggaagttaattgtcatgacgaggctcattcttagaagttcattttaatagagaatgttatgtaatagtttcatatgtgacttcagtgttatagtcaaaggtttattacaactttgaaggggatacatttagagagttttaaaaaccattttgtaaataatttaaatatttttttttttggctgggcatggtggctcacacctgtaatctcagcactttgggaggctgaggcgggcagatcacttgaggtcaggagttcgagaccagcctggccaacatggtgaaaccccatttgcactaaaaatacaaaaattagctgagcgagcatggtggcatatgcctgttatcccagctactcggggggctgaggcaggagaatcacttgaacccgggaggtggaggttgcagtgagccaagatcgcgctgctgcactccagcc

SEQ ID NO: 27872 - DNA, 330 bp, Homo sapiens
gcaaaacccttcagtccaagctgggcacccctcctgggttcacttatgagattgagctgagtttattttcattgctcattacactgctgtccccccacccccaggtgagctccctgaggtcagggaacatgccatatttactgctgtatctccagggcccagcccagtgtggcccatcagaggcactcaataatcatttactgaatgacagtatttgtcataggataagtgaggggaaaacaggaccttttagatttgtagagtgtttccaagcatttctatccacatctcacttgatttatatggaacgaacaagcagggattgttacc

SEQ ID NO: 27873 - DNA, 431 bp, Homo sapiens
tccaattacacatatattggcccacgagtcacagagacttgttcatttctttttcctctccttttttctctctgtagttaacttcagtgaagttttcttcgtagtttccaatctgtcatttagcatattcagtgaatttttcatttcagatattacattttttgttctaggttttccatttgattcttatttagagctctactttggctgatattctctatctgtgcatggatactgttcatcttttcctttaaatctttgagcctatttaccagagacaacataaaatagttggctgctaattccatgtctctgtcatctctgggtctatttctatttttttccctatagttccctgcttcttcatttgtttagtaattttttatacagctggtcattgtgggtactatgttgtggaacatttggaattc

SEQ ID NO: 27874 - DNA, 164 bp, Homo sapiens
catcacactacaaacacagccaccctctctggggaacgtaagagaaacttttgggcttccacttcccctccatttgtttgaaggatcaagagaacactgttccattttcaacaaaaattaaaaaggaaaatcatgaaaagagccaacctcctcttttttgtttt

SEQ ID NO: 27875 - DNA, 402 bp, Homo sapiens
tgcaatatcaagaggttcccagagcccctgaagctcatctgtgcgtcccaggttaagaatttctaacttatccaaccccactggaaacaagaaaataatagaatttctaacttacttggcacttaggcctgggagaaacagaagagggcaggggagagagggagagagtgcttctctgcagtttcctagggtgcactgggagagtcgcctaaatgcagtggacaggtggagagactacctgagcaagcgggtggactcactcacgatcatgtggcccagcagatccaggggaaggaacccaggtcctagaataagttgagtggtccagacatggaggtcagtaatgtgccaagccataacaactgaagtggaggaggtttgaaataaacaccagtctgtggg

SEQ ID NO: 27876 - DNA, 539 bp, Homo sapiens
tgtacatacggtgaggagcatccaaaccccagatgaaatccacgtgagcccattcaggaatattcttatggtagatgaggttggtcacctcagagagcagcattttcacgtcttctggatttgaaagccagtcctgacctcctgtccacattgctgtagggaccgtcatatctctgactctgtaccttacaggagttggctagagaaaaggaatagttcttaactctaggtaacatttggactttcaggctcataatttatgtttcaaatagacataataaacatgccatctgttgtggtgaagggtacatgggtgttagagccacacaactctgttaagaatttctgttcccgcccttactttaaggtaaaattacttaacattattgaacctcagtttcttcttctgtgactggggataatatctgtaataacttgctagatcaaatgacaaaacacataaaaacatgtaatgccttgtatttcttttttcttcctattaaatattttgtaaataaattgtttttaaaaataatgcc

SEQ ID NO: 27877 - DNA, 451 bp, Homo sapiens
tagactgaaggataatttgcaaattcctacaacgattagagattaagttgccagctttaaaaatggggactagtgtgtaagccttttgtatgtacatatgtacatgcactaagtatgtaaatacatacatattgtgagactaggttctcacagtaaatatctgataaaaatccctgggggaggggaaaaggaaccattttgaaatacaccacagcactctgttcttaaaaaggtctctcctcaagagaaactagtgtatataaaaaacttactttctaaatgtaactgttactctactaatccagagtttcaaacatgtgtgaacaataagatagcatacataatttggcattttaaaagttatccaaagatacttttgtagaagccacttagctgatgatagaagatatttaaaagatcaaataataccagatattgtacatcgtatatg

SEQ ID NO: 27878 - DNA, 470 bp, Homo sapiens
caggcttctgacctctagaactgggagattatcagtttgtgttgttttaagccactaaatatgtgatcatttgtcataacagcaataggaacctaatacaggggcacatgtaaactgctgagcagaagtttaaataaccagctgggggctatggccatctttcttttgcctccagcataaggtgagcaaagtcctggtggggacacttgctgcttcagccagggtccagagtgagacagacatggaccagagcctgtccagtgaagaaatgaaccttggttgtaagccactgagatttggaggctgcttgttaccacagcataacctagcctctcctgatggacccatttcacctggcactcctcacaaaggaactcaagacttccatttcatttcatcagattactttgcagtgtcctttgatggccaggcactgtttggcccctagtatactatcagtaacaaacaga

SEQ ID NO: 27879 - DNA, 452 bp, Homo sapiens
gctcgacttctaaacaacaaatagatcttatgtgatttagaagaagacaaatgatttacttcttctaaacaacaaatagatcttatgtgatttagaagaagtaaatcacataagatctatttgttgtttaagttagcaattaaagttcagcagcaaagtctgaaatcacctcttctccttgtcacccactcgtaacagaaacattggcactaacacatgtgaccttcagaatagccgttgcctctcataaaatctaacagtgttttcttcagaaataaggactacgaagccacagacctcaagtccctttgagactcattgacatagtacttatctagctgaaaccaagggtgccctaatcacaggacacctacaaaatttcctttctttctttttagcatttacagacatgggctaccggagctgtattacagattagctttatctaatgt

SEQ ID NO: 27880 - DNA, 435 bp, Homo sapiens
aatatgttgactatggcaggcatggtggctcacacctgcaatctcagcactttggaaggccaaggcaggaggatcccttgagctgaggatttcgggaacagcctgcacaacatagcaagatccctgtctctaccaaaaaaaaaaaaaaaaattgagtaaattcagaggggaatgtttaacattcttcttttaacattatagttttaaaatgagccaactactaaattgtgtgctcaagatacatcttttctttcataaatgaagtaccaaattgtgagcctaaaaggagttagaatgagtcaagctgaatgtcatatgactggatattgaaaagtcattattgattcacatcactttcttccttactgtgcatagtactgaagtcgttaatggaagaagatgtacttacccaataaacttaagcatttaaacatg

SEQ ID NO: 27881 - DNA, 595 bp, Homo sapiens
aatatgttgactatggcaggcatggtggctcacacctgcaatctcagcactttggaaggccaaggcaggaggatcccttgagctgaggatttcgggaacagcctgcacaacatagcaagatccctgtctctaccaaaaaaaattcaaaaattatccaggtgtggtggtgcgcagctatagtgccagctacttctggaggtgagacgggaggatcatttgagcttcggaggtcgagactgtagtaagccatgattgtaccactgcactccaggtggagagacaaagcgatttttctgtctcaaaaaaaaaaattgagtaaattcagaggggaatgtttaacattcttcttttaacattatagttttaaaatgagccaactactaaattgtgtgctcaagatacatcttttctttcataaatgaagtaccaaattgtgagcctaaaaggagttagaatgagtcaagctgaatgtcatatgactggatattgaaaagtcattattgattcacatcactttcttccttactgtgcatagtactgaagtcgttaatggaagaagatgtacttacccaataaacttaagcatttaaacatg

SEQ ID NO: 27882 - DNA, 265 bp, Homo sapiens
aaaaaagaaagtaataggttgggtgtttcaaaagatttttagccttaagatccagattatttaaaaagtgaactgcctactccctttcttggactccctcctctatgagtaaaaatgtattacagcaactgtaacacatcattatccccattccactttccactatgaaacttaagacttttgatgacagggataacatctactttatctttgtaactcctgcctctaacgcaatgcctagcaagtgatacaggtatgatgcttg

SEQ ID NO: 27883 - DNA, 765 bp, Homo sapiens
tgaggttaatcacagtgaccaccgaacacattactatgagaataaaaggaggcaaggcatttaagtaccagattcacacacatcgtgatgtcctataaagaccataagactttctctgatttttttctgttcttaaactgttttttctatttctcttttatctttaatatcatgttgcctgtggtgcctctgcctatattaccctaaattaggctttgcattagtactttgtacatagtatgtacccaatatctattgacatacataaaaatgaatttcttaatgtatgtgttttataagttcgaattttgatatatagaatttacctcgtgcccagagtccaatgcatgccaagcctacagtagatgttcagtaaatatttgttgagtgctgaaaaaagtagtgcttattgcattatcaaatagaaatactctttctcagtgaagttactagagagtagacaaaataccctctcctcttgtgatggctccaactccatcacttaggtggcatcttgacctggcattctaactcttggaaattgagcactctgccaggtagagtagaggcacagagaagttgaaagcatgttccctgtctctactaaaaatacaaaaattagccaggcatggtggtgggtgcctgtagtcccagctactcaggaggctgaggcaagaggattgcttgagttaaggaagtcaaggctgcagtgagctatggtcatgccactgcactccagcctgggcaacagcaagaccctgtgtc

SEQ ID NO: 27884 - DNA, 355 bp, Homo sapiens
tgaggcaggagaatcatttgaacctgggaggtggaggctgcagtgagccgagatcgtaccattgcactccagcctgggtgacagagcgagactctgtctcaaaaaaaaaaaaaacccaaaaaccaacaaacaaacaaaacaaaacaccaatgcagctaaagctgatagataattgggtcaaaaaggaaagacaattgaaccgaaaacagaccgttgggttaaaacaaaagtggttgaaaatagccagaagcaggcaatttagtcaagagctacttagtagaaagcagagcctgggcaaaagcaaaaagaatccaactcaaagtaatttacccttcataagcagataatttgtcag

SEQ ID NO: 27885 - DNA, 587 bp, Homo sapiens
taattagcatgcacattccagtttgagaaaagcggcactaaaaagctttgtcaaataggcagtgtgctcccatttctcggtattgtgcctgtgacaggcatcaataatcaaccagagaatcacttccttctgagagcagaatattctcaagtcatggtttcaggtcgcagtgaccaatcaatgggagttggatcaaaattaaacctatcttccatactggtgtcaacacttgaagaaagctcttttatttccacccatatacacatcatacatgcctgataaatgtttgtggaatgaatgtgttttcccctagccttgtttcctgtgatattcacactattccagtccatacccacagaaaatcagaacttcactgggcatctgggaagttcagcagctgttctaggtgttggattttgctattggccatgacccattagaaggttgaggtgaggttggaaagatgttagggatggaatgaagacacttgggaacccatctcgctgtggcacatggacctcaaaccatgcaagttttcttttttctttctttctttttttctttttcttgagatggagtcttgctct

SEQ ID NO: 27886 - DNA, 534 bp, Homo sapiens
cattcattcattcattcattcattaaaggaaaacgccttggagatcgcgcgtttcgaaagcgcgttttcgttttctctcctgggcgggttatggccctaccggggcgccgtagccggcccgcgcgtgcccagtcttggcgaagagtagcggtaggtcggcgggacttccgtgttggcgggattctgaacgctgccatggctcagaccgtgcagaatgttacattgtcgctcactctgcccatcacgtgccacatttgcttggggaaggtaatgggtgattgtgggcacagctacaaaacggggttggataagtcgctcgccggggccgagggccgtctcgtgcgggggcggggaaggggcgtgaggcgcggagatgggagaaaacgctaacccgcgttcttgatgggaggccgcgtcctgggagatgggggtagcgcaccgtgattaatggattcatctgggcgcctttcggaggagggtgacagcggcccgtggtctgccgggagggcggcgagacggccctgccaccgcccg

SEQ ID NO: 27887 - DNA, 3558 bp, Homo sapiens
cattcattcattcattcattcattaaaggaaaacgccttggagatcgcgcgtttcgaaagcgcgttttcgttttctctcctgggcgggttatggccctaccggggcgccgtagccggcccgcgcgtgcccagtcttggcgaagagtagcggtacgtcagcctgtcatatgcatcaacaaccatgtattttgttcgatttgtattgatttgtggttgaagaataatagccagtgtccagcttgcagagtccccatcactcctgaaaatccttgcaaagaaattataggaggaacaagtgaaagtgaacctatgctaagccatacggtcaggaagcatcttcggaaaactagacttgaattactacacaaagaatatgaggacgaaatagattgtttacagaaagaagtagaagagcttaagagtaaaaatctcagcttggagtcacagatcaaaactattctggatcctttaaccttggtgcagggcaaccaaaatgaagacaaacatctagtcacagataatccaagtaaaattaacccagaaactgtagcagagtggaagaaaaaactcagaacagctaatgaaatctatgaaaaagtgaaagatgatgtggataagctaaaggaggcaaataaaaaattgaaattggaaaatggtggtctggtgagggagaatttacgactgaaggctgaagttgataacagatcacctcaaaagtttggaaggtttgcagttgctgctcttcagtccaaagtagaacagtatgagcgtgaaaccaatcgcctcaagaaagccctggaacgaagtgataagtatatagaggaactagaatctcaagttgcacagctaaaaaattcaagtgaagagaaagaagctatgaattccatttgccagacagcactttctgcagatggcaaagggagcaaaggcagtgaggaggatgtggtgtcaaagaatcaaggcgatagtgccagaaagcagcctggctcatccacctccagttcttctcacctagcgaagccttccagcagcagactgtgtgacaccagttctgcaaggcaggaaagtaccagcaaagcagaccttaactgttctaagaacaaagacctatatcaagaacaggtagaagtaatgttagatgtgacagatacaagtatggatacttatttggaaagagaatgggggaataaaccaagtgactgtgtaccctacaaagatgaagaactttatgatcttccagctccttgtactcctttgtcccttagttgccttcagctcagtactccagaaaatagagagagctctgtggtccaagcaggaggttccaaaaagcactcaaaccatctcagaaaattggtgtttgatgatttttgtgattcttcaaatgtttctaataaagattcttcagaagatgatataagtagaagtgaaaatgaaaagaaatcagaatgtttttcttccccaaagacaggattttgggactgttgttccacaagctatgcccaaaacttagattttgaaagttcagaggggaacacgatagcaaattctgttggagaaatatcttcaaaattgagtgagaaatcaggcttatgtttatccaaaaggttgaattctattcgctcttttgaaatgaaccggacaagaacatccagtgaagcatcgatggatgctgcttaccttgacaaaatctctgagttggattcaatgatgtcagagtcagacaacagcaagagcccttgtaataacggttttaagtcactggatttggatgggttatcaaagtcatctcaaggcagtgaatttcttgaggaacctgataagttggaagaaaaaactgagctaaacctttccaaaggttctctaactaatgatcagttagaaaatggaagtgaatggaaacccacttctttttttctcctctctccatctgaccaagaaatgaatgaagatttttcactccattccagttcttgtccagtaactaatgaaatcaaacccccaagctgcttgtttcagacagagttttcccagggcattttgttaagcagttcacatcgactatttgaagatcaaagatttgggtcatctttgtttaagatgtcctcagagatgcacagtcttcataaccaccttcagtctccttggtctacttcctttgtgcctgaaaagaggaataaaaatgtgaatcaatcaacaaaaagaaaaatccagagcagcctttccagtgccagcccatcaaaagcaactaaaagttgactcattagaaaggtgtcatttgtggttttgtcctgagagaaatagaaaagttgttaaagttaccttttttcctcataaaagttctatacaaattggaattgataatctttagtcaagtatcaagtcaggatggtggattaacctgtacccagaatacttattgttcattttgaaaagactttgttcttttcatttttatttgggagtctttgtgaccagagaagttagggaggaggttatttttgtgttttggggttggttggttggttggttttgtttttggttttgtttttttactgaatttgatatgtatctcggttggatatacattgtttttttaaaaaatgttatttaactgttagatacagtggcctgttgataagccccacttgtcttcagaacttggatttcttaaataaaacttttagtgttgtctatacactgctcaataagacacttgagtttaagcttttcccagggtggaaattattttacctgtccctttttatttatgtttagtgatggcctagtttttctgcagggccatgatggagaaatagcactctagccttagtccaatattgatttactttctttttttaggttttatgtatatgtttgcattttttagcattgtgttttgtccagttttgtgaaaatgttctgctagtatgaaagaaaacattttctatatgaagacatttgttttatgttaggtagcttacattttctcctctgcgtgtgtgtgtatgtgtgtaaaatcagaaatttagcatactatggaaagaaggcatggagcacttgggtttagaggaacctaaaacatcatagcttcattgttccagatgtaacaggtttgaaagagctcatcgccaagttcttgatccacttgcattccaggggagttttcttttgagtagtatgtttcttgtttgcatgttcctgttctttgtggaaactatgcatggtagcatttttgcttgctgtgttttccatacttaagaaaaagaggtttcagttggctgatagaatatcttttatgtaggacaaaacttttctgtgaagagtgttgagggggtgaagataggtaagaggtaagcacaatttttaatttaggctctgaaaaagtgtattgttctaaacgtatttggtatgcctatataggtctttaaaaatgggtatgtatgctgtttaatgtgcactgaacattttacattaatattgtactgttttacattaatactgcatgcttttctatgtgaattgaataaagaatgtcataagcactgtgttccttga

SEQ ID NO: 27888 - DNA, 4112 bp, Homo sapiens
cattcattcattcattcattcattaaaggaaaacgccttggagatcgcgcgtttcgaaagcgcgttttcgttttctctcctgggcgggttatggccctaccggggcgccgtagccggcccgcgcgtgcccagtcttggcgaagagtagcggtaggtcggcgggacttccgtgttggcgggattctgaacgctgccatggctcagaccgtgcagaatgttacattgtcgctcactctgcccatcacgtgccacatttgcttggggaaggtacgtcagcctgtcatatgcatcaacaaccatgtattttgttcgatttgtattgatttgtggttgaagaataatagccagtgtccagcttgcagagtccccatcactcctgaaaatccttgcaaagaaattataggaggaacaagtgaaagtgaacctatgctaagccatacggtcaggaagcatcttcggaaaactagacttgaattactacacaaagaatatgaggacgaaatagattgtttacagaaagaagtagaagagcttaagagtaaaaatctcagcttggagtcacagatcaaaactattctggatcctttaaccttggtgcagggcaaccaaaatgaagacaaacatctagtcacagataatccaagtaaaattaacccagaaactgtagcagagtggaagaaaaaactcagaacagctaatgaaatctatgaaaaagtgaaagatgatgtggataagctaaaggaggcaaataaaaaattgaaattggaaaatggtggtctggtgagggagaatttacgactgaaggctgaagttgataacagatcacctcaaaagtttggaaggtttgcagttgctgctcttcagtccaaagtagaacagtatgagcgtgaaaccaatcgcctcaagaaagccctggaacgaagtgataagtatatagaggaactagaatctcaagttgcacagctaaaaaattcaagtgaagagaaagaagctatgaattccatttgccagacagcactttctgcagatggcaaagggagcaaaggcagtgaggaggatgtggtgtcaaagaatcaaggcgatagtgccagaaagcagcctggctcatccacctccagttcttctcacctagcgaagccttccagcagcagactgtgtgacaccagttctgcaaggcaggaaagtaccagcaaagcagaccttaactgttctaagaacaaagacctatatcaagaacaggtagaagtaatgttagatgtgacagatacaagtatggatacttatttggaaagagaatgggggaataaaccaagtgactgtgtaccctacaaagatgaagaactttatgatcttccagctccttgtactcctttgtcccttagttgccttcagctcagtactccagaaaatagagagagctctgtggtccaagcaggaggttccaaaaagcactcaaaccatctcagaaaattggtgtttgatgatttttgtgattcttcaaatgtttctaataaagattcttcagaagatgatataagtagaagtgaaaatgaaaagaaatcagaatgtttttcttccccaaagacaggattttgggactgttgttccacaagctatgcccaaaacttagattttgaaagttcagaggggaacacgatagcaaattctgttggagaaatatcttcaaaattgagtgagaaatcaggcttatgtttatccaaaaggttgaattctattcgctcttttgaaatgaaccggacaagaacatccagtgaagcatcgatggatgctgcttaccttgacaaaatctctgagttggattcaatgatgtcagagtcagacaacagcaagagcccttgtaataacggttttaagtcactggatttggatgggttatcaaagtcatctcaaggcagtgaatttcttgaggaacctgataagttggaagaaaaaactgagctaaacctttccaaaggttctctaactaatgatcagttagaaaatggaagtgaatggaaacccacttctttttttctcctctctccatctgaccaagaaatgaatgaagatttttcactccattccagttcttgtccagtaactaatgaaatcaaacccccaagctgcttgtttcagacagagttttcccagggcattttgttaagcagttcacatcgactatttgaagatcaaagatttgggtcatctttgtttaagatgtcctcagagatgcacagtcttcataaccaccttcagtctccttggtctacttcctttgtgcctgaaaagaggaataaaaatgtgaatcaatcaacaaaaagaaaaatccagagcagcctttccagtgccagcccatcaaaagcaactaaaagttgactcattagaaaggtgtcatttgtggttttgtcctgagagaaatagaaaagttgttaaagttaccttttttcctcataaaagttctatacaaattggaattgataatctttagtcaagtatcaagtcaggatggtggattaacctgtacccagaatacttattgttcattttgaaaagactttgttcttttcatttttatttgggagtctttgtgaccagagaagttagggaggaggttatttttgtgttttggggttggttggttggttggttttgtttttggttttgtttttttactgaatttgatatgtatctcggttggatatacattgtttttttaaaaaatgttatttaactgttagatacagtggcctgttgataagccccacttgtcttcagaacttggatttcttaaataaaacttttagtgttgtctatacactgctcaataagacacttgagtttaagcttttcccagggtggaaattattttacctgtccctttttatttatgtttagtgatggcctagtttttctgcagggccatgatggagaaatagcactctagccttagtccaatattgatttactttctttttttaggttttatgtatatgtttgcattttttagcattgtgttttgtccagttttgtgaaaatgttctgctagtatgaaagaaaacattttctatatgaagacatttgttttatgttaggtagcttacattttctcctctgcgtgtgtgtgtatgtgtgtaaaatcagaaatttagcatactatggaaagaaggcatggagcacttgggtttagaggaacctaaaacatcatagcttcattgttccagatgtaacaggtttgaaagagctcatcgccaagttcttgatccacttgcattccaggggagttttcttttgagtagtatgtttcttgtttgcatgttcctgttctttgtggaaactatgcatggtagcatttttgcttgctgtgttttccatacttaagaaaaagaggtttcagttggctgatagaatatcttttatgtaggacaaaacttttctgtgaagagtgttgagggggtgaagataggtaagaggtaagcacaatttttaatttaggctctgaaaaagtgtattgttctaaacgtatttggtatgcctatataggtctttaaaaatgggtatgtatgctgtttaatgtgcactgaacattttacattaatattgtactgttttacattaatactgcatgcttttctatgtgaattgaataaagaatgtcataagcactgtgttccttgaaaaaaaaaaaacacaatacgaaacaaccaccaaggagcaccacccagcccacaaccacgcacaaccagcagcacctaccacacacaacacgcacgcgaacgccgccaaccaccaccgccccgacccggcggccaccacaaccgacccgcgaacaccactgcatcactaaccagcatgagcaagcacgcaacccaagaacaccgtgcaacgagcccagcgaacacgacagaaaacatcagaagagccagcgaacaacaaacaagcgcggctaccacgacaaccgagaaacaggccgccgacacaaagccaacctagcgggcgcagccagccagcagcgacacacctcatccgtcagcgcctgagcacccacgacaaaacacgacgctagccctcatacagaccacctaccgtagccagtagagaaaaaggaggggata

SEQ ID NO: 27889 - DNA, 284 bp, Homo sapiens
tgctattattatcatatgtttattattatgtaagtggggaaaccattttttgaaaatatacatctggcatttgccctactcattgagtggtctgaaatgtcactgttaggtgaaattagaatagcctgggacagtttgcactctcaaaccttgaaaagaaaaaagcttgagttataagattaactatctttccattctttgtaggtttggaaggtttgcagttgctgctcttcagtccaaagtagaacagtatgagcgtgaaaccaatcgcctcaagaaagccc

SEQ ID NO: 27890 - DNA, 3675 bp, Homo sapiens
cattcattcattcattcattcattaaaggaaaacgccttggagatcgcgcgtttcgaaagcgcgttttcgttttctctcctgggcgggttatggccctaccggggcgccgtagccggcccgcgcgtgcccagtcttggcgaagagtagcggtaggtcggcgggacttccgtgttggcgggattctgaacgctgccatggctcagaccgtgcagaatgttacattgtcgctcactctgcccatcacgtgccacatttgcttggggaaggtacgtcagcctgtcatatgcatcaacaaccatgtattttgttcgatttgtattgatttgtggttgaagaataatagccagtgtccagcttgcagagtccccatcactcctgaaaatccttgcaaagaaattataggaggaacaagtgaaagtgaacctatgctaagccatacggtcaggaagcatcttcggaaaactagacttgaattactacacaaagaatatgaggacgaaatagattgtttacagaaagaagtagaagagcttaagagtaaaaatctcagcttggagtcacagatcaaaactattctggatcctttaaccttggtgcagggcaaccaaaatgaagacaaacatctagtcacagataatccaagtaaaattaacccagaaactgtagcagagtggaagaaaaaactcagaacagctaatgaaatctatgaaaaagtgaaagatgatgtggataagctaaaggaggcaaataaaaaattgaaattggaaaatggtggtctggtgagggagaatttacgactgaaggctgaagttgataacagatcacctcaaaagtttggaaggtttgcagttgctgctcttcagtccaaagtagaacagtatgagcgtgaaaccaatcgcctcaagaaagccctggaacgaagtgataagtatatagaggaactagaatctcaagttgcacagctaaaaaattcaagtgaagagaaagaagctatgaattccatttgccagacagcactttctgcagatggcaaagggagcaaaggcagtgaggaggatgtggtgtcaaagaatcaaggcgatagtgccagaaagcagcctggctcatccacctccagttcttctcacctagcgaagccttccagcagcagactgtgtgacaccagttctgcaaggcaggaaagtaccagcaaagcagaccttaactgttctaagaacaaagacctatatcaagaacaggtagaagtaatgttagatgtgacagatacaagtatggatacttatttggaaagagaatgggggaataaaccaagtgactgtgtaccctacaaagatgaagaactttatgatcttccagctccttgtactcctttgtcccttagttgccttcagctcagtactccagaaaatagagagagctctgtggtccaagcaggaggttccaaaaagcactcaaaccatctcagaaaattggtgtttgatgatttttgtgattcttcaaatgtttctaataaagattcttcagaagatgatataagtagaagtgaaaatgaaaagaaatcagaatgtttttcttccccaaagacaggattttgggactgttgttccacaagctatgcccaaaacttagattttgaaagttcagaggggaacacgatagcaaattctgttggagaaatatcttcaaaattgagtgagaaatcaggcttatgtttatccaaaaggttgaattctattcgctcttttgaaatgaaccggacaagaacatccagtgaagcatcgatggatgctgcttaccttgacaaaatctctgagttggattcaatgatgtcagagtcagacaacagcaagagcccttgtaataacggttttaagtcactggatttggatgggttatcaaagtcatctcaaggcagtgaatttcttgaggaacctgataagttggaagaaaaaactgagctaaacctttccaaaggttctctaactaatgatcagttagaaaatggaagtgaatggaaacccacttctttttttctcctctctccatctgaccaagaaatgaatgaagatttttcactccattccagttcttgtccagtaactaatgaaatcaaacccccaagctgcttgtttcagacagagttttcccagggcattttgttaagcagttcacatcgactatttgaagatcaaagatttgggtcatctttgtttaagatgtcctcagagatgcacagtcttcataaccaccttcagtctccttggtctacttcctttgtgcctgaaaagaggaataaaaatgtgaatcaatcaacaaaaagaaaaatccagagcagcctttccagtgccagcccatcaaaagcaactaaaagttgactcattagaaaggtgtcatttgtggttttgtcctgagagaaatagaaaagttgttaaagttaccttttttcctcataaaagttctatacaaattggaattgataatctttagtcaagtatcaagtcaggatggtggattaacctgtacccagaatacttattgttcattttgaaaagactttgttcttttcatttttatttgggagtctttgtgaccagagaagttagggaggaggttatttttgtgttttggggttggttggttggttggttttgtttttggttttgtttttttactgaatttgatatgtatctcggttggatatacattgtttttttaaaaaatgttatttaactgttagatacagtggcctgttgataagccccacttgtcttcagaacttggatttcttaaataaaacttttagtgttgtctatacactgctcaataagacacttgagtttaagcttttcccagggtggaaattattttacctgtccctttttatttatgtttagtgatggcctagtttttctgcagggccatgatggagaaatagcactctagccttagtccaatattgatttactttctttttttaggttttatgtatatgtttgcattttttagcattgtgttttgtccagttttgtgaaaatgttctgctagtatgaaagaaaacattttctatatgaagacatttgttttatgttaggtagcttacattttctcctctgcgtgtgtgtgtatgtgtgtaaaatcagaaatttagcatactatggaaagaaggcatggagcacttgggtttagaggaacctaaaacatcatagcttcattgttccagatgtaacaggtttgaaagagctcatcgccaagttcttgatccacttgcattccaggggagttttcttttgagtagtatgtttcttgtttgcatgttcctgttctttgtggaaactatgcatggtagcatttttgcttgctgtgttttccatacttaagaaaaagaggtttcagttggctgatagaatatcttttatgtaggacaaaacttttctgtgaagagtgttgagggggtgaagataggtaagaggtaagcacaatttttaatttaggctctgaaaaagtgtattgttctaaacgtatttggtatgcctatataggtctttaaaaatgggtatgtatgctgtttaatgtgcactgaacattttacattaatattgtactgttttacattaatactgcatgcttttctatgtgaattgaataaagaatgtcataagcactgtgttccttga

SEQ ID NO: 27891 - DNA, 2130 bp, Homo sapiens
cattcattcattcattcattcattaaaggaaaacgccttggagatcgcgcgtttcgaaagcgcgttttcgttttctctcctgggcgggttatggccctaccggggcgccgtagccggcccgcgcgtgcccagtcttggcgaagagtagcggtaggtcggcgggacttccgtgttggcgggattctgaacgctgccatggctcagaccgtgcagaatgttacattgtcgctcactctgcccatcacgtgccacatttgcttggggaaggtacgtcagcctgtcatatgcatcaacaaccatgtattttgttcgatttgtattgatttgtggttgaagaataatagccagtgtccagcttgcagagtccccatcactcctgaaaatccttgcaaagaaattataggaggaacaagtgaaagtgaacctatgctaagccatacggtcaggaagcatcttcggaaaactagacttgaattactacacaaagaatatgaggacgaaatagattgtttacagaaagaagtagaagagcttaagagtaaaaatctcagcttggagtcacagatcaaaactattctggatcctttaaccttggtgcagggcaaccaaaatgaagacaaacatctagtcacagataatccaagtaaaattaacccagaaactgtagcagagtggaagaaaaaactcagaacagctaatgaaatctatgaaaaagtgaaagatgatgtggataagctaaaggagaggaataaaaatgtgaatcaatcaacaaaaagaaaaatccagagcagcctttccagtgccagcccatcaaaagcaactaaaagttgactcattagaaaggtgtcatttgtggttttgtcctgagagaaatagaaaagttgttaaagttaccttttttcctcataaaagttctatacaaattggaattgataatctttagtcaagtatcaagtcaggatggtggattaacctgtacccagaatacttattgttcattttgaaaagactttgttcttttcatttttatttgggagtctttgtgaccagagaagttagggaggaggttatttttgtgttttggggttggttggttggttggttttgtttttggttttgtttttttactgaatttgatatgtatctcggttggatatacattgtttttttaaaaaatgttatttaactgttagatacagtggcctgttgataagccccacttgtcttcagaacttggatttcttaaataaaacttttagtgttgtctatacactgctcaataagacacttgagtttaagcttttcccagggtggaaattattttacctgtccctttttatttatgtttagtgatggcctagtttttctgcagggccatgatggagaaatagcactctagccttagtccaatattgatttactttctttttttaggttttatgtatatgtttgcattttttagcattgtgttttgtccagttttgtgaaaatgttctgctagtatgaaagaaaacattttctatatgaagacatttgttttatgttaggtagcttacattttctcctctgcgtgtgtgtgtatgtgtgtaaaatcagaaatttagcatactatggaaagaaggcatggagcacttgggtttagaggaacctaaaacatcatagcttcattgttccagatgtaacaggtttgaaagagctcatcgccaagttcttgatccacttgcattccaggggagttttcttttgagtagtatgtttcttgtttgcatgttcctgttctttgtggaaactatgcatggtagcatttttgcttgctgtgttttccatacttaagaaaaagaggtttcagttggctgatagaatatcttttatgtaggacaaaacttttctgtgaagagtgttgagggggtgaagataggtaagaggtaagcacaatttttaatttaggctctgaaaaagtgtattgttctaaacgtatttggtatgcctatataggtctttaaaaatgggtatgtatgctgtttaatgtgcactgaacattttacattaatattgtactgttttacattaatactgcatgcttttctatgtgaattgaataaagaatgtcataagcactgtgttccttga

SEQ ID NO: 27892 - DNA, 1187 bp, Homo sapiens
cttagatttggaggttttgcggtactgaggggagttgggggaagaatggaaataccattgacctcctaaaaagttgttacttgcaaagtttgggaggtgacatcaaaaactcaactgcccttacaatagtcattccatccatctgttgcttatttgaattctcatttatttttactttatggcattaaaatacaataaatctgtcaattatgtattttatattagtagtagcttaagattgggtcacttcatttcggtagatataattgttagtattatccttcaggacaaaaagcatctgctaacaacctgtggtttaaaaatataggccaactttatgttcaaacattatgttgataatatttttagcagtattacacagtggaggtccaaattggattagacttttgcattgaattccaaagtattggtaagtctagcacatactataaagtcttgctaaattcttgtgggtacattatttttaaaacctgtctgtctgtcggtatcacacagaggtcacttcttgagtaaaataagatgaccttaagaattcacataattcttgaagaagaatataagtcacgatgcttccacatgaggccgcgtcacaccaccatcgtttggaaatccagcaccccagccgttttaccctaagataacagtgcagcacttagtgtggttgaatgtgtcatgtgggaatgatttttggtcaccttttcagttcattgttagtccttttatgtttgtgtgcatctatgttcgtctgtgtgtttggtaaatatgaattgaatagatgacttcttattttatgttttaggccaagattgacagacacctaatattcatgacttgagaatattctgcagctataaattttgaaccattgatgtgcaaagcaagacctgaagcccactccggaaactaaagtgaggctcgctaaccctctagattgcctcacagttgtttgtttacaaagtaaactttacatccaggggatgaagagcacccaccagcagaagactttgcagaacctttaattggatgtgttaagtgtttttaatgagtgtatgaaatgtagaaagatgtacaagaaataaattaggagagattactttgtattgtactgccattcctactgtatttttatactttttggcagcattaaatatttttgttaaatagtc

SEQ ID NO: 27893 - DNA, 1709 bp, Homo sapiens
cgccgcgctcgggcgccgagtctgcgcgctgacgtccgacgctccaggtactttccccacggccgacagggcttggcgtgggggcggggcgcggcgcgcagcgcgcatgcgccgcagcgccagcgctctccccggatcgtgcggggcctgagcctctccgccggcgcaggctctgctcgcgccagctcgctcccgcagccatgcccaccaccatcgagcgggagttcgaagagttggatactcagcgtcgctggcagccgctgtacttggaaattcgaaatgagtcccatgactatcctcatagagtggccaagtttccagaaaacagaaatcgaaacagatacagagatgtaagcccatatgatcacagtcgtgttaaactgcaaaatgctgagaatgattatattaatgccagtttagttgacatagaagaggcacaaaggagttacatcttaacacagggtccacttcctaacacatgctgccatttctggcttatggtttggcagcagaagaccaaagcagttgtcatgctgaaccgcattgtggagaaagaatcggttaaatgtgcacagtactggccaacagatgaccaagagatgctgtttaaagaaacaggattcagtgtgaagctcttgtcagaagatgtgaagtcgtattatacagtacatctactacaattagaaaatatcaatagtggtgaaaccagaacaatatctcactttcattatactacctggccagattttggagtccctgaatcaccagcttcatttctcaatttcttgtttaaagtgagagaatctggctccttgaaccctgaccatgggcctgcggtgatccactgtagtgcaggcattgggcgctctggcaccttctctctggtagacacttgtcttgttttgatggaaaaaggagatgatattaacataaaacaagtgttactgaacatgagaaaataccgaatgggtcttattcagaccccagatcaactgagattctcatacatggctataatagaaggagcaaaatgtataaagggagattctagtatacagaaacgatggaaagaactttctaaggaagacttatctcctgcctttgatcattcaccaaacaaaataatgactgaaaaatacaatgggaacagaataggtctagaagaagaaaaactgacaggtgaccgatgtacaggactttcctctaaaatgcaagatacaatggaggagaacagtgagagtgctctacggaaacgtattcgagaggacagaaaggccaccacagctcagaaggtgcagcagatgaaacagaggctaaatgagaatgaacgaaaaagaaaaaggccaagattgacagacacctaatattcatgacttgagaatattctgcagctataaattttgaaccattgatgtgcaaagcaagacctgaagcccactccggaaactaaagtgaggctcgctaaccctctagattgcctcacagttgtttgtttacaaagtaaactttacatccaggggatgaagagcacccaccagcagaagactttgcagaacctttaattggatgtgttaagtgtttttaatgagtgtatgaaatgtagaaagatgtacaagaaataaattaggagagattactttgtattgtactgccattcctactgtatttttatactttttggcagcattaaatatttttgttaaatagtc

SEQ ID NO: 27894 - DNA, 2538 bp, Homo sapiens
cgccgcgctcgggcgccgagtctgcgcgctgacgtccgacgctccaggtactttccccacggccgacagggcttggcgtgggggcggggcgcggcgcgcagcgcgcatgcgccgcagcgccagcgctctccccggatcgtgcggggcctgagcctctccgccggcgcaggctctgctcgcgccagctcgctcccgcagccatgcccaccaccatcgagcgggagttcgaagagttggatactcagcgtcgctggcagccgctgtacttggaaattcgaaatgagtcccatgactatcctcatagagtggccaagtttccagaaaacagaaatcgaaacagatacagagatgtaagcccatatgatcacagtcgtgttaaactgcaaaatgctgagaatgattatattaatgccagtttagttgacatagaagaggcacaaaggagttacatcttaacacagggtccacttcctaacacatgctgccatttctggcttatggtttggcagcagaagaccaaagcagttgtcatgctgaaccgcattgtggagaaagaatcggttaaatgtgcacagtactggccaacagatgaccaagagatgctgtttaaagaaacaggattcagtgtgaagctcttgtcagaagatgtgaagtcgtattatacagtacatctactacaattagaaaatatcaatagtggtgaaaccagaacaatatctcactttcattatactacctggccagattttggagtccctgaatcaccagcttcatttctcaatttcttgtttaaagtgagagaatctggctccttgaaccctgaccatgggcctgcggtgatccactgtagtgcaggcattgggcgctctggcaccttctctctggtagacacttgtcttgttttgatggaaaaaggagatgatattaacataaaacaagtgttactgaacatgagaaaataccgaatgggtcttattcagaccccagatcaactgagattctcatacatggctataatagaaggagcaaaatgtataaagggagattctagtatacagaaacgatggaaagaactttctaaggaagacttatctcctgcctttgatcattcaccaaacaaaataatgactgaaaaatacaatgggaacagaataggtctagaagaagaaaaactgacaggtgaccgatgtacaggactttcctctaaaatgcaagatacaatggaggagaacagtgagagtgctctacggaaacgtattcgagaggacagaaaggccaccacagctcagaaggtgcagcagatgaaacagaggctaaatgagaatgaacgaaaaagaaaaaggtggttatattggcaacctattctcactaagatggggtttatgtcagtcattttggttggcgcttttgttggctggacactgttttttcagcaaaatgccctataaacaattaattttgcccagcaagcttctgcactagtaactgacagtgctacattaatcataggggtttgtctgcagcaaacgcctcatatcccaaaaacggtgcagtagaatagacatcaaccagataagtgatatttacagtcacaagcccaacatctcaggactcttgactgcaggttcctctgaaccccaaactgtaaatggctgtctaaaataaagacattcatgtttgttaaaaactggtaaattttgcaactgtattcatacatgtcaaacacagtatttcacctgaccaacattgagatatcctttatcacaggatttgtttttggaggctatctggattttaacctgcacttgatataagcaataaatattgtggttttatctacgttattggaaagaaaatgacatttaaataatgtgtgtaatgtataatgtactattgacatgggcatcaacacttttattcttaagcatttcagggtaaatatattttataagtatctatttaatcttttgtagttaactgtactttttaagagctcaatttgaaaaatctgttactaaaaaaataaattgtatgtcgattgaattgtactggatacattttccatttttctaaagagaagtttgatatgagcagttagaagttggaataagcaatttctactatatattgcatttcttttatgttttacagttttccccattttaaaaagaaaagcaaacaaagaaacaaaagtttttcctaaaaatatctttgaaggaaaattctccttactgggatagtcaggtaaacagttggtcaagactttgtaaagaaattggtttctgtaaatcccattattgatatgtttatttttcatgaaaatttcaatgtagttggggtagattatgatttaggaagcaaaagtaagaagcagcattttatgattcataatttcagtttactagactgaagttttgaagtaaacacttttcagtttctttctacttcaataaatagtatgattatatgcaaaccttacattgtcattttaacttaatgaatattttttaaagcaaactgtttaatgaatttaactgc

SEQ ID NO: 27895 - DNA, 848 bp, Homo sapiens
  misc_feature (747)..(747): n is a, c, g, or t
  misc_feature (752)..(752): n is a, c, g, or t
  misc_feature (764)..(765): n is a, c, g, or t
cccttaggctaggtacgaggccggtgcttaatcggccgagggtagaagatgtgaagtcgtattatacagtacatctactacaattagaaaatatcaatagtggtgaaaccagaacaatatctcactttcattatactacctggccagattttggagtccctgaatcaccagcttcatttctcaatttcttgtttaaagtgagagaatctggctccttgaaccctgaccatgggcctgcggtgatccactgtagtgcaggcattgggcgctctggcaccttctctctggtagacacttgtcttgttttgatggaaaaaggagatgatattaacataaaacaagtgttactgaacatgagaaaataccgaatgggtcttattcagaccccagatcaactgagattctcatacatggctataatagaaggagcaaaatgtataaagggagattctagtatacagaaacgatggaaagaactttctaaggaagacttatctcctgcctttgatcattcaccaaacaaaataatgactgaaaaatacaatgggaacagaataggtctagaagaagaaaaactgacaggtgaccgatgtacaggactttcctctaaaatgcaagatacaatggaggagaacagtgagagtgctctacggaaacgtattcgagaggacagaaaggccaccacagctcagaaggtgcagcagatgaaacagaggctaaatgagaatgaacgaaaaagaaaaaggncaagnttgacagacacnnatattcatgacttgagtaatatggcaacgagactgagcccatcgactataaggagactgctcatctatgagctggatgtgtgc

SEQ ID NO: 27896 - DNA, 741 bp, Homo sapiens
cttagatttggaggttttgcggtactgaggggagttgggggaagaatggaaataccattgacctcctaaaaagttgttacttgcaaagtttgggaggtgacatcaaaaactcaactgcccttacaatagtcattccatccatctgttgcttatttgaattctcatttatttttactttatggcattaaaatacaataaatctgtcaattatgtattttatattagtagtagcttaagattgggtcacttcatttcggtagatataattgttagtattatccttcaggacaaaaagcatctgctaacaacctgtggtttaaaaatataggccaactttatgttcaaacattatgttgataatatttttagcagtattacacagtggaggtccaaattggattagacttttgcattgaattccaaagtattggtaagtctagcacatactataaagtcttgctaaattcttgtgggtacattatttttaaaacctgtctgtctgtcggtatcacacagaggtcacttcttgagtaaaataagatgaccttaagaattcacataattcttgaagaagaatataagtcacgatgcttccacatgaggccgcgtcacaccaccatcgtttggaaatccagcaccccagccgttttaccctaagataacagtgcagcacttagtgtggttgaataagctgactgatgggaagtgcagggcaggtcacctcgttaataatcgagtaat

SEQ ID NO: 27897 - DNA, 231 bp, Homo sapiens
atatcgtcgacccacgcgtccggtaaactttacatccaggggatgaagagcacccaccagcagaagactttgcagaacctttaattggatgtgttaagtgtttttaatgagtgtatgaaatgtagaaagatgtacaagaaataaattaggagagattactttgtattgtactgccattcctactgtatttttatactttttggcagcattaaatatttttgttaaatagtc

SEQ ID NO: 27898 - DNA, 1778 bp, Homo sapiens
cgccgcgctcgggcgccgagtctgcgcgctgacgtccgacgctccaggtactttccccacggccgacagggcttggcgtgggggcggggcgcggcgcgcagcgcgcatgcgccgcagcgccagcgctctccccggatcgtgcggggcctgagcctctccgccggcgcaggctctgctcgcgccagctcgctcccgcagccatgcccaccaccatcgagcgggagttcgaagagttggatactcagcgtcgctggcagccgctgtacttggaaattcgaaatgagtcccatgactatcctcatagagtggccaagtttccagaaaacagaaatcgaaacagatacagagatgtaagcccatatgatcacagtcgtgttaaactgcaaaatgctgagaatgattatattaatgccagtttagttgacatagaagaggcacaaaggagttacatcttaacacagggtccacttcctaacacatgctgccatttctggcttatggtttggcagcagaagaccaaagcagttgtcatgctgaaccgcattgtggagaaagaatcggttaaatgtgcacagtactggccaacagatgaccaagagatgctgtttaaagaaacaggattcagtgtgaagctcttgtcagaagatgtgaagtcgtattatacagtacatctactacaattagaaaatatcaattatattgagaacttgtggatcacactgtatttgaaattattaatgctggatgttaaaaggtcactaaaaagtggtgaaaccagaacaatatctcactttcattatactacctggccagattttggagtccctgaatcaccagcttcatttctcaatttcttgtttaaagtgagagaatctggctccttgaaccctgaccatgggcctgcggtgatccactgtagtgcaggcattgggcgctctggcaccttctctctggtagacacttgtcttgttttgatggaaaaaggagatgatattaacataaaacaagtgttactgaacatgagaaaataccgaatgggtcttattcagaccccagatcaactgagattctcatacatggctataatagaaggagcaaaatgtataaagggagattctagtatacagaaacgatggaaagaactttctaaggaagacttatctcctgcctttgatcattcaccaaacaaaataatgactgaaaaatacaatgggaacagaataggtctagaagaagaaaaactgacaggtgaccgatgtacaggactttcctctaaaatgcaagatacaatggaggagaacagtgagagtgctctacggaaacgtattcgagaggacagaaaggccaccacagctcagaaggtgcagcagatgaaacagaggctaaatgagaatgaacgaaaaagaaaaaggccaagattgacagacacctaatattcatgacttgagaatattctgcagctataaattttgaaccattgatgtgcaaagcaagacctgaagcccactccggaaactaaagtgaggctcgctaaccctctagattgcctcacagttgtttgtttacaaagtaaactttacatccaggggatgaagagcacccaccagcagaagactttgcagaacctttaattggatgtgttaagtgtttttaatgagtgtatgaaatgtagaaagatgtacaagaaataaattaggagagattactttgtattgtactgccattcctactgtatttttatactttttggcagcattaaatatttttgttaaatagtc

SEQ ID NO: 27899 - DNA, 817 bp, Homo sapiens
ttgggaagcagaatgggtctgggaatagtgccatagccatcctcatggcaaggagctctgaggatggctatggcactattcccagccccattctgtcataggttcgcaggcatacatggctataatagaaggagcaaaatgtataaagggagattctagtatacagaaacgatggaaagaactttctaaggaagacttatctcctgcctttgatcattcaccaaacaaaataatgactgaaaaatacaatgggaacagaataggtctagaagaagaaaaactgacaggtgaccgatgtacaggactttcctctaaaatgcaagatacaatggaggagaacagtgagagtgctctacggaaacgtattcgagaggacagaaaggccaccacagctcagaaggtgcagcagatgaaacagaggctaaatgagaatgaacgaaaaagaaaaaggccaagattgacagacacctaatattcatgacttgagaatattctgcagctataaattttgaaccattgatgtgcaaagcaagacctgaagcccactccggaaactaaagtgaggctcgctaaccctctagattgcctcacagttgtttgtttacaaagtaaactttacatccaggggatgaagagcacccaccagcagaagactttgcagaacctttaattggatgtgttaagtgtttttaatgagtgtatgaaatgtagaaagatgtacaagaaataaattaggagagattactttgtattgtactgccattcctactgtatttttatactttttggcagcattaaatatttttgttaaatagtc

SEQ ID NO: 27900 - DNA, 2221 bp, Homo sapiens
cgccgcgctcgggcgccgagtctgcgcgctgacgtccgacgctccaggtactttccccacggccgacagggcttggcgtgggggcggggcgcggcgcgcagcgcgcatgcgccgcagcgccagcgctctccccggatcgtgcggggcctgagcctctccgccggcgcaggctctgctcgcgccagctcgctcccgcagccatgcccaccaccatcgagcgggagttcgaagagttggatactcagcgtcgctggcagccgctgtacttggaaattcgaaatgagtcccatgactatcctcatagagtggccaagtttccagaaaacagaaatcgaaacagatacagagatgtaagcccatatgatcacagtcgtgttaaactgcaaaatgctgagaatgattatattaatgccagtttagttgacatagaagaggcacaaaggagttacatcttaacacagggtccacttcctaacacatgctgccatttctggcttatggtttggcagcagaagaccaaagcagttgtcatgctgaaccgcattgtggagaaagaatcggttaaatgtgcacagtactggccaacagatgaccaagagatgctgtttaaagaaacaggattcagtgtgaagctcttgtcagaagatgtgaagtcgtattatacagtacatctactacaattagaaaatatcaatagtggtgaaaccagaacaatatctcactttcattatactacctggccagattttggagtccctgaatcaccagcttcatttctcaatttcttgtttaaagtgagagaatctggctccttgaaccctgaccatgggcctgcggtgatccactgtagtgcaggcattgggcgctctggcaccttctctctggtagacacttgtcttgttttgatggaaaaaggagatgatattaacataaaacaagtgttactgaacatgagaaaataccgaatgggtcttattcagaccccagatcaactgagattctcatacatggctataatagaaggagcaaaatgtataaagggagattctagtatacagaaacgatggaaagaactttctaaggaagacttatctcctgcctttgatcattcaccaaacaaaataatgactgaaaaatacaatgggaacagaataggtctagaagaagaaaaactgacaggtgaccgatgtacaggactttcctctaaaatgcaagatacaatggaggagaacagtgagagtgctctacggaaacgtattcgagaggacagaaaggccaccacagctcagaaggtgcagcagatgaaacagaggctaaatgagaatgaacgaaaaagaaaaaggccaagattgacagacacctaatattcatgacttgagaatattctgcagctataaattttgaaccattgatgtgcaaagcaagacctgaagcccactccggaaactaaagtgaggctcgctaaccctctagattgcctcacagttgtttgtttacaaagtaaactttacatccaggggatgaagagcacccaccagcagaagactttgcagaacctttaattggatgtgttaagtgtttttaatgagtgtatgaaatgtagaaagatgtacaagaaataaattaggagagattactttgtattgtactgccattcctactgtatttttatactttttggcagcattaaatatttttgttaaatagtcaaaaaaaaaaaaaaaaaaaaaaaaaaaaaagaaaagaaaaaaaaagaaaaaaaaatgaaacaaaaaaaaaaaaaaagaaggaggagggcgcgcgagccgagagaggaacctcgcccgagagggaggaccgcaatcaagagcgacacaccacgcatttgttgtgaaacaaaggggggccccacataagagggccgtcaattataaatcaacaatcagagagcggcgagggcgccggtattacaaacaaccgcggtcgtgaggagggagacaaaagaatgcggcaaacgcaggacggagcgaacactcatgggagagaagaaaagaacaccctatctctcgttggggggggggcgaggagcacaaccatatcaggggaggaacacaacacccccacgaagagagagagattaacagccccgccgggggagaataatgaacaaccactgagcaggtggtaatagagtgggttacacacaacgccgcggacaagatgctgcagcggccgtgcagag

SEQ ID NO: 27901 - DNA, 753 bp, Homo sapiens
cacgcctgcagtctcagttacttgggaggctgaggcacgagaatcacttgagcgtgggaggcagaggttgcagtgaaccaagattgtaccactgcactccaggctgggtgacagagcaagacgctgtctcaaaagaatattgaggcttttcccctcattattccagtgttcaaatagggtgaaaactatgtggatggttttatttgcgcctaggtcctctgtgttagagtactcaagtcctgctctgtgtgcacttcctttcacttgtttttatttcctcatagtgctctacggaaacgtattcgagaggacagaaaggccaccacagctcagaaggtgcagcagatgaaacagaggctaaatgagaatgaacgaaaaagaaaaaggccaagattgacagacacctaatattcatgacttgagaatattctgcagctataaattttgaaccattgatgtgcaaagcaagacctgaagcccactccggaaactaaagtgaggctcgctaaccctctagattgcctcacagttgtttgtttacaaagtaaactttacatccaggggatgaagagcacccaccagcagaagactttgcagaacctttaattggatgtgttaagtgtttttaatgagtgtatgaaatgtagaaagatgtacaagaaataaattaggagagattactttgtattgtactgccattcctactgtatttttatactttttggcagcattaaatatttttgttaaatagtc

SEQ ID NO: 27902 - DNA, 1361 bp, Homo sapiens
cgccgcgctcgggcgccgagtctgcgcgctgacgtccgacgctccaggtactttccccacggccgacagggcttggcgtgggggcggggcgcggcgcgcagcgcgcatgcgccgcagcgccagcgctctccccggatcgtgcggggcctgagcctctccgccggcgcaggctctgctcgcgccagctcgctcccgcagccatgcccaccaccatcgagcgggagttcgaagagttggatactcagcgtcgctggcagccgctgtacttggaaattcgaaatgagtcccatgactatcctcatagagtggccaagtttccagaaaacagaaatcgaaacagatacagagatgtaagcccatatgatcacagtcgtgttaaactgcaaaatgctgagaatgattatattaatgccagtttagttgacatagaagaggcacaaaggagttacatcttaacacagggtccacttcctaacacatgctgccatttctggcttatggtttggcagcagaagaccaaagcagttgtcatgctgaaccgcattgtggagaaagaatcggttaaatgtgcacagtactggccaacagatgaccaagagatgctgtttaaagaaacaggattcagtgtgaagctcttgtcagaagatgtgaagtcgtattatacagtacatctactacaattagaaaatatcaatagtggtgaaaccagaacaatatctcactttcattatactacctggccagattttggagtccctgaatcaccagcttcatttctcaatttcttgtttaaagtgagagaatctggctccttgaaccctgaccatgggcctgcggtgatccactgtagtgcaggcattgggcgctctggcaccttctctctggtagacacttgtcttgttttgatggaaaaaggagatgatattaacataaaacaagtgttactgaacatgagaaaataccgaatgggtcttattcagaccccagatcaactgagattctcatacatggctataatagaaggagcaaaatgtataaagggagattctagtatacaggtaaacttcatacaggttttaaatcatatctatttgttaaatacacatagcatcaaataactgcactccacttgagcccttgtctttgtttcaaagagtgtatttgaatttttgtggtaaatccagctggctgtcttaaaattgtaaaattttagctagcttcctcatatatactcagcctcaggttaaatcctgtgtgttacttaaaagcccttgtagaaacaagatttcattaaagaaactgaatttttcattttgggggtggttaatcttttaattattaaagtaactggaaacttgaga

SEQ ID NO: 27903 - DNA, 1699 bp, Homo sapiens
cttagatttggaggttttgcggtactgaggggagttgggggaagaatggaaataccattgacctcctaaaaagttgttacttgcaaagtttgggaggtgacatcaaaaactcaactgcccttacaatagtcattccatccatctgttgcttatttgaattctcatttatttttactttatggcattaaaatacaataaatctgtcaattatgtattttatattagtagtagcttaagattgggtcacttcatttcggtagatataattgttagtattatccttcaggacaaaaagcatctgctaacaacctgtggtttaaaaatataggccaactttatgttcaaacattatgttgataatatttttagcagtattacacagtggaggtccaaattggattagacttttgcattgaattccaaagtattggtaagtctagcacatactataaagtcttgctaaattcttgtgggtacattatttttaaaacctgtctgtctgtcggtatcacacagaggtcacttcttgagtaaaataagatgaccttaagaattcacataattcttgaagaagaatataagtcacgatgcttccacatgaggccgcgtcacaccaccatcgtttggaaatccagcaccccagccgttttaccctaagataacagtgcagcacttagtgtggttgaatgtgtcatgtgggaatgatttttggtcaccttttcagttcattgttagtccttttatgtttgtgtgcatctatgttcgtctgtgtgtttggtaaatatgaattgaatagatgacttcttattttatgttttaggccaagattgacagacacctaatattcatgacttgagaatattctgcagctataaattttgaaccattgatgtgcaaagcaagacctgaagcccactccggaaactaaagtgaggctcgctaaccctctagattgcctcacagttgtttgtttacaaagtaaactttacatccaggggatgaagagcacccaccagcagaagactttgcagaacctttaattggatgtgttaagtgtttttaatgagtgtatgaaatgtagaaagatgtacaagaaataaattaggagagattactttgtattgtactgccattcctactgtatttttatactttttggcagcattaaatatttttgttaaatagtcaaaaaaaaaaaaaaaaaaaaaaaaaaaaaagaaaagaaaaaaaaagaaaaaaaaatgaaacaaaaaaaaaaaaaaagaaggaggagggcgcgcgagccgagagaggaacctcgcccgagagggaggaccgcaatcaagagcgacacaccacgcatttgttgtgaaacaaaggggggccccacataagagggccgtcaattataaatcaacaatcagagagcggcgagggcgccggtattacaaacaaccgcggtcgtgaggagggagacaaaagaatgcggcaaacgcaggacggagcgaacactcatgggagagaagaaaagaacaccctatctctcgttggggggggggcgaggagcacaaccatatcaggggaggaacacaacacccccacgaagagagagagattaacagccccgccgggggagaataatgaacaaccactgagcaggtggtaatagagtgggttacacacaacgccgcggacaagatgctgcagcggccgtgcagag

SEQ ID NO: 27904 - DNA, 1133 bp, Homo sapiens
cttagatttggaggttttgcggtactgaggggagttgggggaagaatggaaataccattgacctcctaaaaagttgttacttgcaaagtttgggaggtgacatcaaaaactcaactgcccttacaatagtcattccatccatctgttgcttatttgaattctcatttatttttactttatggcattaaaatacaataaatctgtcaattatgtattttatattagtagtagcttaagattgggtcacttcatttcggtagatataattgttagtattatccttcaggacaaaaagcatctgctaacaacctgtggtttaaaaatataggccaactttatgttcaaacattatgttgataatatttttagcagtattacacagtggaggtccaaattggattagacttttgcattgaattccaaagtattggtaagtctagcacatactataaagtcttgctaaattcttgtgggtacattatttttaaaacctgtctgtctgtcggtatcacacagaggtcacttcttgagtgatgcttccacatgaggccgcgtcacaccaccatcgtttggaaatccagcaccccagccgttttaccctaagataacagtgcagcacttagtgtggttgaatgtgtcatgtgggaatgatttttggtcaccttttcagttcattgttagtccttttatgtttgtgtgcatctatgttcgtctgtgtgtttggtaaatatgaattgaatagatgacttcttattttatgttttaggccaagattgacagacacctaatattcatgacttgagaatattctgcagctataaattttgaaccattgatgtgcaaagcaagacctgaagcccactccggaaactaaagtgaggctcgctaaccctctagattgcctcacagttgtttgtttacaaagtaaactttacatccaggggatgaagagcacccaccagcagaagactttgcagaacctttaattggatgtgttaagtgtttttaatgagtgtatgaaatgtagaaagatgtacaagaaataaattaggagagattactttgtattgtactgccattcctactgtatttttatactttttggcagcattaaatatttttgttaaatagtc

SEQ ID NO: 27905 - DNA, 710 bp, Homo sapiens
gatcacgctcggcactacttaatggtgtggtatacacagaggtcacttcttgagtaaaataagatgaccttaagaattcacataattcttgaagaagaatataagtcacgatgcttccacatgaggccgcgtcacaccaccatcgtttggaaatccagcaccccagccgttttaccctaagataacagtgcagcacttagtgtggttgaatgtgtcatgtgggaatgatttttggtcaccttttcagttcattgttagtccttttatgtttgtgtgcatctatgttcgtctgtgtgtttggtaaatatgaattgaatagatgacttcttattttatgttttaggccaagattgacagacacctaatattcatgacttgagaatattctgcagctataaattttgaaccattgatgtgcaaagcaagacctgaagcccactccggaaactaaagtgaggctcgctaaccctctagattgcctcacagttgtttgtttacaaagtaaactttacatccaggggatgaagagcacccaccagcagaagactttgcagaacctttaattggatgtgttaagtgtttttaatgagtgtatgaaatgtagaaagatgtacaagaaataaattaggagagattactttgtattgtactgccattcctactgtatttttatactttttggcagcattaaatatttttgttaaatagtc

SEQ ID NO: 27906 - DNA, 1335 bp, Homo sapiens
catagcggaacgactctcttaagctccaccgctacactgctctacggaaacgtattcgagaggacagaaaggccaccacagctcagaaggtgcagcagatgaaacagaggctaaatgagaatgaacgaaaaagaaaaaggtggttatattggcaacctattctcactaagatggggtttatgtcagtcattttggttggcgcttttgttggctggacactgttttttcagcaaaatgccctataaacaattaattttgcccagcaagcttctgcactagtaactgacagtgctacattaatcataggggtttgtctgcagcaaacgcctcatatcccaaaaacggtgcagtagaatagacatcaaccagataagtgatatttacagtcacaagcccaacatctcaggactcttgactgcaggttcctctgaaccccaaactgtaaatggctgtctaaaataaagacattcatgtttgttaaaaactggtaaattttgcaactgtattcatacatgtcaaacacagtatttcacctgaccaacattgagatatcctttatcacaggatttgtttttggaggctatctggattttaacctgcacttgatataagcaataaatattgtggttttatctacgttattggaaagaaaatgacatttaaataatgtgtgtaatgtataatgtactattgacatgggcatcaacacttttattcttaagcatttcagggtaaatatattttataagtatctatttaatcttttgtagttaactgtactttttaagagctcaatttgaaaaatctgttactaaaaaaataaattgtatgtcgattgaattgtactggatacattttccatttttctaaagagaagtttgatatgagcagttagaagttggaataagcaatttctactatatattgcatttcttttatgttttacagttttccccattttaaaaagaaaagcaaacaaagaaacaaaagtttttcctaaaaatatctttgaaggaaaattctccttactgggatagtcaggtaaacagttggtcaagactttgtaaagaaattggtttctgtaaatcccattattgatatgtttatttttcatgaaaatttcaatgtagttggggtagattatgatttaggaagcaaaagtaagaagcagcattttatgattcataatttcagtttactagactgaagttttgaagtaaacacttttcagtttctttctacttcaataaatagtatgattatatgcaaaccttacattgtcattttaacttaatgaatattttttaaagcaaactgtttaatgaatttaactgc

SEQ ID NO: 27907 - DNA, 1489 bp, Homo sapiens
aaggatgccttatgggtgctccatcccccgctggcagccggtatacttggaaattcgaaatgagtcccatgactatcctcatagagtggccaagtttccagaaaacagaaatcgaaacagatacagagatgtaagcccatatgatcacagtcgtgttaaactgcaaaatgctgagaatgattatattaatgccagtttagttgacatagaagaggcacaaaggagttacatcttaacacagggtccacttcctaacacatgctgccatttctggcttatggtttggcagcagaagaccaaagcagttgtcatgctgaaccgcattgtggagaaagaatcggttaaatgtgcacagtactggccaacagatgaccaagagatgctgtttaaagaaacaggattcagtgtgaagctcttgtcagaagatgtgaagtcgtattatacagtacatctactacaattagaaaatatcaatagtggtgaaaccagaacaatatctcactttcattatactacctggccagattttggagtccctgaatcaccagcttcatttctcaatttcttgtttaaagtgagagaatctggctccttgaaccctgaccatgggcctgcggtgatccactgtagtgcaggcattgggcgctctggcaccttctctctggtagacacttgtcttgttttgatggaaaaaggagatgatattaacataaaacaagtgttactgaacatgagaaaataccgaatgggtcttattcagaccccagatcaactgagattctcatacatggctataatagaaggagcaaaatgtataaagggagattctagtatacagaaacgatggaaagaactttctaaggaagacttatctcctgcctttgatcattcaccaaacaaaataatgactgaaaaatacaatgggaacagaataggtctagaagaagaaaaactgacaggtgaccgatgtacaggactttcctctaaaatgcaagatacaatggaggagaacagtgagagtgctctacggaaacgtattcgagaggacagaaaggccaccacagctcagaaggtgcagcagatgaaacagaggctaaatgagaatgaacgaaaaagaaaaaggccaagattgacagacacctaatattcatgacttgagaatattctgcagctataaattttgaaccattgatgtgcaaagcaagacctgaagcccactccggaaactaaagtgaggctcgctaaccctctagattgcctcacagttgtttgtttacaaagtaaactttacatccaggggatgaagagcacccaccagcagaagactttgcagaacctttaattggatgtgttaagtgtttttaatgagtgtatgaaatgtagaaagatgtacaagaaataaattaggagagattactttgtattgtactgccattcctactgtatttttatactttttggcagcattaaatatttttgttaaatagtc

SEQ ID NO: 27908 - DNA, 1091 bp, Homo sapiens
ctcccgggttcaaacgttgacacttcagcctcccaagtagctgggattacaggcatgcacctctatgcccagataagagtggtgaaaccagaacaatatctcactttcattatactacctggccagattttggagtccctgaatcaccagcttcatttctcaatttcttgtttaaagtgagagaatctggctccttgaaccctgaccatgggcctgcggtgatccactgtagtgcaggcattgggcgctctggcaccttctctctggtagacacttgtcttgttttgatggaaaaaggagatgatattaacataaaacaagtgttactgaacatgagaaaataccgaatgggtcttattcagaccccagatcaactgagattctcatacatggctataatagaaggagcaaaatgtataaagggagattctagtatacagaaacgatggaaagaactttctaaggaagacttatctcctgcctttgatcattcaccaaacaaaataatgactgaaaaatacaatgggaacagaataggtctagaagaagaaaaactgacaggtgaccgatgtacaggactttcctctaaaatgcaagatacaatggaggagaacagtgagagtgctctacggaaacgtattcgagaggacagaaaggccaccacagctcagaaggtgcagcagatgaaacagaggctaaatgagaatgaacgaaaaagaaaaaggccaagattgacagacacctaatattcatgacttgagaatattctgcagctataaattttgaaccattgatgtgcaaagcaagacctgaagcccactccggaaactaaagtgaggctcgctaaccctctagattgcctcacagttgtttgtttacaaagtaaactttacatccaggggatgaagagcacccaccagcagaagactttgcagaacctttaattggatgtgttaagtgtttttaatgagtgtatgaaatgtagaaagatgtacaagaaataaattaggagagattactttgtattgtactgccattcctactgtatttttatactttttggcagcattaaatatttttgttaaatagtc

SEQ ID NO: 27909 - DNA, 1445 bp, Homo sapiens
  misc_feature (1344)..(1344): n is a, c, g, or t
  misc_feature (1349)..(1349): n is a, c, g, or t
  misc_feature (1361)..(1362): n is a, c, g, or t
cgccgcgctcgggcgccgagtctgcgcgctgacgtccgacgctccaggtactttccccacggccgacagggcttggcgtgggggcggggcgcggcgcgcagcgcgcatgcgccgcagcgccagcgctctccccggatcgtgcggggcctgagcctctccgccggcgcaggctctgctcgcgccagctcgctcccgcagccatgcccaccaccatcgagcgggagttcgaagagttggatactcagcgtcgctggcagccgctgtacttggaaattcgaaatgagtcccatgactatcctcatagagtggccaagtttccagaaaacagaaatcgaaacagatacagagatgtaagcccatatgatcacagtcgtgttaaactgcaaaatgctgagaatgattatattaatgccagtttagttgacatagaagaggcacaaaggagttacatcttaacacagggtccacttcctaacacatgctgccatttctggcttatggtttggcagcagaagaccaaagcagttgtcatgctgaaccgcattgtggagaaagaatcggttaaatgtgcacagtactggccaacagatgaccaagagatgctgtttaaagaaacaggattcagtgtgaagctcttgtcagaagatgtgaagtcgtattatacagtacatctactacaattagaaaatatcaatagtggtgaaaccagaacaatatctcactttcattatactacctggccagattttggagtccctgaatcaccagcttcatttctcaatttcttgtttaaagtgagagaatctggctccttgaaccctgaccatgggcctgcggtgatccactgtagtgcaggcattgggcgctctggcaccttctctctggtagacacttgtcttgttttgatggaaaaaggagatgatattaacataaaacaagtgttactgaacatgagaaaataccgaatgggtcttattcagaccccagatcaactgagattctcatacatggctataatagaaggagcaaaatgtataaagggagattctagtatacagaaacgatggaaagaactttctaaggaagacttatctcctgcctttgatcattcaccaaacaaaataatgactgaaaaatacaatgggaacagaataggtctagaagaagaaaaactgacaggtgaccgatgtacaggactttcctctaaaatgcaagatacaatggaggagaacagtgagagtgctctacggaaacgtattcgagaggacagaaaggccaccacagctcagaaggtgcagcagatgaaacagaggctaaatgagaatgaacgaaaaagaaaaaggncaagnttgacagacacnnatattcatgacttgagtaatatggcaacgagactgagcccatcgactataaggagactgctcatctatgagctggatgtgtgc

SEQ ID NO: 27910 - DNA, 505 bp, Homo sapiens
  misc_feature (405)..(405): n is a, c, g, or t
tgacaccccgcggggcggcaacgggcagggcctccagtgcaccttctgcgccgtggagccgcgggggctcagctgggcggtggtcgggtcctgaggccggagggcgggagcaggggaggggaaaagcaaaagcggggaaagaagccggggagcggtggaccagacgtccagacctcctgaaaggctggcggggaggcacaggcgggatcttccggaggtgagaatttttttttattatagcagaatggggaggaattgaggggaaaatggagatagaacctgaaagagccccaaacgccagaacctgtagctccccaagaataagatcttccagaagaactagacccaaaactagccgttggggaacaccgaaatccttggaggagcaacatccgcatgaccctntgtgttcctttaggcaaaaggacttgcttccattgtttgttcaattgtttgtgtttgttaaataaataaaacgattttcatgtatctttgaaattaaaaa

SEQ ID NO: 27911 - DNA, 373 bp, Homo sapiens
tcctcagcccacccccaccacctcattcccaaaacattttatggtgatggcaatacaaggaaacagtgaaacagtagacaagtatggcacagtaagaacaaactaagtttatatgagcgttaatattatcatggcccttccttgtttcaataatcataataattatatgttaacaaaatacttaaaactctgtgtatatatacagaattcacactgagcaattccctaatcctgtagaaaatactcatttgctaaagagcagccactcatcttgatgagaagtattatggctctccatcttcatgaggaaatcacagggaataggccgggcgtggtggctcatgcctgtaatcccagtactttgggaggctga

SEQ ID NO: 27912 - DNA, 509 bp, Homo sapiens
gtgatgaattttcccccgacttgtatactcatgtaaccatcactcagctcaaatccttgcactgtgttttaatcttttttttttttcccagtagtctattttttttggtcattttccctgccagcctgggaatccttcaagggcaggagcacctgctgttgggccctgtgcggtgtgggacacagtgtgagagagtattggtgcctgtgagctggtggctgtgtccccacccctgtgattgtccccacgtgtgtgtgtgacggaggctgtggccgtgggaacatgtggatctgtgagcctggccaggggccccagtgcaggggcaagcgccccctcctccactggaagagagccttgtccgatcccccagccaagggcctttgcagggagccgtggccctgctggagagtccccgccggctgacagcccggagattagtctccaaggccacaacgccagtttccataggcacgcaggcccgcgtcaggactgcgatttctcatcctggt

SEQ ID NO: 27913 - DNA, 804 bp, Homo sapiens
cccactgaaagctctactaaggctttgacatttcttgtccaccaatttctagataatgttcatctttgtccctcttcactagtggacacctaagtcagcttgtgctcttccaaatggggaagaaaaccatttggaagggtgtccatccagaagtagtagaaaactaataataatcagggagattatttaactaaattgtcaaatgattccagcactgttgattttgccataaatcttcttaattataaataataaaaccaagatgcaaaaaataaaacaagtattcatcaaactgactctgaagaaaagcaaagacacttaaataaaagggaacgacaagatttttaaagcaacctcagaaactctcaaaactgccctagaagtccgtgatgaattattcaagttggatgtgagttctgtgtggggaaaggtcaaaaggatagtttttgttaaagcctatccccagactgactttgacagctgctggcaaagctccgctgtcggctgggagttaactcaccaggacccacctgctgctgtggcccatttagcaatgaggaataaggcgggctggatgcagcctcaaacatcaaaggtgtgaaaagacttgactcccttacctggacactagggttgggcatgtgatgtggagataacagatgttatgatgctgtgccgccgtaaggaatacagaagatattcaaacccttgaaaatgaaaaggtctatgcaattctaagtattcctttaattagattattataacttgttaaagttattttccatgtggtaatcttactagtaa

SEQ ID NO: 27914 - DNA, 649 bp, Homo sapiens
cgcttgcgatctctcgccgccggcagaggctcctcgaagagcgacacggggctgaccaggcacggtggtcaaagccgcagagggagagcgggagcggtcgtgaggtcgtctggggagaagggcggaggcaaagccgaggaggtgcgggttgtggtccattctggaggacgctgatcgaatgccccaaacttcccggaatgtgtgtggacccttctagcctgaggagtcctgcaggtgtgaagctccacacctgcctccatagcactttgcctgtccctaagagggctcatcggagaagaaagaatggctgtcagccacctgccaaccatggtccaggaatcggtgaccttcaaggatgtggctatactgttcacccaggaagagtgggggcagctgagccccgcccagagggccctgtacagggacgtgatgctggagaactacagcaacctggtctcactgggactcttaggacccaaaccagatacgttttcccagctagaaaaaagggaagtgtggatgccagaggacacccctggaggcttctgtcttgatggagtctcgctctgttaccaagccggagcttgcagtgagccgagatcgcgccattgcactccagcctgggcgacagagcaagacttcatctcaa

SEQ ID NO: 27915 - DNA, 694 bp, Homo sapiens
cgcttgcgatctctcgccgccggcagaggctcctcgaagagcgacacggggctgaccaggcacggtggtcaaagccgcagagggagagcgggagcggtcgtgaggtcgtctggggagaagggcggaggcaaagccgaggaggtgcgggttgtggtccattctggaggacgctgatcgaatgccccaaacttcccggaatgtgtgtggacccttctagcctgaggagtcctgcaggtgtgaagctccacacctgcctccatagcactttgcctgtccctaagagggctcatcggagaagaaagaatggctgtcagccacctgccaaccatggtccaggaatcggtgaccttcaaggatgtggctatactgttcacccaggaagagtgggggcagctgagccccgcccagagggccctgtacagggacgtgatgctggagaactacagcaacctggtctcactgggactcttaggacccaaaccagatacgttttcccagctagaaaaaagggaagtgtggatgccagaggacacccctggaggcttctgtcttgactggatgactatgcctgccagtaagaaatctactgtcaaggcagagattcctgaagaagaattggatcaatggacaataaaggaaagattcagtagcagtagtcactggaagtgtgctagcctgctggagtggcaatgtg

SEQ ID NO: 27916 - DNA, 5477 bp, Homo sapiens
  misc_feature (2778)..(2778): n is a, c, g, or t
  misc_feature (2799)..(2799): n is a, c, g, or t
acagcttgcaacactcggcatcttttctggaggcgcctccttcagcagccgcagatggcatccggctgcgggctcggggctcgcaattgattctcccccttgcccacctcgagtccacggacgcacctctcccttcccctcctcccttcgcgcttctgggtctgagcccagctcgcgaccgccgggcagaggatcagtcgcggcggccgaggctgagcagcagcgctctcgctccctgacctggggagaagcgcccacccgggagagctgatccccggctgcctccagcgccccccaccttttgcactccaagccgggggctccagagaccccgctccccaggcgccactatgctggacccttcgtccagcgaagaagaatcggatgagatcgtggaggaggagagcggcaaggaggtgctcggctcggccccgtccggcgcgcgcctgtctcccagccgtaccagcgagggctcggccggcagcgccgggctggggggcggcggcgccggcgccggagccggggtgggtgcaggcggcggcgggggcagcggcgcgagcagcggcggcggggccggggggctgcaacccagcagccgcgctggcggcggccggccctccagccccagcccgtcggtggtgagcgagaaggagaaggaagagttggagcggctgcagaaagaggaggaggagaggaagaagaggctgcagctgtatgtgttcgtgatgcgctgcatcgcctacccctttaatgccaagcagcccaccgacatggctcgccggcagcagaagatcagcaaacagcagctgcagacagtcaaggaccggtttcaggctttcctcaatggggaaacccagatcatggctgacgaagccttcatgaacgctgtgcagagttactatgaggtgttcctgaagagcgaccgtgtggcccgcatggttcagagtggaggctgttccgccaacgactcccgggaggtcttcaagaagcacattgagaagagagtgcgcagcctgcctgagattgacggcctcagcaaggagactgtgctgagctcctggatggccaaatttgatgccatctaccgtggagaagaggacccgcggaagcagcaggcccggatgacagccagcgcagcctccgagctgattctgagcaaggagcaactctatgagatgttccagaacattcttgggatcaagaagttcgaacatcagctcctttacaatgcctgccagctggacaatccagatgagcaagcagcccagatcagacgagagctggatggacgtctacaaatggcagaccaaatagccagggaacgcaaatttcccaagtttgtatccaaagaaatggaaaacatgtacattgaggagctgaagtcatctgtcaacctgctcatggccaacttggagagcatgccggtatccaaaggcggggagttcaagctccagaaactcaaacgcagccacaatgcttccatcatcgacatgggcgaggagagtgagaaccagctctccaagtcagatgtcgtgctgtctttctcattggaggtggtaattatggaagtccaaggcctcaaatctttggctccaaatcgcatcgtatattgcacaatggaggtggaaggaggagagaaactacagactgatcaggccgaggcttctaaaccaacctggggcacccagggtgacttctccacaacccatgcactgccagctgtgaaggtgaagctgttcacagagagcacaggcgtcctggcgttggaggacaaggagcttgggcgggttattctccatcccaccccgaacagccccaaacagtcagagtggcacaaaatgacagtctccaaaaactgccccgaccaagatctcaaaatcaaacttgctgtccgaatggataagcctcaaaacatgaagcattctgggtatttatgggccatcggtaagaatgtctggaagagatggaagaaaaggttttttgtattggtgcaggtcagtcagtacacgtttgccatgtgcagttatcgggagaagaaagcggagcctcaggaacttctacaattggatggctacactgtggattacaccgacccccagccaggtttggagggtggccgagccttcttcaatgctgtcaaggagggagacaccgtgatatttgccagtgacgatgaacaagaccgcatcctgtgggtccaggccatgtatcgggccacggggcagtcacacaagcctgtgcccccgacccaagtccagaaactcaacgccaagggaggaaatgtacctcagctggatgcccctatctctcaattttacgcagatagagctcaaaaacatggcatggatgaatttatctcttccaacccctgtaactttgaccacgcttccctctttgagatggtacaacgccttactttggatcacagacttaatgattcctattcttgcctgggctggttcagtcctggccaggtgtttgtactagacgagtattgcgcccgaaatggagtccgggggtgtcaccgacatctctgctacctcagagacttgcttgaacgggcagaaaatggcgccatgatcgaccccacccttcttcactacagctttgccttctgtgcatcccatgtccatgggaacaggcctgatggaattggaactgtgactgttgaagaaaaggaacgttttgaagaaatcaaagagaggctccgagttctgctagaaaatcagattacacattttaggtattgctttccatttggtcgacctgaaggtgctntgaaagctactctctcactcntggaaagggttttgatgaaagatattgttaccccagtgccacaagaggaggtaaaaacagttatccgtaaatgtctggaacaggctgcgttagtcaactattctcggctctcagagtatgccaaaatcgaagagaatcaaaaggatgcagaaaatgtaggccggttaatcactcctgccaaaaagcttgaagatacaatacgtcttgctgaactagtcattgaagttcttcagcaaaatgaggagcaccacgcagagccacatgttgataaaggagaagcctttgcgtggtggtcagatttaatggtggagcatgcggagacgttcctgtcactctttgcagtagacatggatgcagccttagaggtgcaacctccagacacatgggacagttttccactatttcagctgctgaatgattttctccgtactgactataatttgtgcaatggaaaatttcacaaacacctgcaagacctgtttgccccacttgttgttagatatgtggatctgatggagtcctcaattgcacaatccattcacaggggctttgagcgggagtcatgggaaccagtcaagagtttaaccagtaacctacccaatgtgaacctacccaatgtgaaccttcccaaagtaccaaatctaccagttaacatccctctaggcatcccacaaatgcctactttttcggcaccgtcatggatggctgctatatatgatgcggataatgggtcaggcacctcagaagatctgttttggaaacttgacgcccttcagaccttcattcgggacctgcactggcctgaagaagagtttggaaagcacctggaacaacggctgaagttgatggcaagtgacatgatcgaatcttgtgtcaaaagaaccaggattgcatttgaagttaagctgcaaaaaaccagtcgatcaacagattttcgagtcccacagtcaatatgcaccatgtttaatgttatggttgatgccaaagctcaatcaacaaaactttgcagcatggaaatgggccaagagcatcaataccattcaaaaatagacgaactaattgaagaaactgttaaagaaatgataacactcttggttgcaaagttcgttactatcttggaaggagtgctggcaaaattatccagatatgacgaagggactttgttttcttcttttctgtcatttaccgtgaaggcagcttccaaatatgtggatgtacctaaacccgggatggacgtggccgacgcctacgtgactttcgtccgccattctcaggatgtcctgcgtgataaggtcaatgaggagatgtacatagaaaggttatttgatcaatggtacaacagctccatgaacgtgatctgcacctggttgacggaccggatggacttacagcttcatatttatcagttgaaaacactaattaggatggtaaagaaaacctacagagatttccgattgcaaggggtcctggactccaccttaaacagcaagacctatgaaacgatccggaaccgtctcactgtggaggaagccacagcatcagtgagtgaaggtgggggactgcagggcatcagcatgaaggacagcgatgaggaagacgaagaagacgattagaccatttggtcctagagtctgctgggacagagtcctgtaatcagtgcatgtccttagtctgttagttaaacccattaggaattttctgtcaactaccatgcccatgagatgtttatcaatacaactgccattttagctatgtggtaccaagattagcaaatgaccttcatatccactgatttcctgatgtccatgtctatatgtttacaagcaatatggagcaccattctttaaatactgttcatggagaatacatagtctaaccactaggcgtgtccctgttatcagcaaagatcaatgatgcttcattcatgtactatgtatgcattggtggtaaatggatgtgagggcaagtacatcaagtacattcactctgtttcacgtatgtggatgccagttaattaaatgagtacgtaaataaattaattaaaacacatagatctgctttgtgtttttatttttattttttgaaaaacaaaaggcaagtctccaacaattaacttttgatgctttctgttcccctaaaaccaaaaaatgaaccccttgtgtcgttgttaacccatcctttcatttactcatataattagccaaaaaaaaaaggatggctacataccaatggattgattctcttaattgccacggcaagggggcgatcctatcatgacttaacatcaagcgcgcagttcaaaactactgtcttctgtcaaagttttctcctcttaaatgttattttgcttttacgtctcaactgtgtatgtaaaaaaaacgaatatttaaattacaaccctagactaaaaatgtgtttataataagatgtggatatttccttcagtagattgtaaccataatttaaattattttgttccacactgttttttatatctgtcatgtacattgcattttgatctgtaactgcacaaccctggggtttgctgcagagctatttctttccatgtaaagtagtggatccatcttgcttttgccttatataaagcctacagttatggaagtgtggaaaactgtggcttctcaataaatattcagatgtcctaagaataaacgatt

SEQ ID NO: 27917 - DNA, 430 bp, Homo sapiens
taaagatttatccattagataaatttgccaggaaaaaatttatcatagaaaaactatttataaaatcctacaatctcaatgcccttcttagccaggcttgatttctggaaagaggaagcagttctaatatcaattcctaccagcccaggctgtggacagcaatcccatgcctacaaagctgatccagcagaagcatctcagggtgtgtgagggcaagtagagggtacaagtgaatggtaaacaaggaagagtggctgtctgaaaattcgttttcatgttttcctgtttctttacagaatatataggactcttttccaccactaactaatctatccactcatcaattctcatgatgtccctgcgctgataatggccaaacgaagagatgtacattataaaggttattttaatcgttagtaaaatgaccttt

SEQ ID NO: 27918 - DNA, 2604 bp, Homo sapiens
tggcacgaggctactctctcactcttggaaagggttttgatgaaagatattgttaccccagtgccacaagaggaggtaaaaacagttatccgtaaatgtctggaacaggctgcgttagtcaactattctcggctctcagagtatgccaaaatcgaagggaaaaagagagaaatgtatgagcatcctgtcttctgcttggcctcccaagtgatggatttaaccattcagaatcaaaaggatgcagaaaatgtaggccggttaatcactcctgccaaaaagcttgaagatacaatacgtcttgctgaactagtcattgaagttcttcagcaaaatgaggagcaccacgcagaggcctttgcgtggtggtcagatttaatggtggagcatgcggagacgttcctgtcactctttgcagtagacatggatgcagccttagaggtgcaacctccagacacatgggacagttttccactatttcagctgctgaatgattttctccgtactgactataatttgtgcaatggaaaatttcacaaacacctgcaagacctgtttgccccacttgttgttagatatgtggatctgatggagtcctcaattgcacaatccattcacaggggctttgagcgggagtcatgggaaccagtcaataatgggtcaggcacctcagaagatctgttttggaaacttgacgcccttcagaccttcattcgggacctgcactggcctgaagaagagtttggaaagcacctggaacaacggctgaagttgatggcaagtgacatgatcgaatcttgtgtcaaaagaaccaggattgcatttgaagttaagctgcaaaaaaccagtcgatcaacagattttcgagtcccacagtcaatatgcaccatgtttaatgttatggttgatgccaaagctcaatcaacaaaactttgcagcatggaaatgggccaagagcatcaataccattcaaaaatagacgaactaattgaagaaactgttaaagaaatgataacactcttggttgcaaagttcgttactatcttggaaggagtgctggcaaaattatccagatatgacgaagggactttgttttcttcttttctgtcatttaccgtgaaggcagcttccaaatatgtggatgtacctaaacccgggatggacgtggccgacgcctacgtgactttcgtccgccattctcaggatgtcctgcgtgataaggtcaatgaggagatgtacatagaaaggttatttgatcaatggtacaacagctccatgaacgtgatctgcacctggttgacggaccggatggacttacagcttcatatttatcagttgaaaacactaattaggatggtaaagaaaacctacagagatttccgattgcaaggggtcctggactccaccttaaacagcaagacctatgaaacgatccggaaccgtctcactgtggaggaagccacagcatcagtgagtgaaggtgggggactgcagggcatcagcatgaaggacagcgatgaggaagacgaagaagacgattagaccatttggtcctagagtctgctgggacagagtcctgtaatcagtgcatgtccttagtctgttagttaaacccattaggaattttctgtcaactaccatgcccatgagatgtttatcaatacaactgccattttagctatgtggtaccaagattagcaaatgaccttcatatccactgatttcctgatgtccatgtctatatgtttacaagcaatatggagcaccattctttaaatactgttcatggagaatacatagtctaaccactaggcgtgtccctgttatcagcaaagatcaatgatgcttcattcatgtactatgtatgcattggtggtaaatggatgtgagggcaagtacatcaagtacattcactctgtttcacgtatgtggatgccagttaattaaatgagtacgtaaataaattaattaaaacacatagatctgctttgtgtttttatttttattttttgaaaaacaaaaggcaagtctccaacaattaacttttgatgctttctgttcccctaaaaccaaaaaatgaaccccttgtgtcgttgttaacccatcctttcatttactcatataattagccaaaaaaaaaaggatggctacataccaatggattgattctcttaattgccacggcaagggggcgatcctatcatgacttaacatcaagcgcgcagttcaaaactactgtcttctgtcaaagttttctcctcttaaatgttattttgcttttacgtctcaactgtgtatgtaaaaaaaacgaatatttaaattacaaccctagactaaaaatgtgtttataataagatgtggatatttccttcagtagattgtaaccataatttaaattattttgttccacactgttttttatatctgtcatgtacattgcattttgatctgtaactgcacaaccctggggtttgctgcagagctatttctttccatgtaaagtagtggatccatcttgcttttgccttatataaagcctacagttatggaagtgtggaaaactgtggcttctcaataaatattcagatgtcctaagaataaacgatt

SEQ ID NO: 27919 - DNA, 3487 bp, Homo sapiens
  misc_feature (809)..(809): n is a, c, g, or t
  misc_feature (830)..(830): n is a, c, g, or t
atggtcctcagcggagacaggacaaggagtcaaggtcaggcatggtcccctctttctttggactatgtgacaagggggatgtggaattcatttgtgtcgaagatcagggcctcttgggagggttcgggtccctgtcagccttgtgaagcagcttgaagagcccggttccaatgttcatcgggattcccatgatgatgccaacgatggtcctcagctcaacgatggtcctcagctcaacgatggtcctcagctcaacgatggtcctcagctcaacgatggtcctcagctcaacgatggtcctcagctcaacgatggtcctcagctggatgcccctatctctcaattttacgcagatagagctcaaaaacatggcatggatgaatttatctcttccaacccctgtaactttgaccacgcttccctctttgagatggtacaacgccttactttggatcacagacttaatgattcctattcttgcctgggctggttcagtcctggccaggtgtttgtactagacgagtattgcgcccgaaatggagtccgggggtgtcaccgacatctctgctacctcagagacttgcttgaacgggcagaaaatggcgccatgatcgaccccacccttcttcactacagctttgccttctgtgcatcccatgtccatgggaacaggcctgatggaattggaactgtgactgttgaagaaaaggaacgttttgaagaaatcaaagagaggctccgagttctgctagaaaatcagattacacattttaggtattgctttccatttggtcgacctgaaggtgctntgaaagctactctctcactcntggaaagggttttgatgaaagatattgttaccccagtgccacaagaggaggtaaaaacagttatccgtaaatgtctggaacaggctgcgttagtcaactattctcggctctcagagtatgccaaaatcgaagagaatcaaaaggatgcagaaaatgtaggccggttaatcactcctgccaaaaagcttgaagatacaatacgtcttgctgaactagtcattgaagttcttcagcaaaatgaggagcaccacgcagaggcctttgcgtggtggtcagatttaatggtggagcatgcggagacgttcctgtcactctttgcagtagacatggatgcagccttagaggtgcaacctccagacacatgggacagttttccactatttcagctgctgaatgattttctccgtactgactataatttgtgcaatggaaaatttcacaaacacctgcaagacctgtttgccccacttgttgttagatatgtggatctgatggagtcctcaattgcacaatccattcacaggggctttgagcgggagtcatgggaaccagtcaagagtttaaccagtaacctacccaatgtgaacctacccaatgtgaaccttcccaaagtaccaaatctaccagttaacatccctctaggcatcccacaaatgcctactttttcggcaccgtcatggatggctgctatatatgatgcggataatgggtcaggcacctcagaagatctgttttggaaacttgacgcccttcagaccttcattcgggacctgcactggcctgaagaagagtttggaaagcacctggaacaacggctgaagttgatggcaagtgacatgatcgaatcttgtgtcaaaagaaccaggattgcatttgaagttaagctgcaaaaaaccagtcgatcaacagattttcgagtcccacagtcaatatgcaccatgtttaatgttatggttgatgccaaagctcaatcaacaaaactttgcagcatggaaatgggccaagagcatcaataccattcaaaaatagacgaactaattgaagaaactgttaaagaaatgataacactcttggttgcaaagttcgttactatcttggaaggagtgctggcaaaattatccagatatgacgaagggactttgttttcttcttttctgtcatttaccgtgaaggcagcttccaaatatgtggatgtacctaaacccgggatggacgtggccgacgcctacgtgactttcgtccgccattctcaggatgtcctgcgtgataaggtcaatgaggagatgtacatagaaaggttatttgatcaatggtacaacagctccatgaacgtgatctgcacctggttgacggaccggatggacttacagcttcatatttatcagttgaaaacactaattaggatggtaaagaaaacctacagagatttccgattgcaaggggtcctggactccaccttaaacagcaagacctatgaaacgatccggaaccgtctcactgtggaggaagccacagcatcagtgagtgaaggtgggggactgcagggcatcagcatgaaggacagcgatgaggaagacgaagaagacgattagaccatttggtcctagagtctgctgggacagagtcctgtaatcagtgcatgtccttagtctgttagttaaacccattaggaattttctgtcaactaccatgcccatgagatgtttatcaatacaactgccattttagctatgtggtaccaagattagcaaatgaccttcatatccactgatttcctgatgtccatgtctatatgtttacaagcaatatggagcaccattctttaaatactgttcatggagaatacatagtctaaccactaggcgtgtccctgttatcagcaaagatcaatgatgcttcattcatgtactatgtatgcattggtggtaaatggatgtgagggcaagtacatcaagtacattcactctgtttcacgtatgtggatgccagttaattaaatgagtacgtaaataaattaattaaaacacatagatctgctttgtgtttttatttttattttttgaaaaacaaaaggcaagtctccaacaattaacttttgatgctttctgttcccctaaaaccaaaaaatgaaccccttgtgtcgttgttaacccatcctttcatttactcatataattagccaaaaaaaaaaggatggctacataccaatggattgattctcttaattgccacggcaagggggcgatcctatcatgacttaacatcaagcgcgcagttcaaaactactgtcttctgtcaaagttttctcctcttaaatgttattttgcttttacgtctcaactgtgtatgtaaaaaaaacgaatatttaaattacaaccctagactaaaaatgtgtttataataagatgtggatatttccttcagtagattgtaaccataatttaaattattttgttccacactgttttttatatctgtcatgtacattgcattttgatctgtaactgcacaaccctggggtttgctgcagagctatttctttccatgtaaagtagtggatccatcttgcttttgccttatataaagcctacagttatggaagtgtggaaaactgtggcttctcaataaatattcagatgtcctaagaataaacgatt

SEQ ID NO: 27920 - DNA, 3643 bp, Homo sapiens
  misc_feature (233)..(233): n is a, c, g, or t
  misc_feature (874)..(874): n is a, c, g, or t
tactaaatgatgtttatttcactatatcccatgtgctctgactctgagacttcaaggtttgaagggggctaaacatgaaatacaagttcccctggaattcagactggttgaatccaagcagtttcactggccaagaaaacctttatgttttggccgggcacagtggttcacgcctgtaatgccagcactttggaaggctgaggcgggcggatctcctgaggtaaggagtttgngaccatcctggccagcaaggtgaaactctgtctctactaaaaatacaaaaatcagcccggcgtggtggcgggtgcctgtaatcccagctactcaggaggctgaggcaggaggatcacttgaacccaggaggcagaggttgcagtgagctgagatcgcaccactgccctccagcctgggcaacagaataaatgagactccgtctccaaaaaaaacaagaaaaagaaaagaaagaaagaaaacctcctttatgttttaaatattactgttttcccaaaggaaaaaagtttgtaatttttggaacataatgacattgtcaaactcatgaactcagctctaaaaagaaggcaacataagccagggttcagattcttcttgagctgggtaaaaatacaacactttcagtttaagagaaactaaaaacaaagaaaacaattaagtacattgtttcagtttaactgataaaatttcaattgtaacaaccagtagcacaaactatcacaacccattcaataatctactcctaacacccttttaagaattattattcctgactaatggcccaggcatatccaatttttcttttctatctcctccctggacaacttgaagcagacatttgaatctgcattttcaaaatgancgttccaacatacgcgagcctgcaatgaaaaattacgctgtagcatttaataactaatctaaaaaacaaatgtaacagcaatcaatattaaacttctgttaatcttcccacttcaggtagcataattacaatctagagagtggtatagtacatttatgctgtctttaaagaacatgtgtacaaaatgtcactaaatttgatatgggctgtcatagacttaatatagcttcatatgcaaatttgaagctggagcactgcttttttctaatatatattataataatggtgataataataaaatggctttatggtttgctcactactaattacatggcacttaacatttgcatgaattttttttaaaaaactgataactattctcaatttcttatccactagttctaatggccataaaagtagcctgccactttcgctgaattttaacagaatcaaaaggatgcagaaaatgtaggccggttaatcactcctgccaaaaagcttgaagatacaatacgtcttgctgaactagtcattgaagttcttcagcaaaatgaggagcaccacgcagaggcctttgcgtggtggtcagatttaatggtggagcatgcggagacgttcctgtcactctttgcagtagacatggatgcagccttagaggtgcaacctccagacacatgggacagttttccactatttcagctgctgaatgattttctccgtactgactataatttgtgcaatggaaaatttcacaaacacctgcaagacctgtttgccccacttgttgttagatatgtggatctgatggagtcctcaattgcacaatccattcacaggggctttgagcgggagtcatgggaaccagtcaataatgggtcaggcacctcagaagatctgttttggaaacttgacgcccttcagaccttcattcgggacctgcactggcctgaagaagagtttggaaagcacctggaacaacggctgaagttgatggcaagtgacatgatcgaatcttgtgtcaaaagaaccaggattgcatttgaagttaagctgcaaaaaaccagtcgatcaacagattttcgagtcccacagtcaatatgcaccatgtttaatgttatggttgatgccaaagctcaatcaacaaaactttgcagcatggaaatgggccaagagcatcaataccattcaaaaatagacgaactaattgaagaaactgttaaagaaatgataacactcttggttgcaaagttcgttactatcttggaaggagtgctggcaaaattatccagatatgacgaagggactttgttttcttcttttctgtcatttaccgtgaaggcagcttccaaatatgtggatgtacctaaacccgggatggacgtggccgacgcctacgtgactttcgtccgccattctcaggatgtcctgcgtgataaggtcaatgaggagatgtacatagaaaggttatttgatcaatggtacaacagctccatgaacgtgatctgcacctggttgacggaccggatggacttacagcttcatatttatcagttgaaaacactaattaggatggtaaagaaaacctacagagatttccgattgcaaggggtcctggactccaccttaaacagcaagacctatgaaacgatccggaaccgtctcactgtggaggaagccacagcatcagtgagtgaaggtgggggactgcagggcatcagcatgaaggacagcgatgaggaagacgaagaagacgattagaccatttggtcctagagtctgctgggacagagtcctgtaatcagtgcatgtccttagtctgttagttaaacccattaggaattttctgtcaactaccatgcccatgagatgtttatcaatacaactgccattttagctatgtggtaccaagattagcaaatgaccttcatatccactgatttcctgatgtccatgtctatatgtttacaagcaatatggagcaccattctttaaatactgttcatggagaatacatagtctaaccactaggcgtgtccctgttatcagcaaagatcaatgatgcttcattcatgtactatgtatgcattggtggtaaatggatgtgagggcaagtacatcaagtacattcactctgtttcacgtatgtggatgccagttaattaaatgagtacgtaaataaattaattaaaacacatagatctgctttgtgtttttatttttattttttgaaaaacaaaaggcaagtctccaacaattaacttttgatgctttctgttcccctaaaaccaaaaaatgaaccccttgtgtcgttgttaacccatcctttcatttactcatataattagccaaaaaaaaaaggatggctacataccaatggattgattctcttaattgccacggcaagggggcgatcttttctcctcttaaatgttattttgcttttacgtctcaactgtgtatgtaaaaaaaacgaatatttaaattacaaccctagactaaaaatgtgtttataataagatgtggatatttccttcagtagattgtaaccataatttaaattattttgttccacactgttttttatatctgtcatgtacattgcattttgatctgtaactgcacaaccctggggtttgctgcagagctatttctttccatgtaaagtagtggatccatcttgcttttgccttatataaagcctacagttatggaagtgtggaaaactgtggcttctcaataaatattcagatgtcctaagaataaacgatt

SEQ ID NO: 27921 - DNA, 1756 bp, Homo sapiens
taaagatttatccattagataaatttgccaggaaaaaatttatcatagaaaaactatttataaaatcctacaatctcaatgcccttcttagccaggcttgatttctggaaagaggaagcagttctaatatcaattcctaccagcccaggctgtggacagcaatcccatgcctacaaagctgatccagcagaagcatctcagggtgtgtgagggcaagtagagggtacaagtgaatggtaaacaaggaagagtggctgtctgaaaattcgttttcatgttttcctgtttctttacagaaaaacccgggatggacgtggccgacgcctacgtgactttcgtccgccattctcaggatgtcctgcgtgataaggtcaatgaggagatgtacatagaaaggttatttgatcaatggtacaacagctccatgaacgtgatctgcacctggttgacggaccggatggacttacagcttcatatttatcagttgaaaacactaattaggatggtaaagaaaacctacagagatttccgattgcaaggggtcctggactccaccttaaacagcaagacctatgaaacgatccggaaccgtctcactgtggaggaagccacagcatcagtgagtgaaggtgggggactgcagggcatcagcatgaaggacagcgatgaggaagacgaagaagacgattagaccatttggtcctagagtctgctgggacagagtcctgtaatcagtgcatgtccttagtctgttagttaaacccattaggaattttctgtcaactaccatgcccatgagatgtttatcaatacaactgccattttagctatgtggtaccaagattagcaaatgaccttcatatccactgatttcctgatgtccatgtctatatgtttacaagcaatatggagcaccattctttaaatactgttcatggagaatacatagtctaaccactaggcgtgtccctgttatcagcaaagatcaatgatgcttcattcatgtactatgtatgcattggtggtaaatggatgtgagggcaagtacatcaagtacattcactctgtttcacgtatgtggatgccagttaattaaatgagtacgtaaataaattaattaaaacacatagatctgctttgtgtttttatttttattttttgaaaaacaaaaggcaagtctccaacaattaacttttgatgctttctgttcccctaaaaccaaaaaatgaaccccttgtgtcgttgttaacccatcctttcatttactcatataattagccaaaaaaaaaaggatggctacataccaatggattgattctcttaattgccacggcaagggggcgatcctatcatgacttaacatcaagcgcgcagttcaaaactactgtcttctgtcaaagttttctcctcttaaatgttattttgcttttacgtctcaactgtgtatgtaaaaaaaacgaatatttaaattacaaccctagactaaaaatgtgtttataataagatgtggatatttccttcagtagattgtaaccataatttaaattattttgttccacactgttttttatatctgtcatgtacattgcattttgatctgtaactgcacaaccctggggtttgctgcagagctatttctttccatgtaaagtagtggatccatcttgcttttgccttatataaagcctacagttatggaagtgtggaaaactgtggcttctcaataaatattcagatgtcctaagaataaacgatt

SEQ ID NO: 27922 - DNA, 2518 bp, Homo sapiens
  misc_feature (233)..(233): n is a, c, g, or t
  misc_feature (874)..(874): n is a, c, g, or t
tactaaatgatgtttatttcactatatcccatgtgctctgactctgagacttcaaggtttgaagggggctaaacatgaaatacaagttcccctggaattcagactggttgaatccaagcagtttcactggccaagaaaacctttatgttttggccgggcacagtggttcacgcctgtaatgccagcactttggaaggctgaggcgggcggatctcctgaggtaaggagtttgngaccatcctggccagcaaggtgaaactctgtctctactaaaaatacaaaaatcagcccggcgtggtggcgggtgcctgtaatcccagctactcaggaggctgaggcaggaggatcacttgaacccaggaggcagaggttgcagtgagctgagatcgcaccactgccctccagcctgggcaacagaataaatgagactccgtctccaaaaaaaacaagaaaaagaaaagaaagaaagaaaacctcctttatgttttaaatattactgttttcccaaaggaaaaaagtttgtaatttttggaacataatgacattgtcaaactcatgaactcagctctaaaaagaaggcaacataagccagggttcagattcttcttgagctgggtaaaaatacaacactttcagtttaagagaaactaaaaacaaagaaaacaattaagtacattgtttcagtttaactgataaaatttcaattgtaacaaccagtagcacaaactatcacaacccattcaataatctactcctaacacccttttaagaattattattcctgactaatggcccaggcatatccaatttttcttttctatctcctccctggacaacttgaagcagacatttgaatctgcattttcaaaatgancgttccaacatacgcgagcctgcaatgaaaaattacgctgtagcatttaataactaatctaaaaaacaaatgtaacagcaatcaatattaaacttctgttaatcttcccacttcaggtagcataattacaatctagagagtggtatagtacatttatgctgtctttaaagaacatgtgtacaaaatgtcactaaatttgatatgggctgtcatagacttaatatagcttcatatgcaaatttgaagctggagcactgcttttttctaatatatattataataatggtgataataataaaatggctttatggtttgctcactactaattacatggcacttaacatttgcatgaattttttttaaaaaactgataactattctcaatttcttatccactagttctaatggccataaaagtagcctgccactttcgctgaattttaacagaatcaaaaggatgcagaaaatgtaggccggttaatcactcctgccaaaaagcttgaagatacaatacgtcttgctgaactagtcattgaagttcttcagcaaaatgaggagcaccacgcagaggcctttgcgtggtggtcagatttaatggtggagcatgcggagacgttcctgtcactctttgcagtagacatggatgcagccttagaggtgcaacctccagacacatgggacagttttccactatttcagctgctgaatgattttctccgtactgactataatttgtgcaatggaaaatttcacaaacacctgcaagacctgtttgccccacttgttgttagatatgtggatctgatggagtcctcaattgcacaatccattcacaggggctttgagcgggagtcatgggaaccagtcaataatgggtcaggcacctcagaagatctgttttggaaacttgacgcccttcagaccttcattcgggacctgcactggcctgaagaagagtttggaaagcacctggaacaacggctgaagttgatggcaagtgacatgatcgaatcttgtgtcaaaagaaccaggattgcatttgaagttaagctgcaaaaaaccagtcgatcaacagattttcgagtcccacagtcaatatgcaccatgtttaatgttatggttgatgccaaagctcaatcaacaaaactttgcagcatggaaatgggccaagaggtaaaaaaaaaaaaaaaaaatacagatttttttttccctcttcattgatcatgtagaagaaaacttcacaaattccttccatctaccctagtctgctagtttcagaaatacactctaacatttgtggattaagccatggatgagtgttcagtatctgtttgtcaagtagatttctaaggcatgtgctgatgagaatgtcagtcacttggaagtgattcttggctggagttggggtggccatatagttctctaagctaaatgaagtttgacgaccttatttattaggctggtgtctcgaacagatctgtgtttgccagaatgaaagtcattttcacatttgaagtgcattttatcactttgaacatctggacagcaagagaggcctttcttgcatcaaacaacttccaggatgtataatgttagatcaccctgctacccaatccccagccagcaggttctgaatttccaaaa

SEQ ID NO: 27923 - DNA, 3770 bp, Homo sapiens
  misc_feature (1)..(1): n is a, c, g, or t
  misc_feature (629)..(629): n is a, c, g, or t
  misc_feature (1050)..(1050): n is a, c, g, or t
  misc_feature (1253)..(1253): n is a, c, g, or t
  misc_feature (2782)..(2782): n is a, c, g, or t
  misc_feature (2803)..(2803): n is a, c, g, or t
ntttggccacacagaattggcataccaattcatgttccatgggatctaggtggggttctactcccagccacaaggacagaggacataagctatgcctatgcacatcagcacagcatattactggccatagaaattggccagtaatatggccaattggacatgtacttaagttagactttgggtgagaatttggggatgaaagactgtctccatcttccttgcatattacaagaggaaatattcacttttccgttagatagcatgatgtgatgttgtgcagtccacatctttagcaacatttctgtgaagataggggagccaaactgagcatgaagccaccccagaggaaccaaagccaagattttaacaaaaatctcagttgtggtgatatcacctgagccctgattccagcctttcctgaagctgggtctaccccaggatattttcttttgttgttttaagccagtttgaggtggatttttctgtcacttgcaaaaaaaaataaaaatgtcaaactgacttggcttgcttctcactccatcagttatggaatagggcttggggagggcaagtttatgtttcaagtggtaaatgactgtttgggaaggtgattgatccaaagcacattncaggtgacttagaagtatgaagaaacaaatagcatggttagcacgtgttgcaattacaactaaatgtataagcaagaaaggaaaaaatagaggtcagttatgataccaaattgctctatcttctaaagaattttaatcacatttttcatcacttcattaatttggttcaatttttcttgaaaacagtaactattattcttagaaatagacacagactatgtttgaaacctctcaaatgagctccttttgaattattcatgtgagaaaatctctgtagatatccagaaatagggtctctttctgtttccctcacttaaaaacaaatgactgcattttactaaaaagaaaaactaaactgaaaccatatttgaaaaataacaccccatttttcttcctacaaatcaaatttgctgaaggaaantggggaaaaatagaactgtaataaagcatttcaatgtttcttactatatgtttatgtacgtgtttcttacctgttacaatgtataaataactagcaggcaggcagctgtctactcaaataggctgaacatttttctagcacaaggccatgagatctgggtgaatttcactagtagtagatgtgattctaactctgggccatgngacaaagaccttctttataaatcagctttctattttctcctctgctcatacttttctttttcttcccaaggaacgcaaatttcccaagtttgtatccaaagaaatggaaaacatgtacattgaggagctgaagtcatctgtcaacctgctcatggccaacttggagagcatgccggtatccaaaggcggggagttcaagctccagaaactcaaacgcagccacaatgcttccatcatcgacatgggcgaggagagtgagaaccagctctccaagtcagatgtcgtgctgtctttctcattggaggtggtaattatggaagtccaaggcctcaaatctttggctccaaatcgcatcgtatattgcacaatggaggtggaaggaggagagaaactacagactgatcaggccgaggcttctaaaccaacctggggcacccagggtgacttctccacaacccatgcactgccagctgtgaaggtgaagctgttcacagagagcacaggcgtcctggcgttggaggacaaggagcttgggcgggttattctccatcccaccccgaacagccccaaacagtcagagtggcacaaaatgacagtctccaaaaactgccccgaccaagatctcaaaatcaaacttgctgtccgaatggataagcctcaaaacatgaagcattctgggtatttatgggccatcggtaagaatgtctggaagagatggaagaaaaggttttttgtattggtgcaggtcagtcagtacacgtttgccatgtgcagttatcgggagaagaaagcggagcctcaggaacttctacaattggatggctacactgtggattacaccgacccccagccaggtttggagggtggccgagccttcttcaatgctgtcaaggagggagacaccgtgatatttgccagtgacgatgaacaagaccgcatcctgtgggtccaggccatgtatcgggccacggggcagtcacacaagcctgtgcccccgacccaagtccagaaactcaacgccaagggaggaaatgtacctcagctggatgcccctatctctcaattttacgcagatagagctcaaaaacatggcatggatgaatttatctcttccaacccctgtaactttgaccacgcttccctctttgagatggtacaacgccttactttggatcacagacttaatgattcctattcttgcctgggctggttcagtcctggccaggtgtttgtactagacgagtattgcgcccgaaatggagtccgggggtgtcaccgacatctctgctacctcagagacttgcttgaacgggcagaaaatggcgccatgatcgaccccacccttcttcactacagctttgccttctgtgcatcccatgtccatgggaacaggcctgatggaattggaactgtgactgttgaagaaaaggaacgttttgaagaaatcaaagagaggctccgagttctgctagaaaatcagattacacattttaggtattgctttccatttggtcgacctgaaggtgctntgaaagctactctctcactcntggaaagggttttgatgaaagatattgttaccccagtgccacaagaggaggtaaaaacagttatccgtaaatgtctggaacaggctgcgttagtcaactattctcggctctcagagtatgccaaaatcgaagagaatcaaaaggatgcagaaaatgtaggccggttaatcactcctgccaaaaagcttgaagatacaatacgtcttgctgaactagtcattgaagttcttcagcaaaatgaggagcaccacgcagaggcctttgcgtggtggtcagatttaatggtggagcatgcggagacgttcctgtcactctttgcagtagacatggatgcagccttagaggtgcaacctccagacacatgggacagttttccactatttcagctgctgaatgattttctccgtactgactataatttgtgcaatggaaaatttcacaaacacctgcaagacctgtttgccccacttgttgttagatatgtggatctgatggagtcctcaattgcacaatccattcacaggggctttgagcgggagtcatgggaaccagtcaataatgggtcaggcacctcagaagatctgttttggaaacttgacgcccttcagaccttcattcgggacctgcactggcctgaagaagagtttggaaagcacctggaacaacggctgaagttgatggcaagtgacatgatcgaatcttgtgtcaaaaggtaagtataggtggctggacaggttctgcacaccctccccaccatacacagactcagggaagggtagatggctgctctttcaattggctgtagtttgaaactaattggagaaggggattgcttgtcaaagtcagctggagtagtggctgtcaacgtctaacttccattcacctgccctccatctgtcccaaacccaaaataatctggctgccaattttttcatggttgttggctttaagaggaaaagatccctgt

SEQ ID NO: 27924 - DNA, 2947 bp, Homo sapiens
  misc_feature (1)..(1): n is a, c, g, or t
  misc_feature (629)..(629): n is a, c, g, or t
  misc_feature (1050)..(1050): n is a, c, g, or t
  misc_feature (1253)..(1253): n is a, c, g, or t
ntttggccacacagaattggcataccaattcatgttccatgggatctaggtggggttctactcccagccacaaggacagaggacataagctatgcctatgcacatcagcacagcatattactggccatagaaattggccagtaatatggccaattggacatgtacttaagttagactttgggtgagaatttggggatgaaagactgtctccatcttccttgcatattacaagaggaaatattcacttttccgttagatagcatgatgtgatgttgtgcagtccacatctttagcaacatttctgtgaagataggggagccaaactgagcatgaagccaccccagaggaaccaaagccaagattttaacaaaaatctcagttgtggtgatatcacctgagccctgattccagcctttcctgaagctgggtctaccccaggatattttcttttgttgttttaagccagtttgaggtggatttttctgtcacttgcaaaaaaaaataaaaatgtcaaactgacttggcttgcttctcactccatcagttatggaatagggcttggggagggcaagtttatgtttcaagtggtaaatgactgtttgggaaggtgattgatccaaagcacattncaggtgacttagaagtatgaagaaacaaatagcatggttagcacgtgttgcaattacaactaaatgtataagcaagaaaggaaaaaatagaggtcagttatgataccaaattgctctatcttctaaagaattttaatcacatttttcatcacttcattaatttggttcaatttttcttgaaaacagtaactattattcttagaaatagacacagactatgtttgaaacctctcaaatgagctccttttgaattattcatgtgagaaaatctctgtagatatccagaaatagggtctctttctgtttccctcacttaaaaacaaatgactgcattttactaaaaagaaaaactaaactgaaaccatatttgaaaaataacaccccatttttcttcctacaaatcaaatttgctgaaggaaantggggaaaaatagaactgtaataaagcatttcaatgtttcttactatatgtttatgtacgtgtttcttacctgttacaatgtataaataactagcaggcaggcagctgtctactcaaataggctgaacatttttctagcacaaggccatgagatctgggtgaatttcactagtagtagatgtgattctaactctgggccatgngacaaagaccttctttataaatcagctttctattttctcctctgctcatacttttctttttcttcccaaggaacgcaaatttcccaagtttgtatccaaagaaatggaaaacatgtacattgaggagctgaagtcatctgtcaacctgctcatggccaacttggagagcatgccggtatccaaaggcggggagttcaagctccagaaactcaaacgcagccacaatgcttccatcatcgacatgggcgaggagagtgagaaccagctctccaagtcagatgtcgtgctgtctttctcattggaggtggtaattatggaagtccaaggcctcaaatctttggctccaaatcgcatcgtatattgcacaatggaggtggaaggaggagagaaactacagactgatcaggccgaggcttctaaaccaacctggggcacccagggtgacttctccacaacccatgcactgccagctgtgaaggtgaagctgttcacagagagcacaggcgtcctggcgttggaggacaaggagcttgggcgggttattctccatcccaccccgaacagccccaaacagtcagagtggcacaaaatgacagtctccaaaaactgccccgaccaagatctcaaaatcaaacttgctgtccgaatggataagcctcaaaacatgaagcattctgggtatttatgggccatcggtaagaatgtctggaagagatggaagaaaaggttttttgtattggtgcaggtcagtcagtacacgtttgccatgtgcagttatcgggagaagaaagcggagcctcaggaacttctacaattggatggctacactgtggattacaccgacccccagccaggtttggagggtggccgagccttcttcaatgctgtcaaggagggagacaccgtgatatttgccagtgacgatgaacaagaccgcatcctgtgggtccaggccatgtatcgggccacggggcagtcacacaagcctgtgcccccgacccaagtccagaaactcaacgccaagggaggaaatgtacctcagctggatgcccctatctctcaattttacgcagatagagctcaaaaacatggcatggatgaatttatctcttccaacccctgtaactttgaccacgcttccctctttgagatggtacaacgccttactttggatcacagacttaatgattcctattcttgcctgggctggttcagtcctggccaggtgtttgtactagacgagtattgcgcccgaaatggagtccgggggtgtcaccgacatctctgctacctcagagacttgcttgaacgggcagaaaatggcgccatgatcgaccccacccttcttcactacagctttgccttctgtgcatcccatgtccatgggaacagtcaacaaatgcatgtgtaccttagtgggctgccaccaaatacagaccctgaagggagcaaaactccctccccacctgaaccagaagctaaaaaagataccaaaaaggaatccaaaaaaagaaaagattccaaaacccaggcaaatcaagagctgaaaaggtaagaagttatgtgtgtattggcttgtgtttgtaatatctttaccctttccccaagcctccatccatgccatcacttccacttttgcaagctttgagtattcctaaagtctctctttaagcattttcaaaggtgcaatttta

SEQ ID NO: 27925 - DNA, 1915 bp, Homo sapiens
acagcttgcaacactcggcatcttttctggaggcgcctccttcagcagccgcagatggcatccggctgcgggctcggggctcgcaattgattctcccccttgcccacctcgagtccacggacgcacctctcccttcccctcctcccttcgcgcttctgggtctgagcccagctcgcgaccgccgggcagaggatcagtcgcggcggccgaggctgagcagcagcgctctcgctccctgacctggggagaagcgcccacccgggagagctgatccccggctgcctccagcgccccccaccttttgcactccaagccgggggctccagagaccccgctccccaggcgccactatgctggacccttcgtccagcgaagaagaatcggatgagatcgtggaggaggagagcggcaaggaggtgctcggctcggccccgtccggcgcgcgcctgtctcccagccgtaccagcgagggctcggccggcagcgccgggctggggggcggcggcgccggcgccggagccggggtgggtgcaggcggcggcgggggcagcggcgcgagcagcggcggcggggccggggggctgcaacccagcagccgcgctggcggcggccggccctccagccccagcccgtcggtggtgagcgagaaggagaaggaagagttggagcggctgcagaaagaggaggaggagaggaagaagaggctgcagctgtatgtgttcgtgatgcgctgcatcgcctacccctttaatgccaagcagcccaccgacatggctcgccggcagcagaagatcagcaaacagcagctgcagacagtcaaggaccggtttcaggctttcctcaatggggaaacccagatcatggctgacgaagccttcatgaacgctgtgcagagttactatgaggtgttcctgaagagcgaccgtgtggcccgcatggttcagagtggaggctgttccgccaacgactcccgggaggtcttcaagaagcacattgagaagagagtgcgcagcctgcctgagattgacggcctcagcaaggagactgtgctgagctcctggatggccaaatttgatgccatctaccgtggagaagaggacccgcggaagcagcaggcccggatgacagccagcgcagcctccgagctgattctgagcaaggagcaactctatgagatgttccagaacattcttgggatcaagaagttcgaacatcagctcctttacaatgcctgccagctggacaatccagatgagcaagcagcccagatcagacgagagctggatggacgtctacaaatggcagaccaaatagccagggaacgcaaatttcccaagtttgtatccaaagaaatggaaaacatgtacattgaggagctgaagtcatctgtcaacctgctcatggccaacttggagagcatgccggtatccaaaggcggggagttcaagctccagaaactcaaacgcagccacaatgcttccatcatcgacatgggcgaggagagtgagaaccagctctccaagtcagatgtcgtgctgtctttctcattggaggtggtaattatggaagtccaaggcctcaaatctttggctccaaatcgcatcgtatattgcacaatggaggtggaaggaggagagaaactacagactgatcaggccgaggcttctaaaccaacggtaatcaggagaaacagaagagaacaactgcctcacagtgccatttgatgtcccgtctttgtgccatgtcaaatcatctccaggggtacaagatttgtgcttgaagagtcacagtacccaatctctgtttactgaataatttcactatagtctgtgtatttccctggtttacactcatccttttgggtgtttttcctagagcattccatggtttcttttctgtttagtaaatccgtgcc

SEQ ID NO: 27926 - DNA, 588 bp, Homo sapiens
agagctcaaaaacatggcatggatgaatttatctcttccaacccctgtaactttgaccacgcttccctctttgagatggtacaacgccttactttggatcacagacttaatgattcctattcttgcctggcaagtatattctttggtctacagcaatttaaacataacattttttttcatttaaatatttctctacctttatgtcagaagctcttttctccattacagaatccctttaacaattataaatgtgttcccgatttcctgggttgagatagttttacttaccaaagaaacaagactgagcaggaggaagttatcagtagaaacagatccaattccccagcctccctatcttagcttcccccttttcagctgctacatgagaaatattcccaagagggtaatcgagtttggcacctgcttgtggagaacttgtaaaaattgcctcagtagcttagagtttaagatgcccttccctccccatcccagatctggtaatcctatctcattacatgaatgtattctctttgtgtattttcttaaaggttaaaatgatttgtaaataaactttatttttcataagct

SEQ ID NO: 27927 - DNA, 3697 bp, Homo sapiens
  misc_feature (233)..(233): n is a, c, g, or t
  misc_feature (874)..(874): n is a, c, g, or t
tactaaatgatgtttatttcactatatcccatgtgctctgactctgagacttcaaggtttgaagggggctaaacatgaaatacaagttcccctggaattcagactggttgaatccaagcagtttcactggccaagaaaacctttatgttttggccgggcacagtggttcacgcctgtaatgccagcactttggaaggctgaggcgggcggatctcctgaggtaaggagtttgngaccatcctggccagcaaggtgaaactctgtctctactaaaaatacaaaaatcagcccggcgtggtggcgggtgcctgtaatcccagctactcaggaggctgaggcaggaggatcacttgaacccaggaggcagaggttgcagtgagctgagatcgcaccactgccctccagcctgggcaacagaataaatgagactccgtctccaaaaaaaacaagaaaaagaaaagaaagaaagaaaacctcctttatgttttaaatattactgttttcccaaaggaaaaaagtttgtaatttttggaacataatgacattgtcaaactcatgaactcagctctaaaaagaaggcaacataagccagggttcagattcttcttgagctgggtaaaaatacaacactttcagtttaagagaaactaaaaacaaagaaaacaattaagtacattgtttcagtttaactgataaaatttcaattgtaacaaccagtagcacaaactatcacaacccattcaataatctactcctaacacccttttaagaattattattcctgactaatggcccaggcatatccaatttttcttttctatctcctccctggacaacttgaagcagacatttgaatctgcattttcaaaatgancgttccaacatacgcgagcctgcaatgaaaaattacgctgtagcatttaataactaatctaaaaaacaaatgtaacagcaatcaatattaaacttctgttaatcttcccacttcaggtagcataattacaatctagagagtggtatagtacatttatgctgtctttaaagaacatgtgtacaaaatgtcactaaatttgatatgggctgtcatagacttaatatagcttcatatgcaaatttgaagctggagcactgcttttttctaatatatattataataatggtgataataataaaatggctttatggtttgctcactactaattacatggcacttaacatttgcatgaattttttttaaaaaactgataactattctcaatttcttatccactagttctaatggccataaaagtagcctgccactttcgctgaattttaacagaatcaaaaggatgcagaaaatgtaggccggttaatcactcctgccaaaaagcttgaagatacaatacgtcttgctgaactagtcattgaagttcttcagcaaaatgaggagcaccacgcagaggcctttgcgtggtggtcagatttaatggtggagcatgcggagacgttcctgtcactctttgcagtagacatggatgcagccttagaggtgcaacctccagacacatgggacagttttccactatttcagctgctgaatgattttctccgtactgactataatttgtgcaatggaaaatttcacaaacacctgcaagacctgtttgccccacttgttgttagatatgtggatctgatggagtcctcaattgcacaatccattcacaggggctttgagcgggagtcatgggaaccagtcaataatgggtcaggcacctcagaagatctgttttggaaacttgacgcccttcagaccttcattcgggacctgcactggcctgaagaagagtttggaaagcacctggaacaacggctgaagttgatggcaagtgacatgatcgaatcttgtgtcaaaagaaccaggattgcatttgaagttaagctgcaaaaaaccagtcgatcaacagattttcgagtcccacagtcaatatgcaccatgtttaatgttatggttgatgccaaagctcaatcaacaaaactttgcagcatggaaatgggccaagagcatcaataccattcaaaaatagacgaactaattgaagaaactgttaaagaaatgataacactcttggttgcaaagttcgttactatcttggaaggagtgctggcaaaattatccagatatgacgaagggactttgttttcttcttttctgtcatttaccgtgaaggcagcttccaaatatgtggatgtacctaaacccgggatggacgtggccgacgcctacgtgactttcgtccgccattctcaggatgtcctgcgtgataaggtcaatgaggagatgtacatagaaaggttatttgatcaatggtacaacagctccatgaacgtgatctgcacctggttgacggaccggatggacttacagcttcatatttatcagttgaaaacactaattaggatggtaaagaaaacctacagagatttccgattgcaaggggtcctggactccaccttaaacagcaagacctatgaaacgatccggaaccgtctcactgtggaggaagccacagcatcagtgagtgaaggtgggggactgcagggcatcagcatgaaggacagcgatgaggaagacgaagaagacgattagaccatttggtcctagagtctgctgggacagagtcctgtaatcagtgcatgtccttagtctgttagttaaacccattaggaattttctgtcaactaccatgcccatgagatgtttatcaatacaactgccattttagctatgtggtaccaagattagcaaatgaccttcatatccactgatttcctgatgtccatgtctatatgtttacaagcaatatggagcaccattctttaaatactgttcatggagaatacatagtctaaccactaggcgtgtccctgttatcagcaaagatcaatgatgcttcattcatgtactatgtatgcattggtggtaaatggatgtgagggcaagtacatcaagtacattcactctgtttcacgtatgtggatgccagttaattaaatgagtacgtaaataaattaattaaaacacatagatctgctttgtgtttttatttttattttttgaaaaacaaaaggcaagtctccaacaattaacttttgatgctttctgttcccctaaaaccaaaaaatgaaccccttgtgtcgttgttaacccatcctttcatttactcatataattagccaaaaaaaaaaggatggctacataccaatggattgattctcttaattgccacggcaagggggcgatcctatcatgacttaacatcaagcgcgcagttcaaaactactgtcttctgtcaaagttttctcctcttaaatgttattttgcttttacgtctcaactgtgtatgtaaaaaaaacgaatatttaaattacaaccctagactaaaaatgtgtttataataagatgtggatatttccttcagtagattgtaaccataatttaaattattttgttccacactgttttttatatctgtcatgtacattgcattttgatctgtaactgcacaaccctggggtttgctgcagagctatttctttccatgtaaagtagtggatccatcttgcttttgccttatataaagcctacagttatggaagtgtggaaaactgtggcttctcaataaatattcagatgtcctaagaataaacgatt

SEQ ID NO: 27928 - DNA, 5460 bp, Homo sapiens
  misc_feature (1)..(1): n is a, c, g, or t
  misc_feature (629)..(629): n is a, c, g, or t
  misc_feature (1050)..(1050): n is a, c, g, or t
  misc_feature (1253)..(1253): n is a, c, g, or t
  misc_feature (2782)..(2782): n is a, c, g, or t
  misc_feature (2803)..(2803): n is a, c, g, or t
ntttggccacacagaattggcataccaattcatgttccatgggatctaggtggggttctactcccagccacaaggacagaggacataagctatgcctatgcacatcagcacagcatattactggccatagaaattggccagtaatatggccaattggacatgtacttaagttagactttgggtgagaatttggggatgaaagactgtctccatcttccttgcatattacaagaggaaatattcacttttccgttagatagcatgatgtgatgttgtgcagtccacatctttagcaacatttctgtgaagataggggagccaaactgagcatgaagccaccccagaggaaccaaagccaagattttaacaaaaatctcagttgtggtgatatcacctgagccctgattccagcctttcctgaagctgggtctaccccaggatattttcttttgttgttttaagccagtttgaggtggatttttctgtcacttgcaaaaaaaaataaaaatgtcaaactgacttggcttgcttctcactccatcagttatggaatagggcttggggagggcaagtttatgtttcaagtggtaaatgactgtttgggaaggtgattgatccaaagcacattncaggtgacttagaagtatgaagaaacaaatagcatggttagcacgtgttgcaattacaactaaatgtataagcaagaaaggaaaaaatagaggtcagttatgataccaaattgctctatcttctaaagaattttaatcacatttttcatcacttcattaatttggttcaatttttcttgaaaacagtaactattattcttagaaatagacacagactatgtttgaaacctctcaaatgagctccttttgaattattcatgtgagaaaatctctgtagatatccagaaatagggtctctttctgtttccctcacttaaaaacaaatgactgcattttactaaaaagaaaaactaaactgaaaccatatttgaaaaataacaccccatttttcttcctacaaatcaaatttgctgaaggaaantggggaaaaatagaactgtaataaagcatttcaatgtttcttactatatgtttatgtacgtgtttcttacctgttacaatgtataaataactagcaggcaggcagctgtctactcaaataggctgaacatttttctagcacaaggccatgagatctgggtgaatttcactagtagtagatgtgattctaactctgggccatgngacaaagaccttctttataaatcagctttctattttctcctctgctcatacttttctttttcttcccaaggaacgcaaatttcccaagtttgtatccaaagaaatggaaaacatgtacattgaggagctgaagtcatctgtcaacctgctcatggccaacttggagagcatgccggtatccaaaggcggggagttcaagctccagaaactcaaacgcagccacaatgcttccatcatcgacatgggcgaggagagtgagaaccagctctccaagtcagatgtcgtgctgtctttctcattggaggtggtaattatggaagtccaaggcctcaaatctttggctccaaatcgcatcgtatattgcacaatggaggtggaaggaggagagaaactacagactgatcaggccgaggcttctaaaccaacctggggcacccagggtgacttctccacaacccatgcactgccagctgtgaaggtgaagctgttcacagagagcacaggcgtcctggcgttggaggacaaggagcttgggcgggttattctccatcccaccccgaacagccccaaacagtcagagtggcacaaaatgacagtctccaaaaactgccccgaccaagatctcaaaatcaaacttgctgtccgaatggataagcctcaaaacatgaagcattctgggtatttatgggccatcggtaagaatgtctggaagagatggaagaaaaggttttttgtattggtgcaggtcagtcagtacacgtttgccatgtgcagttatcgggagaagaaagcggagcctcaggaacttctacaattggatggctacactgtggattacaccgacccccagccaggtttggagggtggccgagccttcttcaatgctgtcaaggagggagacaccgtgatatttgccagtgacgatgaacaagaccgcatcctgtgggtccaggccatgtatcgggccacggggcagtcacacaagcctgtgcccccgacccaagtccagaaactcaacgccaagggaggaaatgtacctcagctggatgcccctatctctcaattttacgcagatagagctcaaaaacatggcatggatgaatttatctcttccaacccctgtaactttgaccacgcttccctctttgagatggtacaacgccttactttggatcacagacttaatgattcctattcttgcctgggctggttcagtcctggccaggtgtttgtactagacgagtattgcgcccgaaatggagtccgggggtgtcaccgacatctctgctacctcagagacttgcttgaacgggcagaaaatggcgccatgatcgaccccacccttcttcactacagctttgccttctgtgcatcccatgtccatgggaacaggcctgatggaattggaactgtgactgttgaagaaaaggaacgttttgaagaaatcaaagagaggctccgagttctgctagaaaatcagattacacattttaggtattgctttccatttggtcgacctgaaggtgctntgaaagctactctctcactcntggaaagggttttgatgaaagatattgttaccccagtgccacaagaggaggtaaaaacagttatccgtaaatgtctggaacaggctgcgttagtcaactattctcggctctcagagtatgccaaaatcgaagagaatcaaaaggatgcagaaaatgtaggccggttaatcactcctgccaaaaagcttgaagatacaatacgtcttgctgaactagtcattgaagttcttcagcaaaatgaggagcaccacgcagaggcctttgcgtggtggtcagatttaatggtggagcatgcggagacgttcctgtcactctttgcagtagacatggatgcagccttagaggtgcaacctccagacacatgggacagttttccactatttcagctgctgaatgattttctccgtactgactataatttgtgcaatggaaaatttcacaaacacctgcaagacctgtttgccccacttgttgttagatatgtggatctgatggagtcctcaattgcacaatccattcacaggggctttgagcgggagtcatgggaaccagtcaagagtttaaccagtaacctacccaatgtgaacctacccaatgtgaaccttcccaaagtaccaaatctaccagttaacatccctctaggcatcccacaaatgcctactttttcggcaccgtcatggatggctgctatatatgatgcggataatgggtcaggcacctcagaagatctgttttggaaacttgacgcccttcagaccttcattcgggacctgcactggcctgaagaagagtttggaaagcacctggaacaacggctgaagttgatggcaagtgacatgatcgaatcttgtgtcaaaagaaccaggattgcatttgaagttaagctgcaaaaaaccagtcgatcaacagattttcgagtcccacagtcaatatgcaccatgtttaatgttatggttgatgccaaagctcaatcaacaaaactttgcagcatggaaatgggccaagagcatcaataccattcaaaaatagacgaactaattgaagaaactgttaaagaaatgataacactcttggttgcaaagttcgttactatcttggaaggagtgctggcaaaattatccagatatgacgaagggactttgttttcttcttttctgtcatttaccgtgaaggcagcttccaaatatgtggatgtacctaaacccgggatggacgtggccgacgcctacgtgactttcgtccgccattctcaggatgtcctgcgtgataaggtcaatgaggagatgtacatagaaaggttatttgatcaatggtacaacagctccatgaacgtgatctgcacctggttgacggaccggatggacttacagcttcatatttatcagttgaaaacactaattaggatggtaaagaaaacctacagagatttccgattgcaaggggtcctggactccaccttaaacagcaagacctatgaaacgatccggaaccgtctcactgtggaggaagccacagcatcagtgagtgaaggtgggggactgcagggcatcagcatgaaggacagcgatgaggaagacgaagaagacgattagaccatttggtcctagagtctgctgggacagagtcctgtaatcagtgcatgtccttagtctgttagttaaacccattaggaattttctgtcaactaccatgcccatgagatgtttatcaatacaactgccattttagctatgtggtaccaagattagcaaatgaccttcatatccactgatttcctgatgtccatgtctatatgtttacaagcaatatggagcaccattctttaaatactgttcatggagaatacatagtctaaccactaggcgtgtccctgttatcagcaaagatcaatgatgcttcattcatgtactatgtatgcattggtggtaaatggatgtgagggcaagtacatcaagtacattcactctgtttcacgtatgtggatgccagttaattaaatgagtacgtaaataaattaattaaaacacatagatctgctttgtgtttttatttttattttttgaaaaacaaaaggcaagtctccaacaattaacttttgatgctttctgttcccctaaaaccaaaaaatgaaccccttgtgtcgttgttaacccatcctttcatttactcatataattagccaaaaaaaaaaggatggctacataccaatggattgattctcttaattgccacggcaagggggcgatcctatcatgacttaacatcaagcgcgcagttcaaaactactgtcttctgtcaaagttttctcctcttaaatgttattttgcttttacgtctcaactgtgtatgtaaaaaaaacgaatatttaaattacaaccctagactaaaaatgtgtttataataagatgtggatatttccttcagtagattgtaaccataatttaaattattttgttccacactgttttttatatctgtcatgtacattgcattttgatctgtaactgcacaaccctggggtttgctgcagagctatttctttccatgtaaagtagtggatccatcttgcttttgccttatataaagcctacagttatggaagtgtggaaaactgtggcttctcaataaatattcagatgtcctaagaataaacgatt

SEQ ID NO: 27929 - DNA, 3643 bp, Homo sapiens
  misc_feature (233)..(233): n is a, c, g, or t
  misc_feature (874)..(874): n is a, c, g, or t
tactaaatgatgtttatttcactatatcccatgtgctctgactctgagacttcaaggtttgaagggggctaaacatgaaatacaagttcccctggaattcagactggttgaatccaagcagtttcactggccaagaaaacctttatgttttggccgggcacagtggttcacgcctgtaatgccagcactttggaaggctgaggcgggcggatctcctgaggtaaggagtttgngaccatcctggccagcaaggtgaaactctgtctctactaaaaatacaaaaatcagcccggcgtggtggcgggtgcctgtaatcccagctactcaggaggctgaggcaggaggatcacttgaacccaggaggcagaggttgcagtgagctgagatcgcaccactgccctccagcctgggcaacagaataaatgagactccgtctccaaaaaaaacaagaaaaagaaaagaaagaaagaaaacctcctttatgttttaaatattactgttttcccaaaggaaaaaagtttgtaatttttggaacataatgacattgtcaaactcatgaactcagctctaaaaagaaggcaacataagccagggttcagattcttcttgagctgggtaaaaatacaacactttcagtttaagagaaactaaaaacaaagaaaacaattaagtacattgtttcagtttaactgataaaatttcaattgtaacaaccagtagcacaaactatcacaacccattcaataatctactcctaacacccttttaagaattattattcctgactaatggcccaggcatatccaatttttcttttctatctcctccctggacaacttgaagcagacatttgaatctgcattttcaaaatgancgttccaacatacgcgagcctgcaatgaaaaattacgctgtagcatttaataactaatctaaaaaacaaatgtaacagcaatcaatattaaacttctgttaatcttcccacttcaggtagcataattacaatctagagagtggtatagtacatttatgctgtctttaaagaacatgtgtacaaaatgtcactaaatttgatatgggctgtcatagacttaatatagcttcatatgcaaatttgaagctggagcactgcttttttctaatatatattataataatggtgataataataaaatggctttatggtttgctcactactaattacatggcacttaacatttgcatgaattttttttaaaaaactgataactattctcaatttcttatccactagttctaatggccataaaagtagcctgccactttcgctgaattttaacagaatcaaaaggatgcagaaaatgtaggccggttaatcactcctgccaaaaagcttgaagatacaatacgtcttgctgaactagtcattgaagttcttcagcaaaatgaggagcaccacgcagaggcctttgcgtggtggtcagatttaatggtggagcatgcggagacgttcctgtcactctttgcagtagacatggatgcagccttagaggtgcaacctccagacacatgggacagttttccactatttcagctgctgaatgattttctccgtactgactataatttgtgcaatggaaaatttcacaaacacctgcaagacctgtttgccccacttgttgttagatatgtggatctgatggagtcctcaattgcacaatccattcacaggggctttgagcgggagtcatgggaaccagtcaataatgggtcaggcacctcagaagatctgttttggaaacttgacgcccttcagaccttcattcgggacctgcactggcctgaagaagagtttggaaagcacctggaacaacggctgaagttgatggcaagtgacatgatcgaatcttgtgtcaaaagaaccaggattgcatttgaagttaagctgcaaaaaaccagtcgatcaacagattttcgagtcccacagtcaatatgcaccatgtttaatgttatggttgatgccaaagctcaatcaacaaaactttgcagcatggaaatgggccaagagcatcaataccattcaaaaatagacgaactaattgaagaaactgttaaagaaatgataacactcttggttgcaaagttcgttactatcttggaaggagtgctggcaaaattatccagatatgacgaagggactttgttttcttcttttctgtcatttaccgtgaaggcagcttccaaatatgtggatgtacctaaacccgggatggacgtggccgacgcctacgtgactttcgtccgccattctcaggatgtcctgcgtgataaggtcaatgaggagatgtacatagaaaggttatttgatcaatggtacaacagctccatgaacgtgatctgcacctggttgacggaccggatggacttacagcttcatatttatcagttgaaaacactaattaggatggtaaagaagacctatgaaacgatccggaaccgtctcactgtggaggaagccacagcatcagtgagtgaaggtgggggactgcagggcatcagcatgaaggacagcgatgaggaagacgaagaagacgattagaccatttggtcctagagtctgctgggacagagtcctgtaatcagtgcatgtccttagtctgttagttaaacccattaggaattttctgtcaactaccatgcccatgagatgtttatcaatacaactgccattttagctatgtggtaccaagattagcaaatgaccttcatatccactgatttcctgatgtccatgtctatatgtttacaagcaatatggagcaccattctttaaatactgttcatggagaatacatagtctaaccactaggcgtgtccctgttatcagcaaagatcaatgatgcttcattcatgtactatgtatgcattggtggtaaatggatgtgagggcaagtacatcaagtacattcactctgtttcacgtatgtggatgccagttaattaaatgagtacgtaaataaattaattaaaacacatagatctgctttgtgtttttatttttattttttgaaaaacaaaaggcaagtctccaacaattaacttttgatgctttctgttcccctaaaaccaaaaaatgaaccccttgtgtcgttgttaacccatcctttcatttactcatataattagccaaaaaaaaaaggatggctacataccaatggattgattctcttaattgccacggcaagggggcgatcctatcatgacttaacatcaagcgcgcagttcaaaactactgtcttctgtcaaagttttctcctcttaaatgttattttgcttttacgtctcaactgtgtatgtaaaaaaaacgaatatttaaattacaaccctagactaaaaatgtgtttataataagatgtggatatttccttcagtagattgtaaccataatttaaattattttgttccacactgttttttatatctgtcatgtacattgcattttgatctgtaactgcacaaccctggggtttgctgcagagctatttctttccatgtaaagtagtggatccatcttgcttttgccttatataaagcctacagttatggaagtgtggaaaactgtggcttctcaataaatattcagatgtcctaagaataaacgatt

SEQ ID NO: 27930 - DNA, 1938 bp, Homo sapiens
ttaagtcattcatgtgtgctatttgtaaaagtgtttaagtgtctacacacattagaagcatcgaaagccttgagtaaggaacaatgaacttggtaatatttttaagagcttcagatctctctctatcaaagaactggagtcaggatcttataaatatttctgggactaaggaaataaacggggtccgcagccaggctttatttataaattaagttgtctaaaaattactgacggatgcagtgccatcacctcccaaacatgctaatatttgtctttctgtgttcttagcatcaataccattcaaaaatagacgaactaattgaagaaactgttaaagaaatgataacactcttggttgcaaagttcgttactatcttggaaggagtgctggcaaaattatccagatatgacgaagggactttgttttcttcttttctgtcatttaccgtgaaggcagcttccaaatatgtggatgtacctaaacccgggatggacgtggccgacgcctacgtgactttcgtccgccattctcaggatgtcctgcgtgataaggtcaatgaggagatgtacatagaaaggttatttgatcaatggtacaacagctccatgaacgtgatctgcacctggttgacggaccggatggacttacagcttcatatttatcagttgaaaacactaattaggatggtaaagaaaacctacagagatttccgattgcaaggggtcctggactccaccttaaacagcaagacctatgaaacgatccggaaccgtctcactgtggaggaagccacagcatcagtgagtgaaggtgggggactgcagggcatcagcatgaaggacagcgatgaggaagacgaagaagacgattagaccatttggtcctagagtctgctgggacagagtcctgtaatcagtgcatgtccttagtctgttagttaaacccattaggaattttctgtcaactaccatgcccatgagatgtttatcaatacaactgccattttagctatgtggtaccaagattagcaaatgaccttcatatccactgatttcctgatgtccatgtctatatgtttacaagcaatatggagcaccattctttaaatactgttcatggagaatacatagtctaaccactaggcgtgtccctgttatcagcaaagatcaatgatgcttcattcatgtactatgtatgcattggtggtaaatggatgtgagggcaagtacatcaagtacattcactctgtttcacgtatgtggatgccagttaattaaatgagtacgtaaataaattaattaaaacacatagatctgctttgtgtttttatttttattttttgaaaaacaaaaggcaagtctccaacaattaacttttgatgctttctgttcccctaaaaccaaaaaatgaaccccttgtgtcgttgttaacccatcctttcatttactcatataattagccaaaaaaaaaaggatggctacataccaatggattgattctcttaattgccacggcaagggggcgatcctatcatgacttaacatcaagcgcgcagttcaaaactactgtcttctgtcaaagttttctcctcttaaatgttattttgcttttacgtctcaactgtgtatgtaaaaaaaacgaatatttaaattacaaccctagactaaaaatgtgtttataataagatgtggatatttccttcagtagattgtaaccataatttaaattattttgttccacactgttttttatatctgtcatgtacattgcattttgatctgtaactgcacaaccctggggtttgctgcagagctatttctttccatgtaaagtagtggatccatcttgcttttgccttatataaagcctacagttatggaagtgtggaaaactgtggcttctcaataaatattcagatgtcctaagaataaacgatt

SEQ ID NO: 27931 - DNA, 3066 bp, Homo sapiens
  misc_feature (1)..(1): n is a, c, g, or t
  misc_feature (629)..(629): n is a, c, g, or t
  misc_feature (1050)..(1050): n is a, c, g, or t
  misc_feature (1253)..(1253): n is a, c, g, or t
ntttggccacacagaattggcataccaattcatgttccatgggatctaggtggggttctactcccagccacaaggacagaggacataagctatgcctatgcacatcagcacagcatattactggccatagaaattggccagtaatatggccaattggacatgtacttaagttagactttgggtgagaatttggggatgaaagactgtctccatcttccttgcatattacaagaggaaatattcacttttccgttagatagcatgatgtgatgttgtgcagtccacatctttagcaacatttctgtgaagataggggagccaaactgagcatgaagccaccccagaggaaccaaagccaagattttaacaaaaatctcagttgtggtgatatcacctgagccctgattccagcctttcctgaagctgggtctaccccaggatattttcttttgttgttttaagccagtttgaggtggatttttctgtcacttgcaaaaaaaaataaaaatgtcaaactgacttggcttgcttctcactccatcagttatggaatagggcttggggagggcaagtttatgtttcaagtggtaaatgactgtttgggaaggtgattgatccaaagcacattncaggtgacttagaagtatgaagaaacaaatagcatggttagcacgtgttgcaattacaactaaatgtataagcaagaaaggaaaaaatagaggtcagttatgataccaaattgctctatcttctaaagaattttaatcacatttttcatcacttcattaatttggttcaatttttcttgaaaacagtaactattattcttagaaatagacacagactatgtttgaaacctctcaaatgagctccttttgaattattcatgtgagaaaatctctgtagatatccagaaatagggtctctttctgtttccctcacttaaaaacaaatgactgcattttactaaaaagaaaaactaaactgaaaccatatttgaaaaataacaccccatttttcttcctacaaatcaaatttgctgaaggaaantggggaaaaatagaactgtaataaagcatttcaatgtttcttactatatgtttatgtacgtgtttcttacctgttacaatgtataaataactagcaggcaggcagctgtctactcaaataggctgaacatttttctagcacaaggccatgagatctgggtgaatttcactagtagtagatgtgattctaactctgggccatgngacaaagaccttctttataaatcagctttctattttctcctctgctcatacttttctttttcttcccaaggaacgcaaatttcccaagtttgtatccaaagaaatggaaaacatgtacattgaggagctgaagtcatctgtcaacctgctcatggccaacttggagagcatgccggtatccaaaggcggggagttcaagctccagaaactcaaacgcagccacaatgcttccatcatcgacatgggcgaggagagtgagaaccagctctccaagtcagatgtcgtgctgtctttctcattggaggtggtaattatggaagtccaaggcctcaaatctttggctccaaatcgcatcgtatattgcacaatggaggtggaaggaggagagaaactacagactgatcaggccgaggcttctaaaccaacctggggcacccagggtgacttctccacaacccatgcactgccagctgtgaaggtgaagctgttcacagagagcacaggcgtcctggcgttggaggacaaggagcttgggcgggttattctccatcccaccccgaacagccccaaacagtcagagtggcacaaaatgacagtctccaaaaactgccccgaccaagatctcaaaatcaaacttgctgtccgaatggataagcctcaaaacatgaagcattctgggtatttatgggccatcggtaagaatgtctggaagagatggaagaaaaggttttttgtattggtgcaggtcagtcagtacacgtttgccatgtgcagttatcgggagaagaaagcggagcctcaggaacttctacaattggatggctacactgtggattacaccgacccccagccaggtttggagggtggccgagccttcttcaatgctgtcaaggagggagacaccgtgatatttgccagtgacgatgaacaagaccgcatcctgtgggtccaggccatgtatcgggccacggggcagtcacacaagcctgtgcccccgacccaagtccagaaactcaacgccaagggaggaaatgtacctcagctggatgcccctatctctcaattttacgcagatagagctcaaaaacatggcatggatgaatttatctcttccaacccctgtaactttgaccacgcttccctctttgagatggtacaacgccttactttggatcacagacttaatgattcctattcttgcctgggctggttcagtcctggccaggtgtttgtactagacgagtattgcgcccgaaatggagtccgggggtgtcaccgacatctctgctacctcagagacttgcttgaacgggcagaaaatggcgccatgatcgaccccacccttcttcactacagctttgccttctgtgcatcccatgtccatgggaacagtcaacaaatgcatgtgtaccttagtgggctgccaccaaatacagaccctgaagggagcaaaactccctccccacctgaaccagaagctaaaaaagataccaaaaaggaatccaaaaaaagaaaagattccaaaacccaggcaaatcaagagctgaaaaggcctgatggaattggaactgtgactgttgaagaaaaggaacgttttgaagaaatcaaagagaggctccgagttctgctagaaaatcagattacacattttaggtatcggctttccatatggtcgacctgaatgtgcttttgaaagctactctttcacttttggaaggggtttgatggatattgttatctcaagtgccacagtaggcgttccgttattctgtaatgtctggaacacgcttgcgaggcaactttcttggctttg

SEQ ID NO: 27932 - DNA, 559 bp, Homo sapiens
aggagttcaagaccagcctggccaatatggtgaaaccgcgtctctactaaaaatacaaaaaattcgtcggtcatggtggcggtcgcctgtgatcccagctatcaccactgaaactcctttcagttttcagaaacaaactgtaggtgaccagaagcgttatccgctaagcgcaccactttaagtccctgacttagagccacaagtgttctgtttacctattgttactactcttttcactctggcaaacagattaattcacacaaaattttatttgaatggcttttcaatttatcataacaatggttactaaaaagtgagagaatatgtactaagggttgagtacaagttagtgctagtagaaaataagagccttaatagagaaaaaactagttctaatcaaagactggatttagtcaatgatgtttatatttttagcttacatttatagcttcagaaacattttgttactgatattcctatcataattattgtttcaaaaattctctagtccctaaccttccttttttcattaaacaactgttttaaaattaaactgtta

SEQ ID NO: 27933 - DNA, 397 bp, Homo sapiens
ttctaactggaatgaccagggatttttatcatttgcctgagtttcaacatctgtaatagttaggagagttcatgtagaactctacactcatgaacataagaaaactgtttgcctttttaaaagtaaggctagtatcttcagaatggaccataactagtttcatatcaaagaaaagttggaaactgcctagaggatgctaatccattagttattttattttatcatttatttttccaatgtatgaaattatatattttgtgggctgggtgtggtggctcacgcatgtaatcccagcactttgggaggccgaggggggtggatcacgaggtcaggagatcgagaccatcctggctaacacagtgaaaccccgtctctattaaaaattaaaaaaaaaaaa

SEQ ID NO: 27934 - DNA, 2420 bp, Homo sapiens
atttcacagccagctttgacatgcccgtgaggacaggagccgccgcttcagttgtcactgcagagccatcgtatgtcagttgcaatttccatctgaagctatgtctttgacttcactttaagcagaaaattttgtaccctggtggtcgagtcttcccttaaaaattgttaaatcatttggctttaatggttcaataatttggggtggcttcatggtgtttcttttcttcccagtttaaaaaaaaaactttttaagcgtaaaatctttaaggggtacacatttataagtctggctaatttctaatatgctaattaaacatttcccattttaaggttatatacagtgaggctcttcaggacaattattttctgggttgattgggcatatgtttgccgtgtaaacacggatatgataaagtgtcagtaacaatggaaaaggtcccagaggcattaggcatctaagaggatgccctcagaaacgtattctggcttgatttgtgttattaacttcagaagaaccttttcaaatgtcccagtatcgttcttagtgctttgggaaaaaatatttaacacactgttaataaatttgttatcagaagtttacaagacgaagggcttctctcgtctgaatttctagatttaagtcatgaagtgtaaaactgtttcacccagaagtgtaactaagcagaactaggagttttctctggcttcacctttttcagagccagcagtgctgttttctcaagcacagcgtttgctcttagactctgatctgcttgtgcctaagcattgcacaggtttccgaagacgggcagcttcagagaagaggattattcgggagattgctggtgtggcccatagactctttggcatagactctttcgcaggcagccactctgagtgtggccagttctataaccatccccaaactagctggagcctgatggataggaacgggtagtctgtcctcttccccataaaaatgttccaaaaagttatctccagagagagtcccttatgaagacagttgccaagctgtattctcattctttaaaccaatacccaggtcagggctagttcacactagcactgttagggacatggtgtggctagaaatgaattgagtgtgacttctccctacaaccccaggcccagggataggaggaggcagaggggtgcctggagtttctgcactctcatcagtgatgttcatgttacacttgcacaagggctgatttccacgtatgtgtgtgttaatttattcacttagtttcaaaagattttctctccccagccattcagaggtttccaaactaagccactgagtttgagtcagggaattccacgtaaaaagatcagattaaggtaaattctttgttctgtattgctgctgtgacttcagaaaaaaaaaattatgagagctcttcctggaattttgaaatttctatttaatgaagaagtgtataattccattatttattgtttgaggtttgatttatctggaagcttaaaaagaatgttttatttttgttgttaataaaatcccaatcacatttcacaataactaaaatgtctccaggtgggttactggtagatgatagtggtgacacctgcaggtctgcatttgaattggattcacagagaagcattccatggtcacataatgaatagggagaacagatattttcagaaaaatcaaccgattgttttttccagaaacagaacagaaaatgttcagaatattttcaaatttgtcagattcttttatgtttcctttgaaatttattatttaagcctattactaaacctttataaaaatatatttggcaaatacaccaaagaaaccagcttacaaaagattatgatcattaatgaactgcaaacctcatctttcgaaaacaaggttttgtgtttttttttttttgtaaatatttgtgtttataaatgtacagcagagtaagagtgttttttagattatttaattcccatatttctaaactatttactacacagtaatccatgcctgttagtttggaggacttgactgtctcattttttaattcattgtcagtcatgcttggaacagcatttccactagagaatccagcgttctggcagtagcaagagtacacatctggagcatgagggactctagcatgactcgtcagatgcacaccccaagagacaagaatgtgtagtttaatgaccggcgtggaccatacgaaattgagattctaactttcctgcaggagtgctcatgagcccagaatgtgattgggataaggccatttgcccacaaatttagctttcatgtaactcctagtgtgttatatcataatgtattttgttcttcctttttaatgtaagttttgctttgggtcaatttgaattaaaaaaatcaaatctgatttaaaacatgtt

SEQ ID NO: 27935 - DNA, 1700 bp, Homo sapiens
ggagggggcgggggtggcccagtgcaaagtgcatcccgaaagccccctgtccggagaccccacggctggcacttcgggccccgtatgacctgggacctcgccgtcccgagacctcctgggtccctccgtagctggaagcctccggcccggagcgcggcagccccctgctccgagccctggaccgggactgcccccccacccgagccaggacttcctccctgcctccctgcacctctgccccaaggctgcccggcggccgggatcgccacctcctgccttctcggctgttcggatgttcgccgggctggggccgtgaggcaccgaggaggatcaggaacaccagggtccggccctgcctggggtatttcttcaatggagaagttggtgagtgtagaggaggctgaaaggaggaagagaagcagcagctgaggagacaggtttgagctggctgaagaagacgcgaaagcaggaagaggtctgcccacctatcagagaagcagaaggcacagtgcctctgaccagcatcgtctgtaaaggttaagaaggcttttttgctctgtagcctggacgtactttgaagcccctccccacgatgctgtacgtgcacaatggttactaggcaatccgtacatcaggagaagggacactcttccataaggctgatccccgtaacctaatgaatcctttgtaaaaagtggactcagctaggatgttacaccatcattgtcgaaggaaccctgagctccaggaagagttgcagattcaggccgcggtggctgctggggatgtccacacagtgcgaaagatgctagaacaaggctattccccgaatggccgagatgcgaatggctggactctgcttcatttctctgcagcaagaggaaaggaaagatgtgttcgggtttttctagaacacggagctgatcctacagttaaagacttaatcggaggcttcacggctcttcactatgcagccatgcatggccgggcccgcattgcacgcttgatgttagaatctgaatacaggagcgacatcattaatgcaaaaagcaatgacggctggactcccctccatgtggctgcccactacggcagggactcatttgtccggctcctcctggagttcaaggctgaggttgacccactcagtgataaaggtaccacaccgcttcagctcgccattatccgagagaggtcaagctgtgtgaaaatcctcctggaccacaatgccaacatcgacattcagaatggtttcctgttgcgatacgccgtgatcaaaagcaatcactcttattgccgaatgttccttcagagaggggcagacacaaacttgggtcgcttagaagacggacagactcctttacacttatctgcccttagggatgatgtgctgtgtgcacggatgttatataattacggagcagacacgaacacacggaactatgaaggacagaccccattggctgtttcaataagtatttctggaagtagtcgaccatgtttggatttcttacaagaagtcacaagtatgtaatataattattactttattgcattttttaaaaatttgcatcttctgaggagcttaatgtgtttttgcaacttaagatgactagatattaatcattcctataaccactgcttggtaagcgatgcctcattcttctgaaataaaaaaaaaactttgactgtaaaaaaga

SEQ ID NO: 27936 - DNA, 2294 bp, Homo sapiens
ggagggggcgggggtggcccagtgcaaagtgcatcccgaaagccccctgtccggagaccccacggctggcacttcgggccccgtatgacctgggacctcgccgtcccgagacctcctgggtccctccgtagctggaagcctccggcccggagcgcggcagccccctgctccgagccctggaccgggactgcccccccacccgagccaggacttcctccctgcctccctgcacctctgccccaaggctgcccggcggccgggatcgccacctcctgccttctcggctgttcggatgttcgccgggctggggccgtgaggcaccgaggaggatcaggaacaccagggtccggccctgcctggggtatttcttcaatggagaagttggtgagtgtagaggaggctgaaaggaggaagagaagcagcagctgaggagacaggtttgagctggctgaagaagacgcgaaagcaggaagaggtctgcccacctatcagagaagcagaaggcacagtgcctctgaccagcatcgtctgtaaaggttaagaaggcttttttgctctgtagcctggacgtactttgaagcccctccccacgatgctgtacgtgcacaatggttactaggcaatccgtacatcaggagaagggacactcttccataaggctgatccccgtaacctaatgaatcctttgtaaaaagtggactcagctaggatgttacaccatcattgtcgaaggaaccctgagctccaggaagagttgcagattcaggccgcggtggctgctggggatgtccacacagtgcgaaagatgctagaacaaggctattccccgaatggccgagatgcgaatggctggactctgcttcatttctctgcagcaagaggaaaggaaagatgtgttcgggtttttctagaacacggagctgatcctacagttaaagacttaatcggaggcttcacggctcttcactatgcagccatgcatggccgggcccgcattgcacgcttgatgttagaatctgaatacaggagcgacatcattaatgcaaaaagcaatgacggctggactcccctccatgtggctgcccactacggcagggactcatttgtccggctcctcctggagttcaaggctgaggttgacccactcagtgataaaggtaccacaccgcttcagctcgccattatccgagagaggtcaagctgtgtgaaaatcctcctggaccacaatgccaacatcgacattcagaatggtttcctgttgcgatacgccgtgatcaaaagcaatcactcttattgccgaatgttccttcagagaggggcagacacaaacttgggtcgcttagaagacggacagactcctttacacttatctgcccttagggatgatgtgctgtgtgcacggatgttatataattacggagcagacacgaacacacggaactatgaaggacagaccccattggctgtttcaataagtatttctggaagtagtcgaccatgtttggatttcttacaagaagtcacaagacagcccagaaacttgcaggacctgtgccgaattaaaattcgacaatgtataggccttcaaaacctaaagctacttgatgaactaccaattgccaaggtcatgaaagactacttaaaacacaaatttgatgatatctgatatgccagaactgtgagcaagattaggagttctattctagatacttaaaaggctttttgccttgcacaaagtatatcctatgcaatttctgatttgctgtgaaatcagaaagcaggtatacacttttgggttttctgtttgtttggttggttttcattgtaggggagggattttttatatatatataaaaacacacaccacatgcttgaaggtcttaatttggtttcttggtccaagtttaagaggtccaagctttgtatacaatactgcatttagaaaaattgtcttttcttaaatgacacaagcaggtttagagtggagaatttaccctttccaaatttatggttccttggtaagcacggtattctaaaccagcagagcacttgttaacgtttggaggcacagtttcacccagggcgaccctgggttcttttggaaaatgccctaagaaatgtttgaagtaacgctgtcacctcattcatttttaatgagtacaaactggccgtttcaaactgttctttttcctaattaatgtagctttcggatgacataaatccagtatctctgcttatgacataaatccagtacctctgcttttcttttgctgtgctcttgtttttaacttatt

SEQ ID NO: 27937 - DNA, 2131 bp, Homo sapiens
ggagggggcgggggtggcccagtgcaaagtgcatcccgaaagccccctgtccggagaccccacggctggcacttcgggccccgtatgacctgggacctcgccgtcccgagacctcctgggtccctccgtagctggaagcctccggcccggagcgcggcagccccctgctccgagccctggaccgggactgcccccccacccgagccaggacttcctccctgcctccctgcacctctgccccaaggctgcccggcggccgggatcgccacctcctgccttctcggctgttcggatgttcgccgggctggggccgtgaggcaccgaggaggatcaggaacaccagggtccggccctgcctggggtatttcttcaatggagaagttggtgagtgtagaggaggctgaaaggaggaagagaagcagcagctgaggagacaggtttgagctggctgaagaagacgcgaaagcaggaagaggtctgcccacctatcagagaagcagaaggcacagtgcctctgaccagcatcgtctgtaaaggttaagaaggcttttttgctctgtagcctggacgtactttgaagcccctccccacgatgctgtacgtgcacaatggttactaggcaatccgtacatcaggagaagggacactcttccataaggctgatccccgtaacctaatgaatcctttgtaaaaagtggactcagctaggatgttacaccatcattgtcgaaggaaccctgagctccaggaagagttgcagattcaggccgcggtggctgctggggatgtccacacagtgcgaaagatgctagaacaaggctattccccgaatggccgagatgcgaatggctggactctgcttcatttctctgcagcaagaggaaaggaaagatgtgttcgggtttttctagaacacggagctgatcctacagttaaagacttaatcggaggcttcacggctcttcactatgcagccatgcatggccgggcccgcattgcacgcttgatgttagaatctgaatacaggagcgacatcattaatgcaaaaagcaatgacggctggactcccctccatgtggctgcccactacggcagggactcatttgtccggctcctcctggagttcaaggctgaggttgacccactcagtgataaaggtaccacaccgcttcagctcgccattatccgagagaggtcaagctgtgtgaaaatcctcctggaccacaatgccaacatcgacattcagaatggtttcctgttgcgatacgccgtgatcaaaagcaatcactcttattgccgaatgttccttcagagaggggcagacacaaacttgggtcgcttagaagacggacagactcctttacacttatctgcccttagggatgatgtgctgtgtgcacggatgttatataattacggagcagacacgaacacacggaactatgaaggacagaccccattggctgtttcaataagtatttctggaagtagtcgaccatgtttggatttcttacaagaagtcacaagacagcccagaaacttgcaggacctgtgccgaattaaaattcgacaatgtataggccttcaaaacctaaagctacttgatgaactaccaattgccaaggtcatgaaagactacttaaaacacaaatttgatgatatctgatatgccagaactgtgagcaagattaggagttctattctagatacttaaaaggctttttgccttgcacaaagtatatcctatgcaatttctgatttgctgtgaaatcagaaagcagtcatgcttggaacagcatttccactagagaatccagcgttctggcagtagcaagagtacacatctggagcatgagggactctagcatgactcgtcagatgcacaccccaagagacaagaatgtgtagtttaatgaccggcgtggaccatacgaaattgagattctaactttcctgcaggagtgctcatgagcccagaatgtgattgggataaggccatttgcccacaaatttagctttcatgtaactcctagtgtgttatatcataatgtattttgttcttcctttttaatgtaagttttgctttgggtcaatttgaattaaaaaaatcaaatctgatttaaaacatgtt

SEQ ID NO: 27938 - DNA, 323 bp, Homo sapiens
ttcagtaaggcacccagttagtggttagtgttgtaaaccttggcctttttaaaaagtacatttaaaatcaagaatgtataagtcatactgctttaattttcagcctttgagaaatgctagctaatataatgtggggagatatcttatacatgcatacctatacacaatagtgtacaaccatatagagacatgtatgtatatatatgcaaacatgcatttatatatataaacatatacacaaacacacattgtgtatgtatgtgtatacatatgtgtcacacaattaagtcaaattgctacactgaggaaaacttaacaatatt

SEQ ID NO: 27939 - DNA, 664 bp, Homo sapiens
gacacaatatggattgaagttttgtggtaataggaagcttatacagtgttgaagactcatgtatcctagctgttgtggacacagacccataaatcattgatttactgcatgcaatttattctggaggacagtatctcatgtttgcagggtatcatcctccaaatatcactttagctgaaactttaataggctattccaattgtctatcagactagctgtttgtggagattatatatatatatacatatgaccagctaaagctactgtataaaccaacatttccctttccacctgttcctcatcttaacccatcacaggtaagagtcttaatcctaatactacagcacaccaagggttaccatcaccccacttaccactagaaatgaggtccttgttactatttggtgggtgaatgatcccgtaccggaattctatcctgaggtttgtaggttcagacctacaagtagctacaggtagcttctattttctagggccactctctacatgctttcttagtttggatttccctaaatgcaatggctaagacaggcctaggatgcagataatttgagggctgactgcaggaagcaggtctaagggagcaaggagagtaatggaagaaacgtatgtcaaaataaagaggctttgcttttctaactataaa

SEQ ID NO: 27940 - DNA, 287 bp, Homo sapiens
gcaataagttgttcggaagtgtatttcctaacttccaaacctatttgaattttctagttatcctcttactcttgagttccagcataattataacatgatcagaaaaactagactatatgaattcaatctcgtggaagtgttgaagcttgttttatggcctagcatgtggtcaactttggtaactgcttcatgtgtgcttgaaaaaaatgtctgttcaggggtggtaaggtaaagtgctcttcctgtgttattcatgttgctcaaatgatctggataatttgtcgatt

SEQ ID NO: 27941 - DNA, 2076 bp, Homo sapiens
taatgaaaaccacctgggactacacacgcatgccaccacgcccggtcagaagctgtgtttttaagtggacataccatcttgtcctgctgaagtatctccatgtaatcacaatatctatgtcacccaaatctcctccttcctcctccctcccccaaaacacccccacaggcatgcataccctcccatgcgctggaggcagaatctcccaaggggagctggccaggagaggtgtccctgagttcagatggaggtggaagccagagtggggctgggaccacccagtgacatgaggatggggcttgggataaagccctggggacactgacatttaaagtgtggacagaaggagctactgaaggcaatggatttagaaaagcaattgagtatgatttccttcttcaagaaaggctgtccaactagctctcacttcctctcgtgtgttcagtgtcacccggaagcagagtttaatgtgactaaagtcaacattggctcacactgtcagggagtgtgggaagatgagtaaggactcatcgcagggcgatacccacagcttaaaataggcaccttcccctcccaggtctggttagggcagttgttacatatgaggggcgtggagttttgtcttgtattttggccttgttggtaaagcattccaaagcttcgacacaccctcctttcagcccattaggaaaggctgttgattgtaatattcacacagctccctgggctatggttaagagccttgcagaaggactgggagaagccctgtgtgtttgaagtattgtagcatcagaaaaaaacaccggaagaaggcaggtggggacaaggtgcctatgtctgctccttggaattcctttccttactgtccgaggcaactacagggaaagcaaagcgtgagcccccaaatccacacctgggaggaacgttcccctttgcaaggcatgggactggctggccctgtgtctcacgggggctctgagttttgaggtcacactagcctcctgaggcctggctgagagggctgggttgggggtcaggaggccccctgtagccacgaagctcctctggggcattgttaaaggttcaccctcttttttgtgggtatcctggaagatctcaagaaactgagcttggaagaagagaggctgagagggtctcccgccgcctgcgttctctgcagctatggccccacagcctccagtgaccatggaggggaaggtgccacccgccttggctgctgaaagggtgatgctcttatgcctgagtcttggctcctgtggtcctgcagagaccctgtgggggccgcccggtcgtcacctgcactcatcttgggttttccttccttttccaccctaagctgaaggtatttttttcctgttttcttcactctaacttggggaagaaggaagatcctttatggaaaagaaaaaaaaaaaagcacctttgaacgtcctgcaacttgagtttcaagctttcagaaggattcggtgctgctggcctgctcagacctccgcctgggctgtggagttcctcctgttggcccctcctctctgtaccacaaaagctctaggcggcccagccacccctgtgaaagcggcgcccgtagccagacgccaaggctgccgtcccgagccgagggtggcaccttgcccagcgcacgtgcattctcctgtgggaactcggagggcatgtggtgagcagtctcctgtcagttgaggtggaggctcccggcccatctttgctctcctcaggctgcccagctcctggcggcacatggtggcctggcaaagctgacttggcctcctcagttccccacccatccgcggatcatcgccttccctagccacctctctctatagccaccgacatctgcggagcgtcacagactggttctgagctgtggtttacaaattcaacccaacacagagtgaattcaaatttgcttttggaacagcctttatctccaattaagtgcaagtatatttcacactatgtgatattaaaggacttctccaatgactgggaggtactgaaccaagatgtttgtaaagaaacggtggggtgaggtggttaggt

SEQ ID NO: 27942 - DNA, 3791 bp, Homo sapiens
  misc_feature (900)..(900): n is a, c, g, or t
  misc_feature (1221)..(1221): n is a, c, g, or t
cgagattactgaattttacaagcttgacattttctattggctttataagctcttctcatgtttttattaccctcacatccaatccgttcgagctacacgctaaatcaaattggtattttatatttttatttttttagaggcaggatctcgctctgtcacccaggcaggagtgcagtggcacagtcatggctcgctgcagccttgacctcgcctcagcctccccagtagctgggaccacaggctcatgccacgcacgcccggctgaagctagttttaactgaagaaaactcaaagtgttctctcgccgttaacctttattattgaggcattggctctgctataggaaaacgaggtgacgttaatatcggtggttgacattaaccactggcaagtgacagtgtggctccttgacaagtggttgctgctcataaatgtcatgaaacaaaaacactgattttagagaagtgggattctacagttaatatcgccagcaaacttttattaagctctcactctgtgccaaacacatgcttgaagttggggtgaatccgtgaccattaagatgttggctgttcatgggcacgttatcaagcaactggggtgtgagagcgaatgataagagggtgaatctggatgaggagggacttccagggcacaggtggaggagaggcattgcagccatagagaggcccaagggaacagtcaagacaaggcggggacagtggccaggaggcgagggcagcacttcctgggcagggaaggcttgccagggagaccagactcctgtctctgtttggaaagaaaaggaaccgcactgggggtcagggaggctaggcacggcaccagcctgggatgccagtcccgcctgaggggccaaggcaaaggggaagcattcacagnccccacaccaggctctgacgccaagtggaagaagagggagatagaagcagaagcctgggcttccaggcctggttcctgggcgggtgttgatgggacccagggagagtcctgtggggatactttgggtctgggctggcaggggctctggaaggagaggcatggaggtgcgaacctggtgcccaggtggaggtgcagtgggggtaaggtggccaggctgcagacccctgcatcagaatgcctgcgaagctgtgggttttttgtttgtttgtttgttttatttcgagacagggtgtcactctgtcgcccagactggagtgcagnagcgccgtctcggctcactgcaagctccgcctcccaggatcaagtgattctcctgcctcagcctcccgagtagctggatttacagatgcatgccaccacgcccagctaattttttgtatttttagtagaaacgaggtttcaccacgttggccaggctggtctcaaactcctgacctcaaatgatccacctgcctcgtcctcccaagtgctggaattacaggtgtgagccgcaccagcctgttttttaattttatttagagacagggtctcactctgttgcccagactggagtgcagtggtgtaatcttggctcactgcagcctcaacttccagcgctaaagcaatcctcccacctctgcctcccgagtaactgggactacacacgcatgccactacacccaggtaatttttaaaaattttttttagagacagagcttctccatgttgcccaggctagcctcaaactcctgggctccagtgaccctcccgccttagtgtctcaaagtgctgggattacaggtatgagccaccacgcccggtcagaagctgtgtttttaagtggacataccatcttgtcctgctgaagtatctccatgtaatcacaatatctatgtcacccaaatctcctccttcctcctccctcccccaaaacacccccacaggcatgcataccctcccatgcgctggaggcagaatctcccaaggggagctggccaggagaggtgtccctgagttcagatggaggtggaagccagagtggggctgggaccacccagtgacatgaggatggggcttgggataaagccctggggacactgacatttaaagtgtggacagaaggagctactgaaggcaatggatttagaaaagcaattgagtatgatttccttcttcaagaaaggctgtccaactagctctcacttcctctcgtgtgttcagtgtcacccggaagcagagtttaatgtgactaaagtcaacattggctcacactgtcagggagtgtgggaagatgagtaaggactcatcgcagggcgatacccacagcttaaaataggcaccttcccctcccaggtctggttagggcagttgttacatatgaggggcgtggagttttgtcttgtattttggccttgttggtaaagcattccaaagcttcgacacaccctcctttcagcccattaggaaaggctgttgattgtaatattcacacagctccctgggctatggttaagagccttgcagaaggactgggagaagccctgtgtgtttgaagtattgtagcatcagaaaaaaacaccggaagaaggcaggtggggacaaggtgcctatgtctgctccttggaattcctttccttactgtccgaggcaactacagggaaagcaaagcgtgagcccccaaatccacacctgggaggaacgttcccctttgcaaggcatgggactggctggccctgtgtctcacgggggctctgagttttgaggtcacactagcctcctgaggcctggctgagagggctgggttgggggtcaggaggccccctgtagccacgaagctcctctggggcattgttaaaggttcaccctcttttttgtgggtatcctggaagatctcaagaaactgagcttggaagaagagaggctgagagggtctcccgccgcctgcgttctctgcagctatggccccacagcctccagtgaccatggaggggaaggtgccacccgccttggctgctgaaagggtgatgctcttatgcctgagtcttggctcctgtggtcctgcagagaccctgtgggggccgcccggtcgtcacctgcactcatcttgggttttccttccttttccaccctaagctgaaggtatttttttcctgttttcttcactctaacttggggaagaaggaagatcctttatggaaaagaaaaaaaaaaaagcacctttgaacgtcctgcaacttgagtttcaagctttcagaaggattcggtgctgctggcctgctcagacctccgcctgggctgtggagttcctcctgttggcccctcctctctgtaccacaaaagctctaggcggcccagccacccctgtgaaagcggcgcccgtagccagacgccaaggctgccgtcccgagccgagggtggcaccttgcccagcgcacgtgcattctcctgtgggaactcggagggcatgtggtgagcagtctcctgtcagttgaggtggaggctcccggcccatctttgctctcctcaggctgcccagctcctggcggcacatggtggcctggcaaagctgacttggcctcctcagttccccacccatccgcggatcatcgccttccctagccacctctctctatagccaccgacatctgcggagcgtcacagactggttctgagctgtggtttacaaattcaacccaacacagagtgaattcaaatttgcttttggaacagcctttatctccaattaagtgcaagtatatttcacactatgtgatattaaaggacttctccaatgactgggaggtactgaaccaagatgtttgtaaagaaacggtggggtgaggtggttaggt

SEQ ID NO: 27943 - DNA, 346 bp, Homo sapiens
cagaagtgacttatcctatccaaagtctggtccctgtctctctcacaggcttggagaggctgatgtgaatcttatctcttgttattagaatgggagtgtctagagggcaaggtcctggttgactggaccttgctgagcaccctaagctgagcacaccatgtagtagctgtcagtaaatgactgaatgaagtcgatgcaatcatgtctttgcatatgggagttcctcttcctggaatgcgactcaccccccttcagatccttcctgtccttcaggcccagtactgttccccagcttctccaggacatcacagcaaccccctcttctgccttacctttcccagcattg

SEQ ID NO: 27944 - DNA, 950 bp, Homo sapiens
  misc_feature (5)..(5): n is a, c, g, or t
  misc_feature (65)..(65): n is a, c, g, or t
  misc_feature (83)..(83): n is a, c, g, or t
  misc_feature (88)..(88): n is a, c, g, or t
  misc_feature (151)..(151): n is a, c, g, or t
  misc_feature (242)..(242): n is a, c, g, or t
  misc_feature (337)..(337): n is a, c, g, or t
  misc_feature (341)..(341): n is a, c, g, or t
  misc_feature (458)..(458): n is a, c, g, or t
  misc_feature (684)..(684): n is a, c, g, or t
  misc_feature (687)..(687): n is a, c, g, or t
  misc_feature (689)..(689): n is a, c, g, or t
  misc_feature (692)..(694): n is a, c, g, or t
  misc_feature (699)..(699): n is a, c, g, or t
  misc_feature (702)..(702): n is a, c, g, or t
  misc_feature (705)..(705): n is a, c, g, or t
  misc_feature (789)..(789): n is a, c, g, or t
  misc_feature (800)..(800): n is a, c, g, or t
  misc_feature (859)..(859): n is a, c, g, or t
  misc_feature (883)..(883): n is a, c, g, or t
  misc_feature (887)..(889): n is a, c, g, or t
  misc_feature (891)..(891): n is a, c, g, or t
  misc_feature (895)..(895): n is a, c, g, or t
  misc_feature (903)..(903): n is a, c, g, or t
  misc_feature (906)..(906): n is a, c, g, or t
  misc_feature (909)..(909): n is a, c, g, or t
  misc_feature (921)..(921): n is a, c, g, or t
  misc_feature (923)..(923): n is a, c, g, or t
  misc_feature (928)..(930): n is a, c, g, or t
atggntaaccaaagctccacaccgggcttcctccttctgggcttctctgaacacccagggctggnaaggactctcttcgtggntgtcntcacttcctacctcctaaccctagtgggcaacacactcatcatcctgctgtctgcgctggacnccaagctccactctccaatgtactttttcctctccaacctctccttcttggacctctgtttcaccacgagttgtgttccccaaatgctggncaacctctggggcccaaagaagaccatcagcttcctggactgctctgtccagatcttcatcttcctgtccctggggacaactgagtgcatcctcntganagtgatggcttttgatcgctacgtggctgtctgccagcccctccactatgccaccatcatccacccccgcctgtgctggcagctggcatctgtggcctgggtcattgggctagtggngtcagtggtccagacaccatccaccctgcacctgcccttctgccccgatcggcaggtggatgattttgtctgtgaggtcccagctctaattcgactctcctgtgaagacacctcctacaatgagatccaggtggctgttgccagtgtcttcatcttggttgtgcctctcagcctcatccttgtctcttacggagccattacctgggcagtgctgaggattaactcngcnanagnnnggagnaangcntttgggacctgctcctcccatctcactgtggtcaccctcttctacagctcagtcattgctgtctacctccagcccaaaaatccntatgcccaagngaggggcaagttctttggtctcttctatgcagtgggcactccttcacttaaccctctcntatacaccctgaggaacaaggagntaannngngcantcaggagnttnctngggaaggaaagngnctcannnaaagctggagagctgcttaa

SEQ ID NO: 27945 - DNA, 412 bp, Homo sapiens
gccaacatggtgaaaccccgtctctactaaatatacaaaattagccaggcatggtggtgcatgcccgtaatcccagctactggggaggctgagataggagaatcacttgaacccaagaggcagaggttgcagtgagccaagattgtaccgctgcactacagcctgggtgacagagtgagagtgtctcaaaaaaaaaaaaaaaaaagaaagaaagaaaatctcacgttctctggtcaatgtgaagatacatcttcctcgtgactcagcactccatttccaggtgcaggagaaccatccacacacctgcccaggagacatggctaagatgctcgtacatttattatttttaatagcaaaattctaaaaagagtctgaggggaatgaatgaatcaatcaatcatggtgcagtcat

SEQ ID NO: 27946 - DNA, 473 bp, Homo sapiens
ggtagagatggagtcttgctatgttgcccaggctggtcttgaactcctgggctcaagcgatctgcctaactcagcctcccaaagtgccgggattacaggtgtgagccaccgtgctctggcaagaacaatgttttaagaagcatgaggatgttgagtatcaaatgccgcaaagttcgggtgagaaaactgaagagtctactcggcaatcaggagttcattggagactctggcagaagttttctatagtagaatggcaggaaatgtagccatactgaaattttgttagggacaaacaggtgatgaggaaatgaagaaaatgagaatgaagactgtttttaagaaactggagtgtgaagaaaacagtaggacaataagtaagaaacctcaacggggtgtgaggacaagttccccaggataaagtggataagatggaggttggcacttaagatttggagcaggttcaacagagagga

SEQ ID NO: 27947 - DNA, 447 bp, Homo sapiens
ggtgttgtggtgtgggaggatcacttaagccctggaagtcgaggcagcagttagctgtggtcatgccactgcactccagtctgggtgacagagtgactttgtctctaaaaaaagattccttgaaaaaaacaacaaacataaaaaaatagctgggtgtgttggctcatgactataaaatcccagcaccttgggaggctgtggtggttggatttgctttgaacccaggagttcaagaccagcctgagtaacttggtgaaaccccatctctacaaaaataccaaaaaattacccaggcatagtggcacatgcctgtagtgccagctactcgggaggctgaggtgggggaatcacctgagcccgggaagttgaggctgcagtgagctgtgattgtgccactgcactccagcccggaagacggagtaaggccctgtctcgaaaaaaaaagaa

SEQ ID NO: 27948 - DNA, 474 bp, Homo sapiens
gggaactattagaacaaatatataaaccttcctaaataccaaaaaaaaaggtaaaaactaaaatataaaaagaaaacaagtaaaatagaccacatattgaaagactacttgcataaaagacttgaatacatagacatatatataaggacattaaaaacaaacagataaatcttctacctacagctccatcagtaagaatttgttgaataagctttggtacattcacacaagaaagtattataccatgcagctataaaaatgaatgaaaacatctccatatgaagctctatatgccaccacataggcatcctcgggacaggttgatactcatttgtatctgtttatattttggaaacaaataggggaaggacaaactatagaaaaaattgttaaacagttacctataaagaaagtgaagaaattgggtaaaagtgaaagaggaatgaaactcgacttctttgaatattttttgtt

SEQ ID NO: 27949 - DNA, 375 bp, Homo sapiens
cctggtagaccagaaggaccattcctttaagctatgaagatgcacatttcttggctctgttaggtactagatgagtatctttaggcagggagcactttacattttaaagactgctatcatttgtggttgaataactggaatttgcttacatcaattttccagatggccaaaatgataaggtcactgattctgttgagtgatttttacacatgtaaactgttagaaaaacagtgcttggcagccgggcatggtggcacatgcctgtagtcctagttacctaaagggctgaagcgggaggattgcttgagtgagttcaaggagttcaaggcaagcctgggcaataagtgggaccctgtctctaaaaacaaacaaaaa

SEQ ID NO: 27950 - DNA, 381 bp, Homo sapiens
aaaaatcttcctaaattttctgtaaagcaaaatttcacatagcaaaaccaattttctcttggctcccattataaaactagaggtttatttctaggctgggtgcggtggctcacgcctgtaatcctagcactttgagaggcctaggcgggtggattacctgaggtcaggagtttgaaaccaggctgggcaacatggtgaaaccctgtctctactaaaaatacaaaaattagccgggcatgttggtgcatgcctgtaattccagctactcgggaggctgagacagtagagttacttgaacccaggaggcagaggttgcagtgagcgagattgcatcactgcactccagcctgggtgacagagatgagacaccatctcaaaaaa

SEQ ID NO: 27951 - DNA, 297 bp, Homo sapiens
ctgtggccctgcccaagtcactctcctttctaacgctcatattctcctgtgttcattggaggtaataggacctgcctccaagagttgtaaagatgaggtgagacaggctcggccaaagtgccccattgactgtgtagggctctgcagtgctgtcttcttattttcagatgtttggtacctgccccttggtacctgggtacttgccatctgtaccatatgctgtgtagagggtaaatgttcattgacaatagtgaatactccagagaaaaatattaataataaaaaagcaatgtttga

SEQ ID NO: 27952 - DNA, 378 bp, Homo sapiens
gcaggaatgtgtggggagtattaatggacagtatgacaaggagcttgtggagtgaattaaagcagcctcagagagaaggctctttacctccacgtaatcctcagacagggcccaggttccccttagtgtgcctaggacagctcattaagaattaatgcccatggctgggtgcggtggctcatgcctgtaatcccagcactttgggaggctgaggcgggaggatcacttaaggtaagaagctctagaccagcctggccaacatggtaaaaccccaaaaatacaaaaattagctgggtgtggtggcaggtacctgtaatctcagccactcgggaggctgaggcaggagaatcgcttgaacctgggaggcagaggttgtgg

SEQ ID NO: 27953 - DNA, 707 bp, Homo sapiens
tgattcggctgatctggctggctaggtgggtgtccccttcctacctcaccgctccatgtgcgtccctcccgaagctgcgcgctccgtcgaagaggacgaccaaccccgatagaggaggaccggtcttcggtcaagggtatacgagtagctgcgctcccctgctggaacctccaaacaagctctcaagattgctgatctagggccactaagtgatgaagcaaaaaggatggctaaaaaggacctcaacccttttgactttaaaaggaaaatagcttaaccttcaacctgtgtgacatttaactttttgaacccaaccgtaaaagctatcttctaaccaacaaaaagttaataattacatttggaattatacagaattagaaaattggcatttaaaaatactcaataatttgtccctggtttttaattttcaaaatattttctttttgaagagccagattccagtgatcctgcctctcagaaatttccacatttcttatttttcattaggccttaagaagctgcatttgtaaacttgtgtttcattattaaagcttaatttattttttatataaatagtatgtgctttgtgtacatagagaattaagtgaatgagtcacacagatgttggctgttgttaatgtgaaaattaaacagctgtatcacattttgaaaaataaaagtttcatctgaatgaatataaaaaaaaa

SEQ ID NO: 27954 - DNA, 457 bp, Homo sapiens
ccagctaatttttgtatttttagtagagacggggtttcaccatattggccaggctggtctcgaactcctgaccctgtgatccacccacctcagcctcccaaagtgctgggattacaggcatcagccatcacgcccggctggatttttaaattggtgaattaacatactcattcaacgttggccagttttggccagatgccatagctcacgcctgtaatctcgacatttgggaaagccaagaagggaggatcacttgaggccaagagttcgagactagcctgggcaacataacaagaccccaactctatgaaaaacaaaaataaataaaattagtcaggcatagaggcctatacctgtagtaccacctatgcaggtagatcatttgagcccaagaattcgaggctgcagtgagttatgatcatgccattgcatgctagcctgggtgacagagtgagac

SEQ ID NO: 27955 - DNA, 1781 bp, Homo sapiens
aaaaaaaagaaagctgacagatagtatctgtaaaagtataggccacaaaggaatgacaagttgttaattagaacacaactggaaatctcaagattacccttacctgctttggttttctacttagagttatttaatgcagctaagggcacttttttcctcatttgctaaaatttccacagttttgaatacgaatcatttctacatttcttgattattcgtttaggcacatagtcaggtgcaacaaaatttcctgatcaagtggagcttgctaactgatttaccaacacaaattagaccaaaattcatgaaggtgaggccattaaacagatcacttttgtctggaatgtatttcagaaaacagggattatgttttacttttatagctatgctctgcactggcaagagattttgcaacaattttttattgtttgcctaaaaccttagaaccttagctcatattagacttgagtgaactgagatgtacaggaaagataaaaagaaagttactattggtctcagaatgtaaaagtctgggattaggttgcttcatcacaaagtattcagccttttaccaaaactacctttcaaaaagcacttaaaagttgaggccactgacaaaaggaaggaaaaatctcctacagtgattgttgttggaagaatgggaatgatagctcaattaatttagttaattcatactgccccagatgtccttgtcagcttgtcctctagtcttcagactttgtgaataaatcaggtggagtaagtaatttacatgttgtgtctcatttactttttgcaacaaacaaccgccctttactgataatggagattaaggctaaggggaactaaaagaatgttgtctacaatcacacagcaagtgatggaactgaaattcctgttggggtctttctggtttaaagtttattttaaagatcatttctactatatcccaattttaaaatatgcattagaaagaaaacagcaaaaacttcttttttctatttaaaaacaagcaaaaagaaggacataaaagttgcctatattcctgccatctagagagacttaattctgtcaagactgtaggacacattgaccatctttatttgttcctctgccccaaaagaaacaaaacttaaagtcagagaagcttaatgaaacagtaggataaaggctccctatcttgtgtctagaagtaagaattgacagtgattccgttttcaaagcatttattgaatagtatcttccaaacagtatgctggcttttagacaggttatacaggtgaatgtaggggtctatccttaaaaagcctataaggcagttgttctcaactctggctcatttaaaactctattgggaagtttttagaaaatatctgtggctgggcattttttttttttaaagagacagagtcttgctctgtcatacagactggagtgtagtggtgtgatcataagtcactgcagccccaaactcctgggctcaagcaattctcccacctcagcctcctgagtagcagccataggcatgtgccacaacgcttggctaacacatttttttaaagcttcttaggagatgcagccatggtgaagagccagtattatgaattaattggggaaactgatgcatatagatcagtattaggagagtttgaggctaggccagatggctcacatgtctgtaatcccagcagtttgggaggctgaggctggtggattgctttgagcccaggagtttgagaccagcctgggtaacgtggtgaaaccctatctctaccaaaaaa

SEQ ID NO: 27956 - DNA, 480 bp, Homo sapiens
attccagatttatttttatgttgggggaagggagagtctacgaaattttttttttttacatgatttttggaaggaaggagattttttttcaactttctatatagattattagttttaaaaacaaatcttcagagaaggcaaatcattaacagtcaagaacaactttgataatatatagagatgaataaatcagtatttttattttcttaaaataagtatataatttatcttggctggatctggtggctcatgcctgtaatcccagcactttgggaggctaggcaggtggatcctttgaggtcgggagttcaagaccagcctggccaacatggtgaaaccccatctctactaaaaatacagaaaattagccgggtttggtggcgggtgcctgtaatcccagctactctggaggctgaggcacaagaattatttgaacccgggaggcagaggttgtagtgagctgagatcgcaccactgtac

SEQ ID NO: 27957 - DNA, 1616 bp, Homo sapiens
gtatattctgcagagataaccaagtaaatgacatacagatagtcaatggctctgagtggctctactagctacatctttttatgttaataggttttttacttttttcagagaaaattatatccagcatttttaatctttagactaataacaccaggtagacacaaagctattcctggaacattgctttattatagataggaattccataaccaattacctcctatttgctagaacacactaacacaaatacataaaaaatacagactaaactataatagaaggcagttttctctggtgtttgtagcacctctcttctactaatttaaaatatcttcatcactgaggatgcctcctattaaaatgttatatctgagttatactaataactatgaaattaccaggtgtctctgcttgagtagttggaattaatttttttgcctcataactctggagacttctcagaaagtgtagctaaaggtttattcatcaaaatccccttctaatgaatcgactctgatgattctgctgttgtcagaatggatgttctaggaagttgtcatcacacttgaccgtaatgaaaatgctgccctggaccatctccccaaactatgtgtcctcagtattgtgggaagaacccacttcatgatttctaaccagggtagcctctggaagtacaaatgattgctgtaaaattatgaacagagcagcatcaggctttgctctgatgtatcttatgaagcctttctacttccaaatgaagactatgaagagaaccttgaaacaatgcccttctgggagctcattcagcaagcatattctgagggcatattctgttccactctctacgcatggaggattcttgtggtgaggaagacattcttcattggttttaaagagctcaccatttagcacagtcagccgctgagacaggactgctagataactacagaggttatgcattgcaccatttgtacacctcgtacaaccctatgaggtagccctcagggttcaaatggaatgcatctatattttgaatacagagtgatatataataacaagaaatcctggatgtctaattgactgtcttcccaaacagcatagcagattacctttttagtctcatcatttatgtgcagattatgaaacacatttattagtcaatagagtcccttcctgcatttatacattctcctcataactcagttgttctacttcacttccataaggctgacttgcaagtctgaatttatagttgtgttctctttcctaaatttagttcagttatctccctccataatttacatttaaatatcccactgtaacctaaaacatagcttcctttgttaatttccccgttgttacgaagaaaagtattattcctcagtaatttgggctcaaaatattaccctaatctttgactccttctgtcttcctcagtcccaagacacatcaaaggctgatcaaagttagccgggcatggtggtgggcacctgtaaccccagctactcaggaggctgaggcaggagactcacttgaacccgggaggcggaggttgcagtgagctgagatcacaccactacactccagcctgggtgacagagtgagactctgtctca

SEQ ID NO: 27958 - DNA, 301 bp, Homo sapiens
tatcactgatttctatctgttgcactgttgcattcactaagaattctactataaccagtaaaagcacacatttttgtcttggtccttggtgctataattaactttgacattaaatttgcttttgaaaatttttaaacagacaccctttaccaggttaaggagattccttttctattcatttagtaaaacttgcctataaaactagttctagagtcttaatttgaatgctgattcaatttcttcaatggctactgatttcatccgttttctaattcttcttgaatcaattttagtaatataa

SEQ ID NO: 27959 - DNA, 423 bp, Homo sapiens
agaaaatagagaaaagtgatagataaggggcctcatttagtgggagcttaaatttcaggcatagtgatgctggctcggttcaatggagatttacaacaacaggtgcagtggaaccttagattggggcagagagtgatttgtgtgtgtgttgggggaggggagaaagtgggggcctcatttgatctgtctgctactggaagaaaaataaactcaaattgcccttctcttcttctaagaaacaaagggatgaaaggaactttaggccactaagcttcttttattcttgcctctttctcaaatagatcagaaaataatcccatattattaaccaccttgccttccccaaaaatatgaaaaaaaagacactactattcccccgatacttacagaatcctataatacggtcagtgagtctggacctca

SEQ ID NO: 27960 - DNA, 434 bp, Homo sapiens
agtttacctcaggaaaagtgcttgtcaatctgcgggggaaacgtcccttgctgtgcttagtttttgttcttatgctgccctctaatggataccaaattatttcattaaacccagaacaaaagtaaattttcagcttctcagggctcctgcatcatcccattactgttggaaattgttatctgaccattttcccctttgcatacatgttggtgtagcacagctcgtactaattgtgcggagtcaccctgggccaaagttgcattcctgttctgggaagtagagggacagcgatgccaatttgtgcactgtcgaactttccttttttctctgccagcaattgggaaagaattgatgttctgggggacttaaaaatgagggaataaaaacagtgttaagtgctgtattaagacgatatgctgtatgttttatcagcc

SEQ ID NO: 27961 - DNA, 362 bp, Homo sapiens
gcaatccacccacttcagcctcccaaagtgctgggattacaggcataagccaccacacccagcctcataagtataagaaatatctaacctgaagcccactgggtgagccacgccccagaagtagctgacttcttctagatttctgtccaggattagccacacacagggctgtgactttttaagaaataggaagtggggtatagtggcttgcaccagctactcaggaggctgaggtgggaggatcgcttgagcccagacattgaggctgcagcgaggcatgatggtgccactgcactccagcctgggtgacagagcaagactctgtctctcaaaaaaattaaatttcttttttcttaaaattt

SEQ ID NO: 27962 - DNA, 397 bp, Homo sapiens
cagtaaagagtttaattgacacaggccagccacaacatgtgggggacggagttattactcaaatctatctcactgaaggcttggaggccctcccagcaggacgactgagcaaggccttggaagaccggagagattggagcgcagaatggggaggaattgaggggaaaatggagatagaacctgaaagagccccaaacgccagaacctgtagctccccaagaataagatcttccagaagaactagacccaaaactagccgttggggaacaccgaaatccttggaggagcaacatccgcatgaccctttgtgttcctttaggcaaaaggacttgcttccattgtttgttcaattgtttgtgtttcttaaataaataaaacgattttcatgtatctttga

SEQ ID NO: 27963 - DNA, 1162 bp, Homo sapiens
cagtaaagagtttaattgacacaggccagccacaacatgtgggggacggagttattactcaaatctatctcactgaaggcttggaggccctcccagcaggacgactgagcaaggccttggaagaccggagagattggagcggtaagtcgcgctggtcacgttggacacctgcgcgttgggagattctggagccagaaggatagccgaatggccttcgcccgccctgcccctcgcctgcttcagaaacccccggaaacgccccggttgagaccccggcccgagccgcctgggggccctagggaggctgaacgcccggtggctcccgggatggctcttcccgttctttgcgccgccttcacccagtgagggagcctgtgccctccctgcccagtcgcttttggggccgctgcggagcttccgctgccatcttcggatcctgtgttccgcacgggggctccaccagggcagggatcgtggtgagggtggctcgtgggtccccctcgcggggagcagggtctggcactcaccagggcgcaggactaggacttgtcgaatgaatccatccttttagcttttagtcctttgaagagccttgagaatggaaatcatgagagatttttccatggggaagttccttttacaaagcatttatttacgttgacttcttggcaccccgcggggcggcaacgggcagggcctccagtgcaccttctgcgccgtggagccgcgggggctcagctgggcggtggtcgggtcctgaggccggagggcgggagcaggggaggggaaaagcaaaagcggggaaagaagccggggagcggtggaccagacgtccagacctcctgaaaggctggcggggaggcacaggcgggatcttccggaggtgagaatttttttttattatagcagaatggggaggaattgaggggaaaatggagatagaacctgaaagagccccaaacgccagaacctgtagctccccaagaataagatcttccagaagaactagacccaaaactagccgttggggaacaccgaaatccttggaggagcaacatccgcatgaccctttgtgttcctttaggcaaaaggacttgcttccattgtttgttcaattgtttgtgtttcttaaataaataaaacgattttcatgtatctttga

SEQ ID NO: 27964 - DNA, 2945 bp, Homo sapiens
cgcggccacgccccgagccctcgaatgcgagccaatcgttgctcggcgcctgaaggggcagtacccaagcgagccatttaacatggcggaggatgtttcctcagcggccccgagcccgcggggctgtgcggatggtagggatgccgaccctactgaggagcagatggcagaaacagagagaaacgacgaggagcagttcgaatgccaggaactgctcgagtgccaggtgcaggtgggggcccccgaggaggaggaggaggaggaggaggacgcgggcctggtggccgaggccgaggccgtggctgccggctggatgctcgatttcctctgcctctctctttgccgagctttccgcgacggccgctccgaggacttccgcaggacccgcaacagcgcagaggctattattcatggactatccagtctaacagcttgccagttgagaacgatatacatatgtcagtttttgacaagaattgcagcaggaaaaacccttgatgcacagtttgaaaatgatgaacgaattacacccttggaatcagccctgatgatttggggttcaattgaaaaggaacatgacaaacttcatgaagaaatacagaatttaattaaaattcaggctatagctgtttgtatggaaaatggcaactttaaagaagcagaagaagtctttgaaagaatatttggtgatccaaattctcatatgcctttcaaaagcaaattgcttatgataatctctcagaaagatacatttcattccttttttcaacacttcagctacaaccacatgatggagaaaattaagagttatgtgaattatgtgctaagtgaaaaatcatcaacctttctaatgaaggcagcggcaaaagtagtagaaagcaaaaggacaagaacaataacttctcaagataaacctagtggtaatgatgttgaaatggaaactgaagctaatttggatacaagaaaaaggtctcacaagaatcttttcttatctaagttgcaacatggaacccagcaacaagaccttaataagaaagaaagaagagtaggaactcctcaaagtacaaaaaagaaaaaagaaagcagaagagccactgaaagcagaatacctgtttcaaagagtcagccggtaactcctgaaaaacatcgagctagaaaaagacaggcatggctttgggaagaagacaagaatttgagatctggcgtgaggaaatatggagagggaaactggtctaaaatactgttgcattataaattcaacaaccggacaagtgtcatgttaaaagacagatggaggaccatgaagaaactaaaactgatttcctcagacagcgaagactgattgtgtttgtaaaagcttgatgaaaggacagttaagtattttgatcactgcattttgtttgaaacttgtgtcattgatgtaatttaaaacttttgtttaaagcattacagtatttttctgtgaccatcaattaatgagggtttgtgctaccagagttaaagcatatgctatcattgtattctttaagaaccttattttgataaaatgtaaatttgttgaaccctgccacatttagtatccccacccccaaatcctgttccaatgaaaaaattaaaacctgatacgaaaaaaaaaaaattccagttaacctattttgtgtctgtaggctgacctcaaccctgtaacgtaacccattaaaatgaatttctttttttttaagacagagtttctctctgttgcccaggctggagtgcagtggcgcaatttcagctcactgcaacctctgcctcccaggttcaagtgattctcctgcctcagcctcctgagtagctgggattacaggcacacaccaccacgcccagctaatttttgtatttttagtagaggcggggtttcaccatgctggtcaggatgttctccaactcctgacttcatgatccacccacctcggcctcccaaagtgctgagattacagacgtgagccactgcgtcctgcctaaaatgaattttctagatgattgaataacagtagtcctttgatagaagataatgacttggtttatggccttaatatactacttaattacttaagatgtttattaatagaatgataaatgtacagagtaacctataagcatgacatacttttgctttcagtagtttcatgtaaagaaaaaaacttgaaaatagtaatacctgagtacccatgggaataatagacactggggaggtagggtggggagcgggagcaagagctgaaaaacttacctactggggactgtgctcactacctgggtgacaggatcatacgtaccccaaacctcaacatcacacagtatactcagctaacaaacctgcccatgtgtttcctgaatctaaaataaaaatcgaaataatttttttaaaaaagaaaaagacaatagtattacccatgggacaaaatttgtactattagcaagaatcattttgtgtctcatttagaaacaatttgacttttgttccagtgtttaaactttgacaaaaatggttttgaatagatctttataacctgatgccataaatacaagattctctgataccttcatttaatatatcaatattgggcctaaaacagtattctgtaaagcttaaattggtattaactatgatcatcttgatgtctatgatagataataaacaaggtcatacataccttactaaacaattttggtttttcaccaacattttattctttaaaagatttagactaacagaattatttagcatttcgagtcatgtgctttatttagcaagtgagtaaaaatattggaatattgaagtatttgcataaaaaatcaaatggtggtgttttgtaatctctattgtatttcctattaaggtttcatatattactttcccattgttcctgaatttgttatcctatatataaacagaaacatggatg

SEQ ID NO: 27965 - DNA, 3005 bp, Homo sapiens
cgcggccacgccccgagccctcgaatgcgagccaatcgttgctcggcgcctgaaggggcagtacccaagcgagccatttaacatggcggaggatgtttcctcagcggccccgagcccgcggggctgtgcggatggtagggatgccgaccctactgaggagcagatggcagaaacagagagaaacgacgaggagcagttcgaatgccaggaactgctcgagtgccaggtgcaggtgggggcccccgaggaggaggaggaggaggaggaggacgcgggcctggtggccgaggccgaggccgtggctgccggctggatgctcgatttcctctgcctctctctttgccgagctttccgcgacggccgctccgaggacttccgcaggacccgcaacagcgcagaggctattattcatggactatccagtctaacagcttgccagttgagaacgatatacatatgtcagtttttgacaagaattgcagcaggaaaaacccttgatgcacagtttgaaaatgatgaacgaattacacccttggaatcagccctgatgatttggggttcaattgaaaaggaacatgacaaacttcatgaagaaatacagaatttaattaaaattcaggctatagctgtttgtatggaaaatggcaactttaaagaagcagaagaagtctttgaaagaatatttggtgatccaaattctcatatgcctttcaaaagcaaattgcttatgataatctctcagaaagatacatttcattccttttttcaacacttcagctacaaccacatgatggagaaaattaagagttatgtgaattatgtgctaagtgaaaaatcatcaacctttctaatgaaggcagcggcaaaagtagtagaaagcaaaaggacaagaacaataacttctcaagataaacctagtggtaatgatgttgaaatggaaactgaagctaatttggatacaagaaaaagtgttagtgacaaacagtctgcggtaactgaatcctcagagggtacagtatccttattgaggtctcacaagaatcttttcttatctaagttgcaacatggaacccagcaacaagaccttaataagaaagaaagaagagtaggaactcctcaaagtacaaaaaagaaaaaagaaagcagaagagccactgaaagcagaatacctgtttcaaagagtcagccggtaactcctgaaaaacatcgagctagaaaaagacaggcatggctttgggaagaagacaagaatttgagatctggcgtgaggaaatatggagagggaaactggtctaaaatactgttgcattataaattcaacaaccggacaagtgtcatgttaaaagacagatggaggaccatgaagaaactaaaactgatttcctcagacagcgaagactgattgtgtttgtaaaagcttgatgaaaggacagttaagtattttgatcactgcattttgtttgaaacttgtgtcattgatgtaatttaaaacttttgtttaaagcattacagtatttttctgtgaccatcaattaatgagggtttgtgctaccagagttaaagcatatgctatcattgtattctttaagaaccttattttgataaaatgtaaatttgttgaaccctgccacatttagtatccccacccccaaatcctgttccaatgaaaaaattaaaacctgatacgaaaaaaaaaaaattccagttaacctattttgtgtctgtaggctgacctcaaccctgtaacgtaacccattaaaatgaatttctttttttttaagacagagtttctctctgttgcccaggctggagtgcagtggcgcaatttcagctcactgcaacctctgcctcccaggttcaagtgattctcctgcctcagcctcctgagtagctgggattacaggcacacaccaccacgcccagctaatttttgtatttttagtagaggcggggtttcaccatgctggtcaggatgttctccaactcctgacttcatgatccacccacctcggcctcccaaagtgctgagattacagacgtgagccactgcgtcctgcctaaaatgaattttctagatgattgaataacagtagtcctttgatagaagataatgacttggtttatggccttaatatactacttaattacttaagatgtttattaatagaatgataaatgtacagagtaacctataagcatgacatacttttgctttcagtagtttcatgtaaagaaaaaaacttgaaaatagtaatacctgagtacccatgggaataatagacactggggaggtagggtggggagcgggagcaagagctgaaaaacttacctactggggactgtgctcactacctgggtgacaggatcatacgtaccccaaacctcaacatcacacagtatactcagctaacaaacctgcccatgtgtttcctgaatctaaaataaaaatcgaaataatttttttaaaaaagaaaaagacaatagtattacccatgggacaaaatttgtactattagcaagaatcattttgtgtctcatttagaaacaatttgacttttgttccagtgtttaaactttgacaaaaatggttttgaatagatctttataacctgatgccataaatacaagattctctgataccttcatttaatatatcaatattgggcctaaaacagtattctgtaaagcttaaattggtattaactatgatcatcttgatgtctatgatagataataaacaaggtcatacataccttactaaacaattttggtttttcaccaacattttattctttaaaagatttagactaacagaattatttagcatttcgagtcatgtgctttatttagcaagtgagtaaaaatattggaatattgaagtatttgcataaaaaatcaaatggtggtgttttgtaatctctattgtatttcctattaaggtttcatatattactttcccattgttcctgaatttgttatcctatatataaacagaaacatggatg

SEQ ID NO: 27966 - DNA, 3021 bp, Homo sapiens
cgcggccacgccccgagccctcgaatgcgagccaatcgttgctcggcgcctgaaggggcagtacccaagcgagccatttaacatggcggaggatgtttcctcagcggccccgagcccgcggggctgtgcggatggtagggatgccgaccctactgaggagcagatggcagaaacagagagaaacgacgaggagcagttcgaatgccaggaactgctcgagtgccaggtgcaggtgggggcccccgaggaggaggaggaggaggaggaggacgcgggcctggtggccgaggccgaggccgtggctgccggctggatgctcgatttcctctgcctctctctttgccgagctttccgcgacggccgctccgaggacttccgcaggacccgcaacagcgcagaggattaaaaccttcatgggggcagagactggctatctgaagtcatcacctcctaacacaggctggcagtagatgttcactattattcatggactatccagtctaacagcttgccagttgagaacgatatacatatgtcagtttttgacaagaattgcagcaggaaaaacccttgatgcacagtttgaaaatgatgaacgaattacacccttggaatcagccctgatgatttggggttcaattgaaaaggaacatgacaaacttcatgaagaaatacagaatttaattaaaattcaggctatagctgtttgtatggaaaatggcaactttaaagaagcagaagaagtctttgaaagaatatttggtgatccaaattctcatatgcctttcaaaagcaaattgcttatgataatctctcagaaagatacatttcattccttttttcaacacttcagctacaaccacatgatggagaaaattaagagttatgtgaattatgtgctaagtgaaaaatcatcaacctttctaatgaaggcagcggcaaaagtagtagaaagcaaaaggacaagaacaataacttctcaagataaacctagtggtaatgatgttgaaatggaaactgaagctaatttggatacaagaaaaaggtctcacaagaatcttttcttatctaagttgcaacatggaacccagcaacaagaccttaataagaaagaaagaagagtaggaactcctcaaagtacaaaaaagaaaaaagaaagcagaagagccactgaaagcagaatacctgtttcaaagagtcagccggtaactcctgaaaaacatcgagctagaaaaagacaggcatggctttgggaagaagacaagaatttgagatctggcgtgaggaaatatggagagggaaactggtctaaaatactgttgcattataaattcaacaaccggacaagtgtcatgttaaaagacagatggaggaccatgaagaaactaaaactgatttcctcagacagcgaagactgattgtgtttgtaaaagcttgatgaaaggacagttaagtattttgatcactgcattttgtttgaaacttgtgtcattgatgtaatttaaaacttttgtttaaagcattacagtatttttctgtgaccatcaattaatgagggtttgtgctaccagagttaaagcatatgctatcattgtattctttaagaaccttattttgataaaatgtaaatttgttgaaccctgccacatttagtatccccacccccaaatcctgttccaatgaaaaaattaaaacctgatacgaaaaaaaaaaaattccagttaacctattttgtgtctgtaggctgacctcaaccctgtaacgtaacccattaaaatgaatttctttttttttaagacagagtttctctctgttgcccaggctggagtgcagtggcgcaatttcagctcactgcaacctctgcctcccaggttcaagtgattctcctgcctcagcctcctgagtagctgggattacaggcacacaccaccacgcccagctaatttttgtatttttagtagaggcggggtttcaccatgctggtcaggatgttctccaactcctgacttcatgatccacccacctcggcctcccaaagtgctgagattacagacgtgagccactgcgtcctgcctaaaatgaattttctagatgattgaataacagtagtcctttgatagaagataatgacttggtttatggccttaatatactacttaattacttaagatgtttattaatagaatgataaatgtacagagtaacctataagcatgacatacttttgctttcagtagtttcatgtaaagaaaaaaacttgaaaatagtaatacctgagtacccatgggaataatagacactggggaggtagggtggggagcgggagcaagagctgaaaaacttacctactggggactgtgctcactacctgggtgacaggatcatacgtaccccaaacctcaacatcacacagtatactcagctaacaaacctgcccatgtgtttcctgaatctaaaataaaaatcgaaataatttttttaaaaaagaaaaagacaatagtattacccatgggacaaaatttgtactattagcaagaatcattttgtgtctcatttagaaacaatttgacttttgttccagtgtttaaactttgacaaaaatggttttgaatagatctttataacctgatgccataaatacaagattctctgataccttcatttaatatatcaatattgggcctaaaacagtattctgtaaagcttaaattggtattaactatgatcatcttgatgtctatgatagataataaacaaggtcatacataccttactaaacaattttggtttttcaccaacattttattctttaaaagatttagactaacagaattatttagcatttcgagtcatgtgctttatttagcaagtgagtaaaaatattggaatattgaagtatttgcataaaaaatcaaatggtggtgttttgtaatctctattgtatttcctattaaggtttcatatattactttcccattgttcctgaatttgttatcctatatataaacagaaacatggatg

SEQ ID NO: 27967 - DNA, 2791 bp, Homo sapiens
tgagaaggctaccaaggagagaaacattgtccccaggggaaagctagattttagacaaggcaaagagcggagaggaatgggtgaagagattgagaatgacattctagaaaggacaatagaaagtcttaggaaggagggacagaggggaagagagaaaggatggctggtcacctagagtatctatagggataaaagtatagctaaaataacctacattttaggtggagataatacagctgcctaagcttaggtgaactgctttttgaatcttagtttgctccttcataaaattggattaatataataccaatttggcagagttttcaaaaaaaatgatgccacatcctgtgtttccaaacagccttacctttcaaaactctttttggaagctgtaaagataatcaagtgatacctgccattatgtaaaggaattttggaatccgtctttggggaaataaaagccataagagagaatgaaagctaatactttgtagtttaaggatttttttccttgatgtatctaattggaaggccgaaagagtcttgtcttttcttttttttgcctgcttcttctgagacatcaaaaaacatcttgatttctgcggagtagatgagatggagaaagatgagacaggcaacagaaatcttaagaggccacaggttaagatggggtactaagcagggagagcaccaaaggaagtaggccaaagtattaatagaagatcctagaacagattaaggcaaatcatttacctgttttccattgccttactatctttctggagccaattacaaactttcctgttttattttaggtctcacaagaatcttttcttatctaagttgcaacatggaacccagcaacaagaccttaataagaaagaaagaagagtaggaactcctcaaagtacaaaaaagaaaaaagaaagcagaagagccactgaaagcagaatacctgtttcaaagagtcagccggtaactcctgaaaaacatcgagctagaaaaagacaggcatggctttgggaagaagacaagaatttgagatctggcgtgaggaaatatggagagggaaactggtctaaaatactgttgcattataaattcaacaaccggacaagtgtcatgttaaaagacagatggaggaccatgaagaaactaaaactgatttcctcagacagcgaagactgattgtgtttgtaaaagcttgatgaaaggacagttaagtattttgatcactgcattttgtttgaaacttgtgtcattgatgtaatttaaaacttttgtttaaagcattacagtatttttctgtgaccatcaattaatgagggtttgtgctaccagagttaaagcatatgctatcattgtattctttaagaaccttattttgataaaatgtaaatttgttgaaccctgccacatttagtatccccacccccaaatcctgttccaatgaaaaaattaaaacctgatacgaaaaaaaaaaaattccagttaacctattttgtgtctgtaggctgacctcaaccctgtaacgtaacccattaaaatgaatttctttttttttaagacagagtttctctctgttgcccaggctggagtgcagtggcgcaatttcagctcactgcaacctctgcctcccaggttcaagtgattctcctgcctcagcctcctgagtagctgggattacaggcacacaccaccacgcccagctaatttttgtatttttagtagaggcggggtttcaccatgctggtcaggatgttctccaactcctgacttcatgatccacccacctcggcctcccaaagtgctgagattacagacgtgagccactgcgtcctgcctaaaatgaattttctagatgattgaataacagtagtcctttgatagaagataatgacttggtttatggccttaatatactacttaattacttaagatgtttattaatagaatgataaatgtacagagtaacctataagcatgacatacttttgctttcagtagtttcatgtaaagaaaaaaacttgaaaatagtaatacctgagtacccatgggaataatagacactggggaggtagggtggggagcgggagcaagagctgaaaaacttacctactggggactgtgctcactacctgggtgacaggatcatacgtaccccaaacctcaacatcacacagtatactcagctaacaaacctgcccatgtgtttcctgaatctaaaataaaaatcgaaataatttttttaaaaaagaaaaagacaatagtattacccatgggacaaaatttgtactattagcaagaatcattttgtgtctcatttagaaacaatttgacttttgttccagtgtttaaactttgacaaaaatggttttgaatagatctttataacctgatgccataaatacaagattctctgataccttcatttaatatatcaatattgggcctaaaacagtattctgtaaagcttaaattggtattaactatgatcatcttgatgtctatgatagataataaacaaggtcatacataccttactaaacaattttggtttttcaccaacattttattctttaaaagatttagactaacagaattatttagcatttcgagtcatgtgctttatttagcaagtgagtaaaaatattggaatattgaagtatttgcataaaaaatcaaatggtggtgttttgtaatctctattgtatttcctattaaggtttcatatattactttcccattgttcctgaatttgttatcctatatataaacagaaacatggatg

SEQ ID NO: 27968 - DNA, 1851 bp, Homo sapiens
  misc_feature (29)..(29): n is a, c, g, or t
  misc_feature (85)..(85): n is a, c, g, or t
aaaaaaaaaaaaaaggggaaaaccccaanggggggccccaaattgggggcccccttttttggggggggaaaaaaaggaaaaaggncccaaaaggaaatttgagatctggcgtgaggaaatatggagagggaaactggtctaaaatactgttgcattataaattcaacaaccggacaagtgtcatgttaaaagacagatggaggaccatgaagaaactaaaactgatttcctcagacagcgaagactgattgtgtttgtaaaagcttgatgaaaggacagttaagtattttgatcactgcattttgtttgaaacttgtgtcattgatgtaatttaaaacttttgtttaaagcattacagtatttttctgtgaccatcaattaatgagggtttgtgctaccagagttaaagcatatgctatcattgtattctttaagaaccttattttgataaaatgtaaatttgttgaaccctgccacatttagtatccccacccccaaatcctgttccaatgaaaaaattaaaacctgatacgaaaaaaaaaaaattccagttaacctattttgtgtctgtaggctgacctcaaccctgtaacgtaacccattaaaatgaatttctttttttttaagacagagtttctctctgttgcccaggctggagtgcagtggcgcaatttcagctcactgcaacctctgcctcccaggttcaagtgattctcctgcctcagcctcctgagtagctgggattacaggcacacaccaccacgcccagctaatttttgtatttttagtagaggcggggtttcaccatgctggtcaggatgttctccaactcctgacttcatgatccacccacctcggcctcccaaagtgctgagattacagacgtgagccactgcgtcctgcctaaaatgaattttctagatgattgaataacagtagtcctttgatagaagataatgacttggtttatggccttaatatactacttaattacttaagatgtttattaatagaatgataaatgtacagagtaacctataagcatgacatacttttgctttcagtagtttcatgtaaagaaaaaaacttgaaaatagtaatacctgagtacccatgggaataatagacactggggaggtagggtggggagcgggagcaagagctgaaaaacttacctactggggactgtgctcactacctgggtgacaggatcatacgtaccccaaacctcaacatcacacagtatactcagctaacaaacctgcccatgtgtttcctgaatctaaaataaaaatcgaaataatttttttaaaaaagaaaaagacaatagtattacccatgggacaaaatttgtactattagcaagaatcattttgtgtctcatttagaaacaatttgacttttgttccagtgtttaaactttgacaaaaatggttttgaatagatctttataacctgatgccataaatacaagattctctgataccttcatttaatatatcaatattgggcctaaaacagtattctgtaaagcttaaattggtattaactatgatcatcttgatgtctatgatagataataaacaaggtcatacataccttactaaacaattttggtttttcaccaacattttattctttaaaagatttagactaacagaattatttagcatttcgagtcatgtgctttatttagcaagtgagtaaaaatattggaatattgaagtatttgcataaaaaatcaaatggtggtgttttgtaatctctattgtatttcctattaaggtttcatatattactttcccattgttcctgaatttgttatcctatatataaacagaaacatggatg

SEQ ID NO: 27969 - DNA, 809 bp, Homo sapiens
gcggcgcctactactactaaattcgcggccggtcgacaaaaaaacttgaaaatagtaatacctgagtacccatgggaataatagacactggggaggtagggtggggagcgggagcaagagctgaaaaacttacctactggggactgtgctcactacctgggtgacaggatcatacgtaccccaaacctcaacatcacacagtatactcagctaacaaacctgcccatgtgtttcctgaatctaaaataaaaatcgaaataatttttttaaaaaagaaaaagacaatagtattacccatgggacaaaatttgtactattagcaagaatcattttgtgtctcatttagaaacaatttgacttttgttccagtgtttaaactttgacaaaaatggttttgaatagatctttataacctgatgccataaatacaagattctctgataccttcatttaatatatcaatattgggcctaaaacagtattctgtaaagcttaaattggtattaactatgatcatcttgatgtctatgatagataataaacaaggtcatacataccttactaaacaattttggtttttcaccaacattttattctttaaaagatttagactaacagaattatttagcatttcgagtcatgtgctttatttagcaagtgagtaaaaatattggaatattgaagtatttgcataaaaaatcaaatggtggtgttttgtaatctctattgtatttcctattaaggtttcatatattactttcccattgttcctgaatttgttatcctatatataaacagaaacatggatg

SEQ ID NO: 27970 - DNA, 3327 bp, Homo sapiens
cgcggccacgccccgagccctcgaatgcgagccaatcgttgctcggcgcctgaaggggcagtacccaagcgagccatttaacatggcggaggatgtttcctcagcggccccgagcccgcggggctgtgcggatggtagggatgccgaccctactgaggagcagatggcagaaacagagagaaacgacgaggagcagttcgaatgccaggaactgctcgagtgccaggtgcaggtgggggcccccgaggaggaggaggaggaggaggaggacgcgggcctggtggccgaggccgaggccgtggctgccggctggatgctcgatttcctctgcctctctctttgccgagctttccgcgacggccgctccgaggacttccgcaggacccgcaacagcgcagaggctattattcatggactatccagtctaacagcttgccagttgagaacgatatacatatgtcagtttttgacaagaattgcagcaggaaaaacccttgatgcacagtttgaaaatgatgaacgaattacacccttggaatcagccctgatgatttggggttcaattgaaaaggaacatgacaaacttcatgaagaaatacagaatttaattaaaattcaggctatagctgtttgtatggaaaatggcaactttaaagaagcagaagaagtctttgaaagaatatttggtgatccaaattctcatatgcctttcaaaagcaaattgcttatgataatctctcagaaagatacatttcattccttttttcaacacttcagctacaaccacatgatggagaaaattaagagttatgtgaattatgtgctaagtgaaaaatcatcaacctttctaatgaaggcagcggcaaaagtagtagaaagcaaaaggacaagaacaataacttctcaagataaacctagtggtaatgatgttgaaatggaaactgaagctaatttggatacaagaaaaaggtctcacaagaatcttttcttatctaagttgcaacatggaacccagcaacaagaccttaataagaaagaaagaagagtaggaactcctcaaagtacaaaaaagaaaaaagaaagcagaagagccactgaaagcagaatacctgtttcaaagagtcagccggtaactcctgaaaaacatcgagctagaaaaagacaggcatggctttgggaagaagacaagaatttgagatctggcgtgaggaaatatggagagggaaactggtctaaaatactgttgcattataaattcaacaaccggacaagtgtcatgttaaaagacagatggaggaccatgaagaaactaaaactgatttcctcagacagcgaagactgattgtgtttgtaaaagcttgatgaaaggacagttaagtattttgatcactgcattttgtttgaaacttgtgtcattgatgtaatttaaaacttttgtttaaagcattacagtatttttctgtgaccatcaattaatgagggtttgtgctaccagagttaaagcatatgctatcattgtattctttaagaaccttattttgataaaatgtaaatttgttgaaccctgccacatttagtatccccacccccaaatcctgttccaatgaaaaaattaaaacctgatacgaaaaaaaaaaaattccagttaacctattttgtgtctgtaggctgacctcaaccctgtaacgtaacccattaaaatgaatttctttttttttaagacagagtttctctctgttgcccaggctggagtgcagtggcgcaatttcagctcactgcaacctctgcctcccaggttcaagtgattctcctgcctcagcctcctgagtagctgggattacaggcacacaccaccacgcccagctaatttttgtatttttagtagaggcggggtttcaccatgctggtcaggatgttctccaactcctgacttcatgatccacccacctcggcctcccaaagtgctgagattacagacgtgagccactgcgtcctgcctaaaatgaattttctagatgattgaataacagtagtcctttgatagaagataatgacttggtttatggccttaatatactacttaattacttaagatgtttattaatagaatgataaatgtacagagtaacctataagcatgacatacttttgctttcagtagtttcatgtaaagaaaaaaacttgaaaatagtaatacctgagtacccatgggaataatagacactggggaggtagggtggggagcgggagcaagagctgaaaaacttacctactggggactgtgctcactacctgggtgacaggatcatacgtaccccaaacctcaacatcacacagtatactcagctaacaaacctgcccatgtgtttcctgaatctaaaataaaaatcgaaataatttttttaaaaaagaaaaagacaatagtattacccatgggacaaaatttgtactattagcaagaatcattttgtgtctcatttagaaacaatttgacttttgttccagtgtttaaactttgacaaaaatggttttgaatagatctttataacctgatgccataaatacaagattctctgataccttcatttaatatatcaatattgggcctaaaacagtattctgtaaagcttaaattggtattaactatgatcatcttgatgtctatgatagataataaacaaggtcatacataccttactaaacaattttggtttttcaccaacattttattctttaaaagatttagactaacagaattatttagcatttcgagtcatgtgctttatttagcaagtgagtaaaaatattggaatattgaagtatttgcataaaaaatcaaatggtggtgttttgtaatctctattgtatttcctattaaggtttcatatattactttcccattgttcctgaatttgttatcctatatataaacagaaacatggatgagtaccatatacttcctgactcctttatcttgttacaccacaagatactgcactatttattggagatattttgatgattagtgccaaggctggcatcatgagccaaaatagacttgttaagtcaacctcattccaaacacctgctatagatcatcaaatctaagttgccattaattgtaagatgtcctgttatttcacacacacaactagaaaagaaaaatcggtatcaattatagtatggtgctttcttattttgaattttacttattagaagagctattttagatgtatttaaacataagatttttatcacataacttgtggatacaaaaaaagagaaattgtaagcaaaataagttgggtaatatattcctaaaacctc

SEQ ID NO: 27971 - DNA, 2422 bp, Homo sapiens
atggaacccagcaacaagaccttaataaaaattcaggctatagctgtttgtatggaaaatggcaactttaaagaagcagaagaagtctttgaaagaatatttggtgatccaaattctcatatgcctttcaaaagcaaattgcttatgataatctctcagaaagatacatttcattccttttttcaacacttcagctacaaccacatgatggagaaaattaagagttatgtgaattatgtgctaagtgaaaaatcatcaacctttctaatgaaggcagcggcaaaagtagtagaaagcaaaaggacaagaacaataacttctcaagataaacctagtggtaatgatgttgaaatggaaactgaagctaatttggatacaagaaaaagtgttagtgacaaacagtctgcggtaactgaatcctcagagggtacagtatccttattgaggtctcacaagaatcttttcttatctaagttgcaacatggaacccagcaacaagaccttaataagaaagaaagaagagtaggaactcctcaaagtacaaaaaagaaaaaagaaagcagaagagccactgaaagcagaatacctgtttcaaagagtcagccggtaactcctgaaaaacatcgagctagaaaaagacaggcatggctttgggaagaagacaagaatttgagatctggcgtgaggaaatatggagagggaaactggtctaaaatactgttgcattataaattcaacaaccggacaagtgtcatgttaaaagacagatggaggaccatgaagaaactaaaactgatttcctcagacagcgaagactgattgtgtttgtaaaagcttgatgaaaggacagttaagtattttgatcactgcattttgtttgaaacttgtgtcattgatgtaatttaaaacttttgtttaaagcattacagtatttttctgtgaccatcaattaatgagggtttgtgctaccagagttaaagcatatgctatcattgtattctttaagaaccttattttgataaaatgtaaatttgttgaaccctgccacatttagtatccccacccccaaatcctgttccaatgaaaaaattaaaacctgatacgaaaaaaaaaaaattccagttaacctattttgtgtctgtaggctgacctcaaccctgtaacgtaacccattaaaatgaatttctttttttttaagacagagtttctctctgttgcccaggctggagtgcagtggcgcaatttcagctcactgcaacctctgcctcccaggttcaagtgattctcctgcctcagcctcctgagtagctgggattacaggcacacaccaccacgcccagctaatttttgtatttttagtagaggcggggtttcaccatgctggtcaggatgttctccaactcctgacttcatgatccacccacctcggcctcccaaagtgctgagattacagacgtgagccactgcgtcctgcctaaaatgaattttctagatgattgaataacagtagtcctttgatagaagataatgacttggtttatggccttaatatactacttaattacttaagatgtttattaatagaatgataaatgtacagagtaacctataagcatgacatacttttgctttcagtagtttcatgtaaagaaaaaaacttgaaaatagtaatacctgagtacccatgggaataatagacactggggaggtagggtggggagcgggagcaagagctgaaaaacttacctactggggactgtgctcactacctgggtgacaggatcatacgtaccccaaacctcaacatcacacagtatactcagctaacaaacctgcccatgtgtttcctgaatctaaaataaaaatcgaaataatttttttaaaaaagaaaaagacaatagtattacccatgggacaaaatttgtactattagcaagaatcattttgtgtctcatttagaaacaatttgacttttgttccagtgtttaaactttgacaaaaatggttttgaatagatctttataacctgatgccataaatacaagattctctgataccttcatttaatatatcaatattgggcctaaaacagtattctgtaaagcttaaattggtattaactatgatcatcttgatgtctatgatagataataaacaaggtcatacataccttactaaacaattttggtttttcaccaacattttattctttaaaagatttagactaacagaattatttagcatttcgagtcatgtgctttatttagcaagtgagtaaaaatattggaatattgaagtatttgcataaaaaatcaaatggtggtgttttgtaatctctattgtatttcctattaaggtttcatatattactttcccattgttcctgaatttgttatcctatatataaacagaaacatggatg

SEQ ID NO: 27972 - DNA, 1155 bp, Homo sapiens
cgcggccacgccccgagccctcgaatgcgagccaatcgttgctcggcgcctgaaggggcagtacccaagcgagccatttaacatggcggaggatgtttcctcagcggccccgagcccgcggggctgtgcggatggtagggatgccgaccctactgaggagcagatggcagaaacagagagaaacgacgaggagcagttcgaatgccaggaactgctcgagtgccaggtgcaggtgggggcccccgaggaggaggaggaggaggaggaggacgcgggcctggtggccgaggccgaggccgtggctgccggctggatgctcgatttcctctgcctctctctttgccgagctttccgcgacggccgctccgaggacttccgcaggacccgcaacagcgcagaggctattattcatggactatccagtctaacagcttgccagttgagaacgatatacatatgtcagtttttgacaagaattgcagcaggaaaaacccttgatgcacagtttgaaaatgatgaacgaattacacccttggaatcagccctgatgatttggggttcaattgaaaaggaacatgacaaacttcatgaagaaatacagaatttaattaaaattcaggctatagctgtttgtatggaaaatggcaactttaaagaagcagaagaagtctttgaaagaatatttggtgatccaaattctcatatgcctttcaaaagcaaattgcttatgataatctctcagaaagatacatttcattccttttttcaacacttcagctacaaccacatgatggagaaaattaagagttatgtgaattatgtgctaagtgaaaaatcatcaacctttctaatgaaggcagcggcaaaagtagtagaaagcaaaaggacaagaacaataacttctcaagataaacctagtggtaatgatgttgaaatggaaactgaagctaatttggatacaagaaaaaggtctcacaagaatcttttcttatctaagttgcaacatggaacccagcaacaagaccttaataagaaagaaagaagagtaggaactcctcaaattacatatatttgtcttaccaaactgactatgaataagaaagaaggagtgaggaaaggattatgcttcttagtactcctaaaacattatcgtaa

SEQ ID NO: 27973 - DNA, 538 bp, Homo sapiens
atttccttgaggcaactttctagataattttcttcatacacctttggatggcctgaattcgatgttgttcaatatgaaatcatacattgaggggtcataaagccaattacataaacgtagaaggggaatgacctgccttgtcaccacagtgacaatctcaagtgacccgcagtgtgatgggaccactaatgaaactgacaccacttaaatgatattaggaagagggagatgtcaggtgtcctactttttattggtgagatcacgcttgtctccaggcatgactgtcataatgtgggagagggttggtaaacagaggaatatttaggacgagggcacaccagcatactgatgagtctcaagctatctgaggaatttttggagcagtccctgtcaatactgggtgagtgaaacctctttagaggtgggctgcgactgtgaactccctttgtgtcagctacaacgttcttgctttcgtgtatcaatttgtttgttttttaagtacaaattttgttgcattgttgcattaaaaatggatgta

SEQ ID NO: 27974 - DNA, 383 bp, Homo sapiens
acccttcctccatcattttgccaccatgcacagaagcacggaccccaccgctgcctcagtgccagtgcatactgcacacaggacctactgcctccctaccagcagtgcactaaaacacttttgacagaatgttgttgccagagaactgggaataccttggccccttcaagacaacaggtgcttaacattcatggccagagaaaaaagcttttctctagcctcaatgggacagagaaaaaatgtgggccttgtctcagcctcccagagatagaatatgcagtccgagcaggctgagctgaattttggccctctgaaataattacccagaaatgaagcaaattacaaaacccaacttgtactacagttaaacactaaagggcacc

SEQ ID NO: 27975 - DNA, 1175 bp, Homo sapiens
agtttttcattttacacttaggtctgtggtccattttaagaacatttttatgaagggtgtaaggtctgtgtctagctcccattcaaggcttattatatctcacctggagtgtcagcctgcctgcatttcttgtcccctccaattccaacttgaattgactaaattcctggtgagtgtagccaagagtcatgcctccaggcttcaggccagcacttgtggatggaacctccaggccagtacacccaggacccagctccaggataaccttggcagtctcaggcaccaggccagcacccacagccctaggacccagccatgaccttaagtacccagcttctaggcctgccccactgccaggccaggccccatagccccagactccaggcagatacccatggacctagtttccaggccctcctctgcaccagaccaacaccactataccctagctccaggctagcctttactaacctaggaaccagtccaccacagtgccaggctagccaccacatctccagactccaagccagcatctgcagacccaggctccaggcctgctctagcaccaggctggcccctgaagccccaggcttcaggctcactgtagtgctagggtggcaccaacaggcaccagcaccaagcctgctcctgcagcctcagggtccaggctggcccctggagactcaagcttcaggcccaacccagactccagattggcccagtaccagactgagattggcccagtaccacatgggcccaggcttcaggcgccccccgccccataccattgcctggtctgcctcttcagccccagactccaggccaacacttgtggacctagcctccagtctcactccagcaccaggttggcatgcatagacccaagcttgaggcccacccctgacagtcccagcagaatcaggatcccaggcctgccccaggaatctcagtaaccataacggtatgaatctagaaatcaataacaagaaaaattggagaattcacaaatatgtagaaattaaacaacatgctcctgaacaaagagtcaagaagaaatgaaaaggaattgaaaaatatcttgggacaacagaaagcggaaacaacatgccaaatgtatgggatgcagcaaaagcagttctaagaggggactttatagcaataaatgcctacatcaa

SEQ ID NO: 27976 - DNA, 478 bp, Homo sapiens
aaatagtattgaaaaattgaaaaataggcatattaaaacttgtaacactatttaagcttagatatattatttgtacctcatcaacattttttattttgttgagaaagtgtaaggttaattggcagcatatttctaatagtagatagaataatgtctgttttataaacattgacatcctacattacatgtgtgaaccctgaaaatctgagacagctctcagattttttagaaagtttattttgccaatcttgaggatgtgcgcccgtgacgcctccccaggaggtcctgacaacatgggcccaaggtggtcggggcacagcttggttttatacactttagggagacatgagacatcaatcaatacgtgtaagatgtacattggttcagtccagaaaggtgagaaggccagacagggggcttccaggtcataggtaggtaagagacaaatggtttcattcttttgcattgctgattaccc

SEQ ID NO: 27977 - DNA, 442 bp, Homo sapiens
tctgctggcactgtcactgttgccaccactgccgctgtggaatttcctggggaccagggcaccagagagacagggagaaaggaaaaaacccagggatctggcccactgtctcagaacccaggtgacccctttcctgttactagatgcttctcctggacccccgggcacactcttgctcgcctctggatatcgagttgtatttagtccaggctggggataccagggtcagggacatggcaaactcaccgcaaccttggtggcacttcaaattgtggtcttcaacccccttctacctgctactggtcaattctcagaggcctcagtagctcctttgtgtgcctgtctagccttttagccacattcagtgggcagggaagggtggcgggggtggtgcttaccctgtggagtaaccataaggaaaccagaaccataggaattcgaa

SEQ ID NO: 27978 - DNA, 295 bp, Homo sapiens
gaagaaataatgttgaaaaaaatatattgtatgaatacttgataatttagtttctaatcattggcaattacgttattttaaagtaactataactattccttataaaataaatcttagtaacatttctaaccacaattgtttattggaaaacacttgaaattgaggccgattttctctgtgatttggtgattcttaattgttgtgggatcaggaagctttgaaaagttcgtaatggccaggcatagtggctaatgcaagtaatcccagtacttagggaggctaaagtgggtgggtc

SEQ ID NO: 27979 - DNA, 440 bp, Homo sapiens
gtattttttagacctcatctttctcatttgtaaaatgaggagttggataggcagtcttttaagaaagtatttttcaaataatatgcctcagttcattttcatcagaatcagctgttaactaacaatggaaatgtctgggtttcacatgtattatcatctctggagtgaggcctggcagtttggacatgttttagacctggaggtggattcttaggaacttaaaagtttaaagtcattgcattaagttactttttatgctgtaactttctccagctctaactctacagttggtgttctaaagtaccaatacaggtaagttcttggtacctatataagaatgaggtaaatattatagataaacctcaaatttctggcacccctgaggcttaactctgaagtccatcattgacgcagtaatggctctattttctataaactgc

SEQ ID NO: 27980 - DNA, 330 bp, Homo sapiens
ttcagatagagcactaaacagctcttccttttcattaaagtataccagctaaataatatatcatcttggcttatgtttcaatcatgcagtttttcttctcctggacttgaaagaagcttcttccttaagaaccccttctcaaatataaattattattattttttagcctggaaaagttgggtggggaggtacattgtgagtcacctatgtcaatctgaacattgctgaaaacgaaatatactttaatagttccaatggtattcattcagccttattctgacctttccttgtttttactctaattaaacataaatcttgaaaaacaaagag

SEQ ID NO: 27981 - DNA, 288 bp, Homo sapiens
gcacttgtcaagaccaatacatcaaagtttaattcactaatagaatgaattagagcaaaatgaaacattctgttctctaggaaacccaacacccatcataagttctttctgaactccacagaaaagtcagtgcattaagaaattgtttttttgaataaaattacagttccaatctgatgaaatattacaagccagttttcttagaattcttacacaagtatagtgcttaagtgtctaccggaccatcagcactctatactaatcatcattggtaaatatgattatatt

SEQ ID NO: 27982 - DNA, 492 bp, Homo sapiens
ctgacttctggtgtaaggctctgttaaacagttaatgccaccaccactgccaccaataataatatattttgatcaccaactttatgtaacactgataattgttttacatagatatgtcatttaatcctctcaacaaccagtgagatagatcttgttaccatctctctaagaatagacttcaggtaagtctaaatactgggcctgccagtaggattccctaggaaattgaccttaacatttgctttctcagtaagccattagagatttagtggaactgttactagcatcatgacaacaaatctagaatgtctggaatgattggaagggtcagaagattataaaaaatctctgtgagtatgaccaggcatggtggctcacgcctataatctcagctctttgggaggccaaggcgagcagattgcttgagcccaggagttcgagaccagcctgggcaacatagtgagatcttgtcactatttcttaaattaaaaa

SEQ ID NO: 27983 - DNA, 471 bp, Homo sapiens
cccctttgtgtgttttacatatatatatctctaagtccagagccaggagagttggaccattgagggcagctctgccaacatttagtaaaagtattcattgttccaaaactgtcatctctacccttgagggagtgtgtctttgtgagaaatataaaggcttgagtcatgaaatacttaacacatgtgcacatgtacacatgtacatttatatgcagtgaattgttactcgtggtagttaggttctgtgaattttctgtgcacactgaattagtgaatgctgaatgattgttgctaggggaaatacagcgttagcttctgtgagcctctgatccaaacatttttatcaaccagtcaacacataaccttcttctatgggtatttgtttgtttgtttgtttaaagacactttatcagtgtttcttgaataattataattattctttataataaaaatattttaattatagcatgt

SEQ ID NO: 27984 - DNA, 716 bp, Homo sapiens
tcagcttttatttgcttttctttctctttcccctctccttgctccctttctctttccactttcccacttttttttttttttttttttcttaaaattagacccaaaaacctgtccttgagacagccaagttggcctttaagggcagcgtttacatgacttccagtcttttcttaattgactatctctgaaaaatgtagtaggccactttaattttcatacttttagtctttcttcccacatattgcagcatcacaccttctattcctcaatgcctcttgtcctccttgcccaacatgttcagaatctatgctaaagaaagggctgttcctatgtgagtgcatgctatgtgcataagagaatggtactttctcattgcagagaaaaatagataaataaataaaacctttttcctctcttgtgggctgaaatatgttctcccaaaatttacatattgaagccctgatccctagtacctcagaatgttactgcatttgtaggtagtacattacagaaggtaataaagttaaaattaggccatagtgtgagtcttaatggtatctcactagtgtccttacaagagaagattagggtttacagagaaacactaagatttcacaggcacacactaagaaaaaaagaccatattaagggacagtgagaagatggtcatttccaagtgaaggagagaggcctgaaaagaaaccaaaccagctgat

SEQ ID NO: 27985 - DNA, 422 bp, Homo sapiens
aaaaagtaataagtaataaagggtttatataaaattcaaagataaaatcttttgatgtaatacagaaaaatatttctaatcccttgtgtttagtaattttggaagttatgtattgtgttccttctgctcattttgcatcctcacacagccctgtaattagtctgttttcacactgctataaagatactacctgagactgggtaatttataaacaagagaggtttaattgactctcagttccacatggctgggaaggtgtcaggaaacttacaatcatggtggaaggggaagcaggcatgtcttaaatggcagcaggtgagacagagcatgtgtgagtgcaagaaaaactatcatttataaaaccatcagatctcatgagaattcactcactatcacgagaacagaatgagggaaaccaccca

SEQ ID NO: 27986 - DNA, 621 bp, Homo sapiens
aaataagaacagcttttcgaggtaggagtcgactcctgtgaggtatggtgctgggtgcagatgcagtgtggctctggatagcaccttatggacagttgtgtccccaaggaaggatgagaatagctactgaagtcctaaagagcaagcctaactcaagccattggcacacaggcattagacagaaagctggaagttgaaatggtggagtccaacttgcctggaccagcttaatggttctgctcctggtaacgtttttatccatggatgacttgcttgggtatggagagtcggcttgactacactgtgtggagcaagttttaaagaagcaaaggactcagaattcatgattgaagaaatgcaggcagacctgttatcctaaactagggtttttaatgaccacaacaagcaagcatgcagcttactgcttgaaagggtcttgcctcacccaagctagagtgcagtggcctttgaagcttactacagcctcaaacttctgggctcaagtgatcctcagcctcccagtggtctttgtagactgcctgatggagtctcatggcacaagaagattacaacagtgtctccaattttaataaatttttgcaatccaaaaaaagaaaaaaa

SEQ ID NO: 27987 - DNA, 733 bp, Homo sapiens
agcttgctctttctcccatagcacacatctagccttcgggagaagataccttcagaacatatccagaatccagacactattttctaactcttccctctatcacctggttcagacctcctccatctctggcctgctttactagaatagctactgaagtcctaaagagcaagcctaactcaagccattggcacacaggcattagacagaaagctggaagttgaaatggtggagtccaacttgcctggaccagcttaatggttctgctcctggtaacgtttttatccatggatgacttgcttgggtatggagagtcggcttgactacactgtgtggagcaagttttaaagaagcaaaggactcagaattcatgattgaagaaatgcaggcagacctgttatcctaaactagggtttttaatgaccacaacaagcaagcatgcagcttactgcttgatgaggattggaaatgttgggactattataattgcagaatacatgatgatctcaatccaacttgaactctctcactgatacttgaggaccagtaaagatctgatattctgcgttcccgagtagcattgtaacagaaggctgggacacgtgggtcaaagcggcgggccaaacacggaggacggcggctggcgccaccccaccaagagcagggcgccgggagacaagggggcgcccagcgggcacacagcacaccacaggagggcgccccacgcacgcgaccc

SEQ ID NO: 27988 - DNA, 709 bp, Homo sapiens
aaataagaacagcttttcgaggtaggagtcgactcctgtgaggtatggtgctgggtgcagatgcagtgtggctctggatagcaccttatggacagttgtgtccccaaggaaggatgagaatagctactgaagtcctaaagagcaagcctaactcaagccattggcacacaggcattagacagaaagctggaagttgaaatggtggagtccaacttgcctggaccagcttaatggttctgctcctggtaacgtttttatccatggatgacttgcttgggtatggagagtcggcttgactacactgtgtggagcaagttttaaagaagcaaaggactcagaattcatgattgaagaaatgcaggcagacctgttatcctaaactagggtttttaatgaccacaacaagcaagcatgcagcttactgcttgatgaggattggaaatgttgggactattataattgcagaatacatgatgatctcaatccaacttgaactctctcactgatacttgaggaccagtaaagatctgatattctgcgttcccgagtagcattgtaacagaaggctgggacacgtgggtcaaagcggcgggccaaacacggaggacggcggctggcgccaccccaccaagagcagggcgccgggagacaagggggcgcccagcgggcacacagcacaccacaggagggcgccccacgcacgcgaccc

SEQ ID NO: 27989 - DNA, 493 bp, Homo sapiens
aaataagaacagcttttcgaggtaggagtcgactcctgtgaggtatggtgctgggtgcagatgcagtgtggctctggatagcaccttatggacagttgtgtccccaaggaaggatgagaatagctactgaagtcctaaagagcaagcctaactcaagccattggcacacaggcattagacagaaagctggaagttgaaatggtggagtccaacttgcctggaccagcttaatggttctgctcctggtaacgtttttatccatggatgacttgcttgggtatggagagtcggcttgactacactgtgtggagcaagttttaaagaagcaaaggactcagaattcatgattgaagaaatgcaggcagacctgttatcctaaactagggtttttaatgaccacaacaagcaagcatgcagcttactgcttgaccatccatggctcctggatctctgaacgttccaatcacatcctggtgtttgtgaccatcactca

SEQ ID NO: 27990 - DNA, 532 bp, Homo sapiens
aaataagaacagcttttcgaggtaggagtcgactcctgtgaggtatggtgctgggtgcagatgcagtgtggctctggatagcaccttatggacagttgtgtccccaaggaaggatgagaatagctactgaagtcctaaagagcaagcctaactcaagccattggcacacaggcattagacagaaagctggaagttgaaatggtggagtccaacttgcctggaccagcttaatggttctgctcctggtaacgtttttatccatggatgacttgcttgggtaaggacatgaagacagttcctgtcataccttttaaaggtatggagagtcggcttgactacactgtgtggagcaagttttaaagaagcaaaggactcagaattcatgattgaagaaatgcaggcagacctgttatcctaaactagggtttttaatgaccacaacaagcaagcatgcagcttactgcttgaccatccatggctcctggatctctgaacgttccaatcacatcctggtgtttgtgaccatcactca

SEQ ID NO: 27991 - DNA, 472 bp, Homo sapiens
ttgacatgattcgactcgagttcggtacctgaacattcgtgtccccaaggaaggtgagaatagctactgaagtcctaaagagcaagcctaactcaagccattggcacacaggcattagacagaaagctggaagttgaaatggtggagtccaacttgcctggaccagcttaatggttctgctcctggtaacgtttttatccatggatgacttgcttgggtaaggacatgaagacagttcctgtcataccttttaaaggtatggagagtcggcttgactacactgtgtggagcaagttttaaagaagcaaaggactcagaattcatgattgaagaaatgcaggcagacctgttatcctaaactagggtttttaatgaccacaacaagcaagcatgcagcttactgcttgaccatccatggctcctggatctctgaacgttccaatcacatcctggtgtttgtgaccatcactca

SEQ ID NO: 27992 - DNA, 1887 bp, Homo sapiens
atggcgctgcgcgcccgggcgctgtacgacttcaggtcggagaacccaggagagatctcgctgcgagagcacgaggtgctgagcctgtgcagcgagcaggacatcgagggctggctcgagggggtcaacagccgcggcgaccgcggcctcttcccggcctcctatgtgcaggtgatccgcgcccccgagcctggcccggcgggagacggcggcccgggcgccccggcccgctacgccaatgtgccccccgggggcttcgagcccctgcccgtcgcgccccccgcctccttcaagccgccgcctgacgccttccaggcgctgctgcagccacagcaggcgccgcctccgagcaccttccagccgcccggcgcgggcttcccgtacggcgggggcgccctgcagccgtcgcctcagcagctctacggcggctaccaggccagccaaggcagcgatgatgactgggacgacgagtgggacgacagctccacggtggcggacgagccgggcgctctgggcagcggagcatacccggacctcgacggctcgtcttcggcgggtgtgggcgcagccggccgctaccgcctgtccacgcgctccgacctgtccctgggctcccgcggcggctcggtccccccgcagcaccacccgtcggggcccaagagctcggccaccgtgagccgcaacctcaatcgcttctccaccttcgtcaagtccggcggggaggccttcgtgctgggggaggcgtcaggcttcgtgaaggacggggacaagctgtgcgtggtgctggggccctatggccccgagtggcaggagaacccctacccgttccagtgcaccatcgacgaccccaccaagcagaccaagttcaagggcatgaagagctacatctcctacaagctggtgcccacgcacacgcaggtgccggtgcatcggcgctacaagcacttcgactggctgtacgcgcgcctggcggagaagttcccggtcatctccgtgccccacctgcccgagaagcaggccaccggccgcttcgaggaggacttcatctctaagcgcaggaagggcctgatctggtggatgaaccacatggccagccacccagtgctggcgcagtgcgacgtcttccagcacttcctgacgtgccccagcagcaccgacgagaaagcctggaagcagggcaagaggaaggccgagaaggacgagatggtgggcgccaacttcttcctgacccttagcacgccccccgccgctgcccttgacctgcaggaggtggagagcaagatagacggcttcaagtgcttcaccaagaagatggacgacagcgcgctgcagctcaaccacacggccaacgagttcgcgcgcaagcaggtgaccggcttcaaaaaggagtatcagaaggtgggccagtccttccgcggcctcagccaggcctttgagctggaccagcaggccttctcggtgggcctgaaccaggctatcgccttcaccggagatgcctatgacgccattggcgagctcttcgcggagcagcccaggcaggacctggatcccgtcatggacctattagcgctgtatcaggggcatctggctaacttcccggacatcatccacgttcagaaaggtaaagcctggcccttagagcaggtgatatggagtgtattgtgcaggctgaaaggggcgactttgacagcagtaccactgtgggtttcagactcatattctacaggtgaggaagcgagcagagacgtggacgcctgggtcttttccctagagtgtaagttggattgctcgacaggcagcttcctcctcgagtatcttgcattagggaatgagtactctttctcgaaggttcaaagagtacctttgatgacagtgctatcattttag

SEQ ID NO: 27993 - DNA, 449 bp, Homo sapiens
gataaatatttgcatttgaaaatcattctttgtcttaactacattcttactcttctttttacacaacccaactaaaacaaagaaatctttgccttatccacaaagtgtccttcctccacagaatttaaattgtttcctagtgatataattacttttctttagtaactctgtgaaagtcctgccactttgtttttcataagataattttccaaataaaatacacataactgagcacatgctctgcccacgatatggcccaggtgtcatgaggagtacaaatgaatatgagacaccccccagcttaagaagcttattgaaagagcttacttgatgaaagatgtatagtaatgaattcagtctcatacagtcaacaaatgttcacaaagatgtggaattttggttggatattgaatgttgagtatcagtttgagtaatggggtgaaggcttt

SEQ ID NO: 27994 - DNA, 471 bp, Homo sapiens
gaaacattatatgcagatttaaaatagaagagattaactaagaaccctttgatcttgaatttgaataggaagtacctgcatggacttatgcttttgttgttttaatatttatagttatgtctagtcattctacttctgtcctttgaactcattgtaacagtgaccaacccaataacagctttgagcatctgtaacaaccagatttctactaaaaggaactggggatttgtcctgcctttcaaataagatagtaacactagatgtcaaaatagtagatatggagaagttccactttagagaaatattcataattgaaaaagaaatgatagaattagaatatcactattttgcaaaccctaattagtagattcgagcattgagcattagtgactgcaaacttacgtaaagagggaaccatagattatgtttctcctgatgtagaacacaccaccatctatgaagtagtcttgc

SEQ ID NO: 27995 - DNA, 1070 bp, Homo sapiens
cgggagtgcagtgagctgagatcatgcccctgcactccagcctgggcaacagagcaagatcctacctcaaaagaaataatctcgggcgggtgctgtgggtcatgcctgtaatcctgggcttcccaaagtgctgggattacaggcgtgagccactgcgcccggctggtttgtgcttgttgtatcaaatttgggaaatccttctttgctgccaggcatgttgttttaataaatacagtagtatacctatctataatgtggtatatctcatctgacatttatttccaatatttgcttgattacaaaggcagacttcttagaagttgctttcttattatctttggagttatagggccacagggttttaaaaggaggttggattgtgccttacatgtgggtttcatacattgtccaaactgagacaccaacagatttgtgaatgagatgtgcatcttattaaatgttaatgtgatttgacaatgagacctttctttgtgtggacagtattatatacaattgatagtgtgtcattcagtctaagctgttagcactttcactaaaatatattcaaattttttttgatgtctagtttttacagtgttgggctttatcaagaatagttgtggattgtggaagagctgatatggaaacagaggaatgtattttgcttttttttttaaactctgtccggttccttggacttgtgtgtctcctatcttatcaagaataattgtagattgtggaagagttgatatggaaacatcttagaagaatgttttttgctttttttaaaaaaaaaaacaaaactgtccagttccttggacttgtgtgtctcctatctaccattaaacccttatgacttaaggtatatgtataaatacatatatacatcttggtggcattgatttttctatgttgtgtattaaagctgctaaaaaacattttttctttttttcaatgagaagactagtgattactttgactttaggaattattcttctaaggagtcaagtatttgatctgggcgaggatcacactgaaatataaaacatctgagtaatttgggttcacta

SEQ ID NO: 27996 - DNA, 1027 bp, Homo sapiens
  misc_feature (3)..(3): n is a, c, g, or t
aanaagagatgggatcttgccctggtacccaggctggtcttgaactcctgacctcaggtgatccacccgcctgggcttcccaaagtgctgggattacaggcgtgagccactgcgcccggctggtttgtgcttgttgtatcaaatttgggaaatccttctttgctgccaggcatgttgttttaataaatacagtagtatacctatctataatgtggtatatctcatctgacatttatttccaatatttgcttgattacaaaggcagacttcttagaagttgctttcttattatctttggagttatagggccacagggttttaaaaggaggttggattgtgccttacatgtgggtttcatacattgtccaaactgagacaccaacagatttgtgaatgagatgtgcatcttattaaatgttaatgtgatttgacaatgagacctttctttgtgtggacagtattatatacaattgatagtgtgtcattcagtctaagctgttagcactttcactaaaatatattcaaattttttttgatgtctagtttttacagtgttgggctttatcaagaatagttgtggattgtggaagagctgatatggaaacagaggaatgtattttgcttttttttttaaactctgtccggttccttggacttgtgtgtctcctatcttatcaagaataattgtagattgtggaagagttgatatggaaacatcttagaagaatgttttttgctttttttaaaaaaaaaaacaaaactgtccagttccttggacttgtgtgtctcctatctaccattaaacccttatgacttaaggtatatgtataaatacatatatacatcttggtggcattgatttttctatgttgtgtattaaagctgctaaaaaacattttttctttttttcaatgagaagactagtgattactttgactttaggaattattcttctaaggagtcaagtatttgatctgggcgaggatcacactgaaatataaaacatctgagtaatttgggttcacta

SEQ ID NO: 27997 - DNA, 960 bp, Homo sapiens
ggtaatacagagtgccttaaaacattaaataggcgtgagccactgcgcccggctggtttgtgcttgttgtatcaaatttgggaaatccttctttgctgccaggcatgttgttttaataaatacagtagtatacctatctataatgtggtatatctcatctgacatttatttccaatatttgcttgattacaaaggcagacttcttagaagttgctttcttattatctttggagttatagggccacagggttttaaaaggaggttggattgtgccttacatgtgggtttcatacattgtccaaactgagacaccaacagatttgtgaatgagatgtgcatcttattaaatgttaatgtgatttgacaatgagacctttctttgtgtggacagtattatatacaattgatagtgtgtcattcagtctaagctgttagcactttcactaaaatatattcaaattttttttgatgtctagtttttacagtgttgggctttatcaagaatagttgtggattgtggaagagctgatatggaaacagaggaatgtattttgcttttttttttaaactctgtccggttccttggacttgtgtgtctcctatcttatcaagaataattgtagattgtggaagagttgatatggaaacatcttagaagaatgttttttgctttttttaaaaaaaaaaacaaaactgtccagttccttggacttgtgtgtctcctatctaccattaaacccttatgacttaaggtatatgtataaatacatatatacatcttggtggcattgatttttctatgttgtgtattaaagctgctaaaaaacattttttctttttttcaatgagaagactagtgattactttgactttaggaattattcttctaaggagtcaagtatttgatctgggcgaggatcacactgaaatataaaacatctgagtaatttgggttcacta

SEQ ID NO: 27998 - DNA, 1902 bp, Homo sapiens
ctaggaggaaatgaatacctgattattttgtacttcacaaaataaactggataaactggataaatgactgaaagtttcttttttatattgctgagtcagattggatccggttcattaagggccaaaatttgtatttggcagtaatcctcatgtgttctcagaatgcttgattggtcattatcagttgcttaatgcttaccaaacacttccagtgttttgagtcactgaattggctcatggtaattgttaatcttgtggttactgagtcaagagccagcagtgtgtgttttggctgcttcacttcctcctcaacacttgatattgtcagattttaaattaattttttttttctaatctggtgggtttgaaattgtatctatagtgttttttatcagcatttcctgaagctgggcatcttttcatgtattttcgttggtcatttgtgcttctgcgaagtgtatattcaatttcgttgcctatttttttggtcttttctctttttctgatttatttttaagagttctttatatattctggatactaattatttgttaatttataggttgcaaatatcctttcccaatttgtgacttgtcttttcatctcttcatagtcttctggtgagaaaagctcctaattgtaatgaactgaatttttcagtctttcatggtttgtgttttgtgtttttttttattttttattttttattttttgagatggagtttcgctcttgttgcccatgcgggagtgcaatggcgtgatcttggctcactgcagcctccgcctcctgggttcaagcaattctcctgtctcagcctcccgagtagctgggattacaggtgcctgccaccacgcccagctaatttctgtatttttagtagagacagggtttcatcatattggtcaggctggtcttgaactcctgacctcaggtgatccacccgcctgggcttcccaaagtgctgggattacaggcgtgagccactgcgcccggctggtttgtgcttgttgtatcaaatttgggaaatccttctttgctgccaggcatgttgttttaataaatacagtagtatacctatctataatgtggtatatctcatctgacatttatttccaatatttgcttgattacaaaggcagacttcttagaagttgctttcttattatctttggagttatagggccacagggttttaaaaggaggttggattgtgccttacatgtgggtttcatacattgtccaaactgagacaccaacagatttgtgaatgagatgtgcatcttattaaatgttaatgtgatttgacaatgagacctttctttgtgtggacagtattatatacaattgatagtgtgtcattcagtctaagctgttagcactttcactaaaatatattcaaattttttttgatgtctagtttttacagtgttgggctttatcaagaatagttgtggattgtggaagagctgatatggaaacagaggaatgtattttgcttttttttttaaactctgtccggttccttggacttgtgtgtctcctatcttatcaagaataattgtagattgtggaagagttgatatggaaacatcttagaagaatgttttttgctttttttaaaaaaaaaaacaaaactgtccagttccttggacttgtgtgtctcctatctaccattaaacccttatgacttaaggtatatgtataaatacatatatacatcttggtggcattgatttttctatgttgtgtattaaagctgctaaaaaacattttttctttttttcaatgagaagactagtgattactttgactttaggaattattcttctaaggagtcaagtatttgatctgggcgaggatcacactgaaatataaaacatctgagtaatttgggttcacta

SEQ ID NO: 27999 - DNA, 1068 bp, Homo sapiens
  misc_feature (26)..(26): n is a, c, g, or t
  misc_feature (866)..(866): n is a, c, g, or t
  misc_feature (873)..(873): n is a, c, g, or t
  misc_feature (902)..(903): n is a, c, g, or t
  misc_feature (906)..(907): n is a, c, g, or t
  misc_feature (909)..(909): n is a, c, g, or t
  misc_feature (917)..(917): n is a, c, g, or t
  misc_feature (929)..(929): n is a, c, g, or t
  misc_feature (933)..(934): n is a, c, g, or t
  misc_feature (937)..(937): n is a, c, g, or t
  misc_feature (946)..(946): n is a, c, g, or t
  misc_feature (948)..(948): n is a, c, g, or t
  misc_feature (950)..(950): n is a, c, g, or t
  misc_feature (954)..(955): n is a, c, g, or t
  misc_feature (959)..(959): n is a, c, g, or t
  misc_feature (961)..(961): n is a, c, g, or t
  misc_feature (963)..(963): n is a, c, g, or t
  misc_feature (968)..(968): n is a, c, g, or t
  misc_feature (982)..(982): n is a, c, g, or t
  misc_feature (991)..(993): n is a, c, g, or t
  misc_feature (997)..(997): n is a, c, g, or t
  misc_feature (1004)..(1004): n is a, c, g, or t
ggggcgccgagacagggcgtgttcgntgttcagtgccggtgttgcagggagtgagggcagctggagtgcgttctgccgaagcttgtggttgcacgcccatcgtcttaggggctaccttccgtgaccatgtccaagtctctgaagaagttggtggaggagagccgggagaagaaccagcccgaggtggacatgagtgaccggggcatctccaacatgctggatgtcaacggcctctttaccttatcccatatcacacaactggtcctcagccataacaagctaacaatggtgccaccgaacatcgcagaactgaagaatttggaggtgctcaacttttttaataaccaaatcgaggagctgcccacacagatcagtagccttcagaaactcaaacacctgaaccttggcatgaacaggctgaacactttgccacgaggcttcggctccctgccagctcttgaggttctggacttgacgtacaacaacttgagcgaaaattctcttcctggaaacttcttctacctgaccaccctgcgtgcactctatctaagtgacaacgattttgaaatcctgccgccagatattgggaagctcacaaagttgcagatactcagccttagggataacgacctgatctcgctgcctaaggaaatcggggagcttacccagcttaaagagctccacattcaggggaaccggctcaccgttctggccccagaactaggaaacttggatttaactggccagaagcaggtattcaaagcagagaacaatccctgggtgacccccattgcagaccagttccagcttgggcgtgtcccatgttttgagtatatccgttctgagacatacaaatcctctacggnagacacntgcaggccaaccagaaccaccgagcagannctnncnaatcgaanagatcagcgganaccnnggnagccagacngntnaggnngggntngnatcgntggcttccagcacnttctttctnnnacantatctcncttggccggtttcaattatcccatgtgcctgtagccgttattaccataaccacttaaggtcccc

SEQ ID NO: 28000 - DNA, 797 bp, Homo sapiens
  misc_feature (26)..(26): n is a, c, g, or t
  misc_feature (595)..(595): n is a, c, g, or t
  misc_feature (602)..(602): n is a, c, g, or t
  misc_feature (631)..(632): n is a, c, g, or t
  misc_feature (635)..(636): n is a, c, g, or t
  misc_feature (638)..(638): n is a, c, g, or t
  misc_feature (646)..(646): n is a, c, g, or t
  misc_feature (658)..(658): n is a, c, g, or t
  misc_feature (662)..(663): n is a, c, g, or t
  misc_feature (666)..(666): n is a, c, g, or t
  misc_feature (675)..(675): n is a, c, g, or t
  misc_feature (677)..(677): n is a, c, g, or t
  misc_feature (679)..(679): n is a, c, g, or t
  misc_feature (683)..(684): n is a, c, g, or t
  misc_feature (688)..(688): n is a, c, g, or t
  misc_feature (690)..(690): n is a, c, g, or t
  misc_feature (692)..(692): n is a, c, g, or t
  misc_feature (697)..(697): n is a, c, g, or t
  misc_feature (711)..(711): n is a, c, g, or t
  misc_feature (720)..(722): n is a, c, g, or t
  misc_feature (726)..(726): n is a, c, g, or t
  misc_feature (733)..(733): n is a, c, g, or t
ggggcgccgagacagggcgtgttcgntgttcagtgccggtgttgcagggagtgagggcagctggagtgcgttctgccgaagcttgtggttgcacgcccatcgtcttaggggctaccttccgtgttaccttatcccatatcacacaactggtcctcagccataacaagctaacaatggtgccaccgaacatcgcagaactgaagaatttggaggtgctcaacttttttaataaccaaatcgaggagctgcccacacagatcagtagccttcagaaactcaaacacctgaaccttggcatgaacaggctgaacactttgccacgaggcttcggctccctgccagctcttgaggttctggacttgacgtacaacaacttgagcgaaaattctcttcctggaaacttcttctacctgaccaccctgcgtgcactctatctaagtgacaacgattttgaaatcctgccgccagatattgggaagcaggtattcaaagcagagaacaatccctgggtgacccccattgcagaccagttccagcttgggcgtgtcccatgttttgagtatatccgttctgagacatacaaatcctctacggnagacacntgcaggccaaccagaaccaccgagcagannctnncnaatcgaanagatcagcgganaccnnggnagccagacngntnaggnngggntngnatcgntggcttccagcacnttctttctnnnacantatctcncttggccggtttcaattatcccatgtgcctgtagccgttattaccataaccacttaaggtcccc

SEQ ID NO: 28001 - DNA, 1014 bp, Homo sapiens
  misc_feature (26)..(26): n is a, c, g, or t
  misc_feature (812)..(812): n is a, c, g, or t
  misc_feature (819)..(819): n is a, c, g, or t
  misc_feature (848)..(849): n is a, c, g, or t
  misc_feature (852)..(853): n is a, c, g, or t
  misc_feature (855)..(855): n is a, c, g, or t
  misc_feature (863)..(863): n is a, c, g, or t
  misc_feature (875)..(875): n is a, c, g, or t
  misc_feature (879)..(880): n is a, c, g, or t
  misc_feature (883)..(883): n is a, c, g, or t
  misc_feature (892)..(892): n is a, c, g, or t
  misc_feature (894)..(894): n is a, c, g, or t
  misc_feature (896)..(896): n is a, c, g, or t
  misc_feature (900)..(901): n is a, c, g, or t
  misc_feature (905)..(905): n is a, c, g, or t
  misc_feature (907)..(907): n is a, c, g, or t
  misc_feature (909)..(909): n is a, c, g, or t
  misc_feature (914)..(914): n is a, c, g, or t
  misc_feature (928)..(928): n is a, c, g, or t
  misc_feature (937)..(939): n is a, c, g, or t
  misc_feature (943)..(943): n is a, c, g, or t
  misc_feature (950)..(950): n is a, c, g, or t
ggggcgccgagacagggcgtgttcgntgttcagtgccggtgttgcagggagtgagggcagctggagtgcgttctgccgaagcttgtggttgcacgcccatcgtcttaggggctaccttccgtgaccatgtccaagtctctgaagaagttggtggaggagagccgggagaagaaccagcccgaggtggacatgagtgaccggggcatctccaacatgctggatgtcaacggcctctttaccttatcccatatcacacaactggtcctcagccataacaagctaacaatggtgccaccgaacatcgcagaactgaagaatttggaggtgctcaacttttttaataaccaaatcgaggagctgcccacacagatcagtagccttcagaaactcaaacacctgaaccttggcatgaacaggctgaacactttgccacgaggcttcggctccctgccagctcttgaggttctggacttgacgtacaacaacttgagcgtaagtgacaacgattttgaaatcctgccgccagatattgggaagctcacaaagttgcagatactcagccttagggataacgacctgatctcgctgcctaaggaaatcggggagcttacccagcttaaagagctccacattcaggggaaccggctcaccgttctggccccagaactaggaaacttggatttaactggccagaagcaggtattcaaagcagagaacaatccctgggtgacccccattgcagaccagttccagcttgggcgtgtcccatgttttgagtatatccgttctgagacatacaaatcctctacggnagacacntgcaggccaaccagaaccaccgagcagannctnncnaatcgaanagatcagcgganaccnnggnagccagacngntnaggnngggntngnatcgntggcttccagcacnttctttctnnnacantatctcncttggccggtttcaattatcccatgtgcctgtagccgttattaccataaccacttaaggtcccc

SEQ ID NO: 28002 - DNA, 956 bp, Homo sapiens
  misc_feature (26)..(26): n is a, c, g, or t
  misc_feature (754)..(754): n is a, c, g, or t
  misc_feature (761)..(761): n is a, c, g, or t
  misc_feature (790)..(791): n is a, c, g, or t
  misc_feature (794)..(795): n is a, c, g, or t
  misc_feature (797)..(797): n is a, c, g, or t
  misc_feature (805)..(805): n is a, c, g, or t
  misc_feature (817)..(817): n is a, c, g, or t
  misc_feature (821)..(822): n is a, c, g, or t
  misc_feature (825)..(825): n is a, c, g, or t
  misc_feature (834)..(834): n is a, c, g, or t
  misc_feature (836)..(836): n is a, c, g, or t
  misc_feature (838)..(838): n is a, c, g, or t
  misc_feature (842)..(843): n is a, c, g, or t
  misc_feature (847)..(847): n is a, c, g, or t
  misc_feature (849)..(849): n is a, c, g, or t
  misc_feature (851)..(851): n is a, c, g, or t
  misc_feature (856)..(856): n is a, c, g, or t
  misc_feature (870)..(870): n is a, c, g, or t
  misc_feature (879)..(881): n is a, c, g, or t
  misc_feature (885)..(885): n is a, c, g, or t
  misc_feature (892)..(892): n is a, c, g, or t
ggggcgccgagacagggcgtgttcgntgttcagtgccggtgttgcagggagtgagggcagctggagtgcgttctgccgaagcttgtggttgcacgcccatcgtcttaggggctaccttccgtgttaccttatcccatatcacacaactggtcctcagccataacaagctaacaatggtgccaccgaacatcgcagaactgaagaatttggaggtgctcaacttttttaataaccaaatcgaggagctgcccacacagatcagtagccttcagaaactcaaacacctgaaccttggcatgaacaggctgaacactttgccacgaggcttcggctccctgccagctcttgaggttctggacttgacgtacaacaacttgagcgaaaattctcttcctggaaacttcttctacctgaccaccctgcgtgcactctatctaagtgacaacgattttgaaatcctgccgccagatattgggaagctcacaaagttgcagatactcagccttagggataacgacctgatctcgctgcctaaggaaatcggggagcttacccagcttaaagagctccacattcaggggaaccggctcaccgttctggccccagaactaggaaacttggatttaactggccagaagcaggtattcaaagcagagaacaatccctgggtgacccccattgcagaccagttccagcttgggcgtgtcccatgttttgagtatatccgttctgagacatacaaatcctctacggnagacacntgcaggccaaccagaaccaccgagcagannctnncnaatcgaanagatcagcgganaccnnggnagccagacngntnaggnngggntngnatcgntggcttccagcacnttctttctnnnacantatctcncttggccggtttcaattatcccatgtgcctgtagccgttattaccataaccacttaaggtcccc

SEQ ID NO: 28003 - DNA, 902 bp, Homo sapiens
  misc_feature (26)..(26): n is a, c, g, or t
  misc_feature (700)..(700): n is a, c, g, or t
  misc_feature (707)..(707): n is a, c, g, or t
  misc_feature (736)..(737): n is a, c, g, or t
  misc_feature (740)..(741): n is a, c, g, or t
  misc_feature (743)..(743): n is a, c, g, or t
  misc_feature (751)..(751): n is a, c, g, or t
  misc_feature (763)..(763): n is a, c, g, or t
  misc_feature (767)..(768): n is a, c, g, or t
  misc_feature (771)..(771): n is a, c, g, or t
  misc_feature (780)..(780): n is a, c, g, or t
  misc_feature (782)..(782): n is a, c, g, or t
  misc_feature (784)..(784): n is a, c, g, or t
  misc_feature (788)..(789): n is a, c, g, or t
  misc_feature (793)..(793): n is a, c, g, or t
  misc_feature (795)..(795): n is a, c, g, or t
  misc_feature (797)..(797): n is a, c, g, or t
  misc_feature (802)..(802): n is a, c, g, or t
  misc_feature (816)..(816): n is a, c, g, or t
  misc_feature (825)..(827): n is a, c, g, or t
  misc_feature (831)..(831): n is a, c, g, or t
  misc_feature (838)..(838): n is a, c, g, or t
ggggcgccgagacagggcgtgttcgntgttcagtgccggtgttgcagggagtgagggcagctggagtgcgttctgccgaagcttgtggttgcacgcccatcgtcttaggggctaccttccgtgttaccttatcccatatcacacaactggtcctcagccataacaagctaacaatggtgccaccgaacatcgcagaactgaagaatttggaggtgctcaacttttttaataaccaaatcgaggagctgcccacacagatcagtagccttcagaaactcaaacacctgaaccttggcatgaacaggctgaacactttgccacgaggcttcggctccctgccagctcttgaggttctggacttgacgtacaacaacttgagcgtaagtgacaacgattttgaaatcctgccgccagatattgggaagctcacaaagttgcagatactcagccttagggataacgacctgatctcgctgcctaaggaaatcggggagcttacccagcttaaagagctccacattcaggggaaccggctcaccgttctggccccagaactaggaaacttggatttaactggccagaagcaggtattcaaagcagagaacaatccctgggtgacccccattgcagaccagttccagcttgggcgtgtcccatgttttgagtatatccgttctgagacatacaaatcctctacggnagacacntgcaggccaaccagaaccaccgagcagannctnncnaatcgaanagatcagcgganaccnnggnagccagacngntnaggnngggntngnatcgntggcttccagcacnttctttctnnnacantatctcncttggccggtttcaattatcccatgtgcctgtagccgttattaccataaccacttaaggtcccc

SEQ ID NO: 28004 - DNA, 182 bp, Homo sapiens
gacagcaaaaatcttgagttcagtgaaacgaaatacttctcaaatttattagacccatcatatatgctttttaattagttgtctctagttttaacctttcccatatgtttcatacagagagacagctgtaatgtggcaacctgtggctcttgtcttttatctccagaatagtgatgtttttc

SEQ ID NO: 28005 - DNA, 1986 bp, Homo sapiens
  misc_feature (1)..(1): n is a, c, g, or t
  misc_feature (3)..(4): n is a, c, g, or t
  misc_feature (7)..(7): n is a, c, g, or t
ngnncgnggcggggcggggctgagcgtgtttacatccgccgggtgcgcggcttcgccgcccgaggtcgttcggctcgggtaccatcctccgcgccatggacaccagcgacctgttcgccagctgcaggaagggggatgtgggccgagtgcggtacctgctggagcagcgagacgtggaggtgaatgtgcgggacaagtgggacagcacccccttgtactatgcctgcttgtgtgggcacgaggagctggtactctaccttctggccaatggagcccgctgcgaggccaacaccttcgatggtgagcgctgcctctatggggcactgagtgaccccatccgccgggctctacgcgattacaagcaggtcacggcttcctgcaggaggcgggattactatgacgacttcttgcagcggcttctagagcagggcatccacagtgacgtggtctttgtagtacacgggaagccattccgggtgcatcgctgcgtcctgggtgcacgtagtgcctactttgccaacatgctggacaccaaatggaagggcaagagtgtcgtggttctcaggcacccactgatcaaccccgtggcctttggggccctgctgcagtacctgtacacaggccgcctggacattggcgtagagcatgtgagtgactgtgagcgcctggccaagcaatgccagctgtgggacctgctcagcgacctggaggccaagtgcgagaaggtgtctgagtttgtggcgtctaagccaggcacgtgtgtgaaggtgctgaccatcgagcccccacctgcagacccccgcctccgggaggacatggcgctgctggccgattgtgccctgccccccgagctccgaggtgatctttgggagctgcccttcccttgtcctgacggcttcaacagctgccctgacatctgcttccgagtggctggctgcagcttcctctgccacaaggcctttttctgtggccgcagtgactacttccgagccctgctggatgaccacttccgagagagcgaggagccagcgacctcagggggccccccagccgtcaccctgcatggcatctcacccgacgtcttcactcacgtgctctactacatgtacagcgaccacactgagctgtcccccgaggcagcctatgatgtgctgagcgtcgccgacatgtacctgctgccaggcctgaagaggctgtgcggccgcagcctggctcagatgctagacgaggacactgtggtgggtgtgtggcgcgtggccaagctcttccgcctggcgcggcttgaggaccagtgcactgagtacatggccaaggtcattgagaagctggtggagcgggaggacttcgtggaggcggtgaaggaggaggcagcggctgtggcagcccggcaggagacggactctatcccgctggtggacgacatccgcttccacgtggccagcacggtgcagacctacagcgccatagaggaggcgcagcagcgtctgcgggcactcgaggacctgctcgtgtccatcggtctggactgttgagcccctggctgggcagccccaggggccaggagctctcttggagacaagcatgtgtatgcgtttgtgtgcagctcttcttcctgctccctgcacattgagggcttcatggggggtgcgaggggctcagtggggcttctcttccctccatgagcctggagaccccaggggaggatccatttgggatgagccccctccccccaatgcacaagccagcccccaagaccctgggggtggacaccactcagggaaacctggggtgggggtgggctttggtcttagcactttccttctccagatcccccctacccaccccagtcccaaatccagtcctctggcccttgcctagccctgaattgcttctctaagctggtgttcccatgcacagggccattcaggaagggctgggggagtgtgtgtggcaataaagcttgaaggcaccgtgggagcatgagcc

SEQ ID NO: 28006 - DNA, 1951 bp, Homo sapiens
  misc_feature (1)..(1): n is a, c, g, or t
  misc_feature (3)..(4): n is a, c, g, or t
  misc_feature (7)..(7): n is a, c, g, or t
ngnncgnggcggggcggggctgagcgtgtttacatccgccgggtgcgcggcttcgccgcccgaggtcgttcggctcgggtaccatcctccgcgccatggacaccagcgacctgttcgccagctgcaggaagggggatgtgggccgagtgcggtacctgctggagcagcgagacgtggaggtactatgcctgcttgtgtgggcacgaggagctggtactctaccttctggccaatggagcccgctgcgaggccaacaccttcgatggtgagcgctgcctctatggggcactgagtgaccccatccgccgggctctacgcgattacaagcaggtcacggcttcctgcaggaggcgggattactatgacgacttcttgcagcggcttctagagcagggcatccacagtgacgtggtctttgtagtacacgggaagccattccgggtgcatcgctgcgtcctgggtgcacgtagtgcctactttgccaacatgctggacaccaaatggaagggcaagagtgtcgtggttctcaggcacccactgatcaaccccgtggcctttggggccctgctgcagtacctgtacacaggccgcctggacattggcgtagagcatgtgagtgactgtgagcgcctggccaagcaatgccagctgtgggacctgctcagcgacctggaggccaagtgcgagaaggtgtctgagtttgtggcgtctaagccaggcacgtgtgtgaaggtgctgaccatcgagcccccacctgcagacccccgcctccgggaggacatggcgctgctggccgattgtgccctgccccccgagctccgaggtgatctttgggagctgcccttcccttgtcctgacggcttcaacagctgccctgacatctgcttccgagtggctggctgcagcttcctctgccacaaggcctttttctgtggccgcagtgactacttccgagccctgctggatgaccacttccgagagagcgaggagccagcgacctcagggggccccccagccgtcaccctgcatggcatctcacccgacgtcttcactcacgtgctctactacatgtacagcgaccacactgagctgtcccccgaggcagcctatgatgtgctgagcgtcgccgacatgtacctgctgccaggcctgaagaggctgtgcggccgcagcctggctcagatgctagacgaggacactgtggtgggtgtgtggcgcgtggccaagctcttccgcctggcgcggcttgaggaccagtgcactgagtacatggccaaggtcattgagaagctggtggagcgggaggacttcgtggaggcggtgaaggaggaggcagcggctgtggcagcccggcaggagacggactctatcccgctggtggacgacatccgcttccacgtggccagcacggtgcagacctacagcgccatagaggaggcgcagcagcgtctgcgggcactcgaggacctgctcgtgtccatcggtctggactgttgagcccctggctgggcagccccaggggccaggagctctcttggagacaagcatgtgtatgcgtttgtgtgcagctcttcttcctgctccctgcacattgagggcttcatggggggtgcgaggggctcagtggggcttctcttccctccatgagcctggagaccccaggggaggatccatttgggatgagccccctccccccaatgcacaagccagcccccaagaccctgggggtggacaccactcagggaaacctggggtgggggtgggctttggtcttagcactttccttctccagatcccccctacccaccccagtcccaaatccagtcctctggcccttgcctagccctgaattgcttctctaagctggtgttcccatgcacagggccattcaggaagggctgggggagtgtgtgtggcaataaagcttgaaggcaccgtgggagcatgagcc

SEQ ID NO: 28007 - DNA, 859 bp, Homo sapiens
  misc_feature (1)..(1): n is a, c, g, or t
  misc_feature (3)..(4): n is a, c, g, or t
  misc_feature (7)..(7): n is a, c, g, or t
ngnncgnggcggggcggggctgagcgtgtttacatccgccgggtgcgcggcttcgccgcccgaggtcgttcggctcgggtaccatcctccgcgccatggacaccagcgacctgttcgccagctgcaggaagggggatgtgggccgagtgcgaccatgaacccgtcctgacccaggctctgacctccttcctgcccaggtacctgctggagcagcgagacgtggaggtactatgcctgcttgtgtgggcacgaggagctggtactctaccttctggccaatggagcccgctgcgaggccaacaccttcgatggtgagcgctgcctctatggggcactgagtgaccccatccgccgggctctacgcgattacaagcaggtcacggcttcctgcaggaggcgggattactatgacgacttcttgcagcggcttctagagcagggcatccacagtgacgtggtctttgtagtacacgggaagccattccgggtgcatcgctgcgtcctgggtgcacgtagtgcctactttgccaacatgctggacaccaaatggaagggcaagagtgtcgtggttctcaggcacccactgatcaaccccgtggcctttggggccctgctgcagtacctgtacacagtgaccccctgggtccagggtaggaggagagggagtgggccgtccttctggacagcagtacacctaggtgtggctgggctgacctttcacctctagacacttcatggtccccccggggtggttccagctgcctctcgggttgggttgcaagagagaggactagtgtgcctgctcaggaagagcttgtcccacccacatgctgaggccctcccatctgttccctggggc

SEQ ID NO: 28008 - DNA, 633 bp, Homo sapiens
  misc_feature (1)..(1): n is a, c, g, or t
  misc_feature (3)..(4): n is a, c, g, or t
  misc_feature (7)..(7): n is a, c, g, or t
ngnncgnggcggggcggggctgagcgtgtttacatccgccgggtgcgcggcttcgccgcccgaggtcgttcggctcgggtaccatcctccgcgccatggacaccagcgacctgttcgccagctgcaggaagggggatgtgggccgagtgcggtgaggacctcgcagtcccggggagggtgcgggaggtggccgccctcggaacgcctcgggccctgggacgggcggctgggcggccgcggagaggcgggcgcctctgccgggtcacagccctcggagcgcccccgcggggcagaccacccggacccccgccgcagccccccagcggaagcgcgctggggcggggacactgatggccattgacccccggagggcttcctgtaagaagggactgctcagcggaggcccgaaggcgcagaagtgggcggagagaaggcgggccactgttcgccctggtagggcccggacgtcagaccccccgggcgcagggcgcgggtataggcctgggactccagacgtggcccctttctctcgtgctctctggacctggcgcggggaacacctagagcccataatcggcctccggtccctgaggattcggaaactcctgacgcagctaaagtgaatctggcgct

SEQ ID NO: 28009 - DNA, 355 bp, Homo sapiens
atatgaaagggtaaaagaatagaatacaaatattaacagtaggcagaagtagggatatgagagagtgatctgattagatagcagcatgcaattagatgaagcaaggagtacggaaggtatacctgcaattcacagatttataaagggaatgagtgaaaaagtaatagtgaaaaagataaatatgggaatgttattgatcccccctacccaccccagtcccaaatccagtcctctggcccttgcctagccctgaattgcttctctaagctggtgttcccatgcacagggccattcaggaagggctgggggagtgtgtgtggcaataaagcttgaaggcaccgtgggagcatgagcc

SEQ ID NO: 28010 - DNA, 2448 bp, Homo sapiens
gtactcccgtagcctccctgggccgctccctgacatcccgtgccactcaagagttagtgcatagtgtcaacgctgagtgggttcacagcacttccaggtgcagcctggaggcctcctttgggctgcccccgcctcagtggggctacattagcattggcgactcccctcgctcaccttccgcatcccatcagttgctgtatcccgcgactcctgcctcctagaattgtgtgccctccacaccatcaggaggcctgcagcagctttttcccgggctccctgcttctaacagggccagcttcttcctgcagtagagagctctggtgggagtgaaggctccatcacctcctctcccaaacgctgaaaggccaaaggtccagcctcggcactggctctggcttctgtccctgtagcccatcgtcccccagcactgatagcacacagtgtctgcctgttcgaccccacctccacatccttgcctgcactttgccttgagtgcctctcctgctctggtctgcctgtcacctgccctcacctgggggaggcttccccataccaaaagggatgttttctctccgttcctttccacgggccttctttctcagaccatgaacccgtcctgacccaggctctgacctccttcctgcccaggtacctgctggagcagcgagacgtggaggtactatgcctgcttgtgtgggcacgaggagctggtactctaccttctggccaatggagcccgctgcgaggccaacaccttcgatggtgagcgctgcctctatggggcactgagtgaccccatccgccgggctctacgcgattacaagcaggtcacggcttcctgcaggaggcgggattactatgacgacttcttgcagcggcttctagagcagggcatccacagtgacgtggtctttgtagtacacgggaagccattccgggtgcatcgctgcgtcctgggtgcacgtagtgcctactttgccaacatgctggacaccaaatggaagggcaagagtgtcgtggttctcaggcacccactgatcaaccccgtggcctttggggccctgctgcagtacctgtacacaggccgcctggacattggcgtagagcatgtgagtgactgtgagcgcctggccaagcaatgccagctgtgggacctgctcagcgacctggaggccaagtgcgagaaggtgtctgagtttgtggcgtctaagccaggcacgtgtgtgaaggtgctgaccatcgagcccccacctgcagacccccgcctccgggaggacatggcgctgctggccgattgtgccctgccccccgagctccgaggtgatctttgggagctgcccttcccttgtcctgacggcttcaacagctgccctgacatctgcttccgagtggctggctgcagcttcctctgccacaaggcctttttctgtggccgcagtgactacttccgagccctgctggatgaccacttccgagagagcgaggagccagcgacctcagggggccccccagccgtcaccctgcatggcatctcacccgacgtcttcactcacgtgctctactacatgtacagcgaccacactgagctgtcccccgaggcagcctatgatgtgctgagcgtcgccgacatgtacctgctgccaggcctgaagaggctgtgcggccgcagcctggctcagatgctagacgaggacactgtggtgggtgtgtggcgcgtggccaagctcttccgcctggcgcggcttgaggaccagtgcactgagtacatggccaaggtcattgagaagctggtggagcgggaggacttcgtggaggcggtgaaggaggaggcagcggctgtggcagcccggcaggagacggactctatcccgctggtggacgacatccgcttccacgtggccagcacggtgcagacctacagcgccatagaggaggcgcagcagcgtctgcgggcactcgaggacctgctcgtgtccatcggtctggactgttgagcccctggctgggcagccccaggggccaggagctctcttggagacaagcatgtgtatgcgtttgtgtgcagctcttcttcctgctccctgcacattgagggcttcatggggggtgcgaggggctcagtggggcttctcttccctccatgagcctggagaccccaggggaggatccatttgggatgagccccctccccccaatgcacaagccagcccccaagaccctgggggtggacaccactcagggaaacctggggtgggggtgggctttggtcttagcactttccttctccagatcccccctacccaccccagtcccaaatccagtcctctggcccttgcctagccctgaattgcttctctaagctggtgttcccatgcacagggccattcaggaagggctgggggagtgtgtgtggcaataaagcttgaaggcaccgtgggagcatgagcc

SEQ ID NO: 28011 - DNA, 1927 bp, Homo sapiens
tgagtaaacggctaggctagaggtggctagaataaataggaggcctaggttgaggttgaccagggggttgggccgagtgcgaccatgaacccgtcctgacccaggctctgacctccttcctgcccaggtacctgctggagcagcgagacgtggaggtactatgcctgcttgtgtgggcacgaggagctggtactctaccttctggccaatggagcccgctgcgaggccaacaccttcgatggtgagcgctgcctctatggggcactgagtgaccccatccgccgggctctacgcgattacaagcaggtcacggcttcctgcaggaggcgggattactatgacgacttcttgcagcggcttctagagcagggcatccacagtgacgtggtctttgtagtacacgggaagccattccgggtgcatcgctgcgtcctgggtgcacgtagtgcctactttgccaacatgctggacaccaaatggaagggcaagagtgtcgtggttctcaggcacccactgatcaaccccgtggcctttggggccctgctgcagtacctgtacacaggccgcctggacattggcgtagagcatgtgagtgactgtgagcgcctggccaagcaatgccagctgtgggacctgctcagcgacctggaggccaagtgcgagaaggtgtctgagtttgtggcgtctaagccaggcacgtgtgtgaaggtgctgaccatcgagcccccacctgcagacccccgcctccgggaggacatggcgctgctggccgattgtgccctgccccccgagctccgaggtgatctttgggagctgcccttcccttgtcctgacggcttcaacagctgccctgacatctgcttccgagtggctggctgcagcttcctctgccacaaggcctttttctgtggccgcagtgactacttccgagccctgctggatgaccacttccgagagagcgaggagccagcgacctcagggggccccccagccgtcaccctgcatggcatctcacccgacgtcttcactcacgtgctctactacatgtacagcgaccacactgagctgtcccccgaggcagcctatgatgtgctgagcgtcgccgacatgtacctgctgccaggcctgaagaggctgtgcggccgcagcctggctcagatgctagacgaggacactgtggtgggtgtgtggcgcgtggccaagctcttccgcctggcgcggcttgaggaccagtgcactgagtacatggccaaggtcattgagaagctggtggagcgggaggacttcgtggaggcggtgaaggaggaggcagcggctgtggcagcccggcaggagacggactctatcccgctggtggacgacatccgcttccacgtggccagcacggtgcagacctacagcgccatagaggaggcgcagcagcgtctgcgggcactcgaggacctgctcgtgtccatcggtctggactgttgagcccctggctgggcagccccaggggccaggagctctcttggagacaagcatgtgtatgcgtttgtgtgcagctcttcttcctgctccctgcacattgagggcttcatggggggtgcgaggggctcagtggggcttctcttccctccatgagcctggagaccccaggggaggatccatttgggatgagccccctccccccaatgcacaagccagcccccaagaccctgggggtggacaccactcagggaaacctggggtgggggtgggctttggtcttagcactttccttctccagatcccccctacccaccccagtcccaaatccagtcctctggcccttgcctagccctgaattgcttctctaagctggtgttcccatgcacagggccattcaggaagggctgggggagtgtgtgtggcaataaagcttgaaggcaccgtgggagcatgagcc

SEQ ID NO: 28012 - DNA, 4131 bp, Homo sapiens
  misc_feature (1)..(1): n is a, c, g, or t
  misc_feature (3)..(4): n is a, c, g, or t
  misc_feature (7)..(7): n is a, c, g, or t
ngnncgnggcggggcggggctgagcgtgtttacatccgccgggtgcgcggcttcgccgcccgaggtcgttcggctcgggtaccatcctccgcgccatggacaccagcgacctgttcgccagctgcaggaagggggatgtgggccgagtgcggtacctgctggagcagcgagacgtggaggtgaatgtgcgggacaagtgggacagcacccccttgtactatgcctgcttgtgtgggcacgaggagctggtactctaccttctggccaatggagcccgctgcgaggccaacaccttcgatggtgagcgctgcctctatggggcactgagtgaccccatccgccgggctctacgcgattacaagcaggtcacggcttcctgcaggaggcgggattactatgacgacttcttgcagcggcttctagagcagggcatccacagtgacgtggtctttgtagtacacgggaagccattccgggtgcatcgctgcgtcctgggtgcacgtagtgcctactttgccaacatgctggacaccaaatggaagggcaagagtgtcgtggttctcaggcacccactgatcaaccccgtggcctttggggccctgctgcagtacctgtacacaggccgcctggacattggcgtagagcatgtgagtgactgtgagcgcctggccaagcaatgccagctgtgggacctgctcagcgacctggaggccaagtgcgagaaggtgtctgagtttgtggcgtctaagccaggcacgtgtgtgaaggtgctgaccatcgagcccccacctgcagacccccgcctccgggaggacatggcgctgctggccgattgtgccctgccccccgagctccgaggtgatctttgggagctgcccttcccttgtcctgacggcttcaacagctgccctgacatctgcttccgagtggctggctgcagcttcctctgccacaaggcctttttctgtggccgcagtgactacttccgagccctgctggatgaccacttccgagagagcgaggagccagcgacctcagggggccccccagccgtcaccctgcatggcatctcacccgacgtcttcactcacgtgctctactacatgtacagcgaccacactgagtgggggctcaggcagagctggggatggcacacaacctgtgctgccgtgggctgagagggagcgccagggccctgggggtctgtggaagggcccagctggccccatggttgacgttttgagaaggctggaggggaaggctgtgggactttggatttttctttcaggtagaggaagccttgttgggctccagagagaggatgagtgatgagcctgtgtcacagacactccacacttgtcagccacttgggatcctcagcttctctagcaggagggtggagggtgggtggggacagcctcctctctgtggtgctgcagatccctggggttctgggttcccagtctcctcttcccttgctgcctgcctctgtctccagctgccccaaggtgtccgtaagccaaggctgcagggcagcagcagagtgctgaaggtttgctctgccagggtgtgtgagagagagagagagtgtgtgtgtgcgtgcgcgtgcgcgtgcgcgcgactataaagcaatccccatatctggtggcttaaagaagaggggagtttgtttctccttcacttctgactgaggtgggtgccccagggcaagtggcttgcggaagatcaggtcatccctccatcttgcccctgtatgcctaagggtgaaggtcaaaaaccttttctctgaaggtgagtgtttcaggttctgtgggccatatggccctgttgtagctactcaactctgtagcgcaaaggtagccagagacagtacagagatgagtgggtgaggctgcattccaataaaactttacttgcacaaacaggctggatttggtccacaggccgtagcttacccatcctgcctggggcatcgcgtttggccatggagattgggtcctaggcaaactcatgctctaggaggaagaggaaggcagggcaagcaatgctgtttttgtagaagccaccggaaattgcaccacttctcatgttcccctggagagaacttcgtgcctacctgccaacaagggaggcttggaaagtcattctgtggccagggccctgttttgtgggggaaggggaggaagcatgctgggagacagagggcagtccctactgctgctctatctccagtggcagctcccttgtccatccctccgcgcggcctgacagcccctcagcctccatctttcccaccccctctactgggcatctcctgcagctcagcccagctctctggcccctgtagcaggggttacctttgcccaccctggagaagctccctcttcaaggagcctcgccacccaaagggcaccttgtctcagagtgtggcttgggctcttaacctgggttgatactggttgagctgtgtgacactgggtgagctttgtgatcttgggccagttacttaactgctctgtgcctctagaacatggggatagctctcgtcgtcacttcctaaggccttgtgcagatgcatgggttacccaggtaaaggaggtggcatggcacatggcacgtggcttgtaatgtggtcgcagagctccccttgtctctgtctgcagcttgctccctgtgccacccaggctctggcctgaatctgagggcttcagtcttatccagcacaggatgtatctgtaggtgggctctgtgtccccacagcctcttgagagggagggagctggtagatagtctcccacccctggcagagtccctgcataggtcttgactagctgcctctgtcccaccattctgacagcccccgcaggtaggcatggttatctatacctcatggactgggaactagaggcacagggaggtgcagtgacttgcccagggccccacagctagaagtgtcagacccaggtctgtataactcggagctcagaccctggctcctgcgagggccctgcctcccgcctgccctgccagcctgctcagggcatgggagaaccccccagtcttctgccccctagcggtcctgcagatccctgtgggaatctgggccagccccccgacccccaaccccatacatgcgcagggagctcctactcccactggaagccttcccgccagtgccccccaaccaccacaggccctagccttggctgttgtgccctgggagcccttggtgacctcggggggcaccttcatccctgtcttcactgcagctgtcccccgaggcagcctatgatgtgctgagcgtcgccgacatgtacctgctgccaggcctgaagaggctgtgcggccgcagcctggctcagatgctagacgaggacactgtggtgggtgtgtggcgcgtggccaagctcttccgcctggcgcggcttgaggaccagtgcactgagtacatggccaaggtcattgagaagctggtggagcgggaggacttcgtggaggcggtgaaggaggaggcagcggctgtggcagcccggcaggagacggactctatcccgctggtggacgacatccgcttccacgtggccagcacggtgcagacctacagcgccatagaggaggcgcagcagcgtctgcgggcactcgaggacctgctcgtgtccatcggtctggactgttgagcccctggctgggcagccccaggggccaggagctctcttggagacaagcatgtgtatgcgtttgtgtgcagctcttcttcctgctccctgcacattgagggcttcatggggggtgcgaggggctcagtggggcttctcttccctccatgagcctggagaccccaggggaggatccatttgggatgagccccctccccccaatgcacaagccagcccccaagaccctgggggtggacaccactcagggaaacctggggtgggggtgggctttggtcttagcactttccttctccagatcccccctacccaccccagtcccaaatccagtcctctggcccttgcctagccctgaattgcttctctaagctggtgttcccatgcacagggccattcaggaagggctgggggagtgtgtgtggcaataaagcttgaaggcaccgtgggagcatgagcc

SEQ ID NO: 28013 - DNA, 1676 bp, Homo sapiens
tgtggcgagtctgctctgactgtggcctgcactgggttctgagtgctccgaggaatggggtggggctgtgccaagtatcctccctcctggcttgtccctccccaggcttctagagcagggcatccacagtgacgtggtctttgtagtacacgggaagccattccgggtgcatcgctgcgtcctgggtgcacgtagtgcctactttgccaacatgctggacaccaaatggaagggcaagagtgtcgtggttctcaggcacccactgatcaaccccgtggcctttggggccctgctgcagtacctgtacacaggccgcctggacattggcgtagagcatgtgagtgactgtgagcgcctggccaagcaatgccagctgtgggacctgctcagcgacctggaggccaagtgcgagaaggtgtctgagtttgtggcgtctaagccaggcacgtgtgtgaaggtgctgaccatcgagcccccacctgcagacccccgcctccgggaggacatggcgctgctggccgattgtgccctgccccccgagctccgaggtgatctttgggagctgcccttcccttgtcctgacggcttcaacagctgccctgacatctgcttccgagtggctggctgcagcttcctctgccacaaggcctttttctgtggccgcagtgactacttccgagccctgctggatgaccacttccgagagagcgaggagccagcgacctcagggggccccccagccgtcaccctgcatggcatctcacccgacgtcttcactcacgtgctctactacatgtacagcgaccacactgagctgtcccccgaggcagcctatgatgtgctgagcgtcgccgacatgtacctgctgccaggcctgaagaggctgtgcggccgcagcctggctcagatgctagacgaggacactgtggtgggtgtgtggcgcgtggccaagctcttccgcctggcgcggcttgaggaccagtgcactgagtacatggccaaggtcattgagaagctggtggagcgggaggacttcgtggaggcggtgaaggaggaggcagcggctgtggcagcccggcaggagacggactctatcccgctggtggacgacatccgcttccacgtggccagcacggtgcagacctacagcgccatagaggaggcgcagcagcgtctgcgggcactcgaggacctgctcgtgtccatcggtctggactgttgagcccctggctgggcagccccaggggccaggagctctcttggagacaagcatgtgtatgcgtttgtgtgcagctcttcttcctgctccctgcacattgagggcttcatggggggtgcgaggggctcagtggggcttctcttccctccatgagcctggagaccccaggggaggatccatttgggatgagccccctccccccaatgcacaagccagcccccaagaccctgggggtggacaccactcagggaaacctggggtgggggtgggctttggtcttagcactttccttctccagatcccccctacccaccccagtcccaaatccagtcctctggcccttgcctagccctgaattgcttctctaagctggtgttcccatgcacagggccattcaggaagggctgggggagtgtgtgtggcaataaagcttgaaggcaccgtgggagcatgagcc

SEQ ID NO: 28014 - DNA, 3946 bp, Homo sapiens
  misc_feature (1)..(1): n is a, c, g, or t
  misc_feature (3)..(4): n is a, c, g, or t
  misc_feature (7)..(7): n is a, c, g, or t
ngnncgnggcggggcggggctgagcgtgtttacatccgccgggtgcgcggcttcgccgcccgaggtcgttcggctcgggtaccatcctccgcgccatggacaccagcgacctgttcgccagctgcaggaagggggatgtgggccgagtgcggtacctgctggagcagcgagacgtggaggtgaatgtgcgggacaagtgggacagcacccccttgtactatgcctgcttgtgtgggcacgaggagctggtactctaccttctggccaatggagcccgctgcgaggccaacaccttcgatggtgagcgctgcctctatggggcactgagtgaccccatccgccgggctctacgcgattacaagcaggtcacggcttcctgcaggaggcgggattactatgacgacttcttgcagcggcttctagagcagggcatccacagtgacgtggtctttgtagtacacgggaagccattccgggtgcatcgctgcgtcctgggtgcacgtagtgcctactttgccaacatgctggacaccaaatggaagggcaagagtgtcgtggttctcaggcacccactgatcaaccccgtggcctttggggccctgctgcagtacctgtacacaggccgcctggacattggcgtagagcatgtgagtgactgtgagcgcctggccaagcaatgccagctgtgggacctgctcagcgacctggaggccaagtgcgagaaggtgtctgagtttgtggcgtctaagccaggcacgtgtgtgaaggtgctgaccatcgagcccccacctgcagacccccgcctccgggaggacatggcgctgctggccgattgtgccctgccccccgagctccgaggtgatctttgggagctgcccttcccttgtcctgacggcttcaacagctgccctgacatctgcttccgagtggctggctgcagcttcctctgccacaaggcctttttctgtggccgcagtgactacttccgagccctgctggatgaccacttccgagagagcgaggagccagcgacctcagggggccccccagccgtcaccctgcatggcatctcacccgacgtcttcactcacgtgctctactacatgtacagcgaccacactgagtgggggctcaggcagagctggggatggcacacaacctgtgctgccgtgggctgagagggagcgccagggccctgggggtctgtggaagggcccagctggccccatggttgacgttttgagaaggctggaggggaaggctgtgggactttggatttttctttcaggtagaggaagccttgttgggctccagagagaggatgagtgatgagcctgtgtcacagacactccacacttgtcagccacttgggatcctcagcttctctagcaggagggtggagggtgggtggggacagcctcctctctgtggtgctgcagatccctggggttctgggttcccagtctcctcttcccttgctgcctgcctctgtctccagctgccccaaggtgtccgtaagccaaggctgcagggcagcagcagagtgctgaaggtttgctctgccagggtgtgtgagagagagagagagtgtgtgtgtgcgtgcgcgtgcgcgtgcgcgcgactataaagcaatccccatatctggtggcttaaagaagaggggagtttgtttctccttcacttctgactgaggtgggtgccccagggcaagtggcttgcggaagatcaggtcatccctccatcttgcccctgtatgcctaagggtgaaggtcaaaaaccttttctctgaaggtgagtgtttcaggttctgtgggccatatggccctgttgtagctactcaactctgtagcgcaaaggtagccagagacagtacagagatgagtgggtgaggctgcattccaataaaactttacttgcacaaacaggctggatttggtccacaggccgtagcttacccatcctgcctggggcatcgcgtttggccatggagattgggtcctaggcaaactcatgctctaggaggaagaggaaggcagggcaagcaatgctgtttttgtagaagccaccggaaattgcaccacttctcatgttcccctggagagaacttcgtgcctacctgccaacaagggaggcttggaaagtcattctgtggccagggccctgttttgtgggggaaggggaggaagcatgctgggagacagagggcagtccctactgctgctctatctccagtggcagctcccttgtccatccctccgcgcggcctgacagcccctcagcctccatctttcccaccccctctactgggcatctcctgcagctcagcccagctctctggcccctgtagcaggggttacctttgcccaccctggagaagctccctcttcaaggagcctcgccacccaaagggcaccttgtctcagagtgtggcttgggctcttaacctgggttgatactggttgagctgtgtgacactgggtgagctttgtgatcttgggccagttacttaactgctctgtgcctctagaacatggggatagctctcgtcgtcacttcctaaggccttgtgcagatgcatgggttacccaggtaaaggaggtggcatggcacatggcacgtggcttgtaatgtggtcgcagagctccccttgtctctgtctgcagcttgctccctgtgccacccaggctctggcctgaatctgagggcttcagtcttatccagcacaggatgtatctgtaggtgggctctgtgtccccacagctagaagtgtcagacccaggtctgtataactcggagctcagaccctggctcctgcgagggccctgcctcccgcctgccctgccagcctgctcagggcatgggagaaccccccagtcttctgccccctagcggtcctgcagatccctgtgggaatctgggccagccccccgacccccaaccccatacatgcgcagggagctcctactcccactggaagccttcccgccagtgccccccaaccaccacaggccctagccttggctgttgtgccctgggagcccttggtgacctcggggggcaccttcatccctgtcttcactgcagctgtcccccgaggcagcctatgatgtgctgagcgtcgccgacatgtacctgctgccaggcctgaagaggctgtgcggccgcagcctggctcagatgctagacgaggacactgtggtgggtgtgtggcgcgtggccaagctcttccgcctggcgcggcttgaggaccagtgcactgagtacatggccaaggtcattgagaagctggtggagcgggaggacttcgtggaggcggtgaaggaggaggcagcggctgtggcagcccggcaggagacggactctatcccgctggtggacgacatccgcttccacgtggccagcacggtgcagacctacagcgccatagaggaggcgcagcagcgtctgcgggcactcgaggacctgctcgtgtccatcggtctggactgttgagcccctggctgggcagccccaggggccaggagctctcttggagacaagcatgtgtatgcgtttgtgtgcagctcttcttcctgctccctgcacattgagggcttcatggggggtgcgaggggctcagtggggcttctcttccctccatgagcctggagaccccaggggaggatccatttgggatgagccccctccccccaatgcacaagccagcccccaagaccctgggggtggacaccactcagggaaacctggggtgggggtgggctttggtcttagcactttccttctccagatcccccctacccaccccagtcccaaatccagtcctctggcccttgcctagccctgaattgcttctctaagctggtgttcccatgcacagggccattcaggaagggctgggggagtgtgtgtggcaataaagcttgaaggcaccgtgggagcatgagcc

SEQ ID NO: 28015 - DNA, 3660 bp, Homo sapiens
  misc_feature (1)..(1): n is a, c, g, or t
  misc_feature (3)..(4): n is a, c, g, or t
  misc_feature (7)..(7): n is a, c, g, or t
ngnncgnggcggggcggggctgagcgtgtttacatccgccgggtgcgcggcttcgccgcccgaggtcgttcggctcgggtaccatcctccgcgccatggacaccagcgacctgttcgccagctgcaggaagggggatgtgggccgagtgcggtacctgctggagcagcgagacgtggaggtgaatgtgcgggacaagtgggacagcacccccttgtactatgcctgcttgtgtgggcacgaggagctggtactctaccttctggccaatggagcccgctgcgaggccaacaccttcgatggtgagcgctgcctctatggggcactgagtgaccccatccgccgggctctacgcgattacaagcaggtcacggcttcctgcaggaggcgggattactatgacgacttcttgcagcggcttctagagcagggcatccacagtgacgtggtctttgtagtacacgggaagccattccgggtgcatcgctgcgtcctgggtgcacgtagtgcctactttgccaacatgctggacaccaaatggaagggcaagagtgtcgtggttctcaggcacccactgatcaaccccgtggcctttggggccctgctgcagtacctgtacacaggccgcctggacattggcgtagagcatgtgagtgactgtgagcgcctggccaagcaatgccagctgtgggacctgctcagcgacctggaggccaagtgcgagaaggtgtctgagtttgtggcgtctaagccaggcacgtgtgtgaaggtgctgaccatcgagcccccacctgcagacccccgcctccgggaggacatggcgctgctggccgattgtgccctgccccccgagctccgaggtgatctttgggagctgcccttcccttgtcctgacggcttcaacagctgccctgacatctgcttccgagtggctggctgcagcttcctctgccacaaggcctttttctgtggccgcagtgactacttccgagccctgctggatgaccacttccgagagagcgaggagccagcgacctcagggggccccccagccgtcaccctgcatggcatctcacccgacgtcttcactcacgtgctctactacatgtacagcgaccacactgagtgggggctcaggcagagctggggatggcacacaacctgtgctgccgtgggctgagagggagcgccagggccctgggggtctgtggaagggcccagctggccccatggttgacgttttgagaaggctggaggggaaggctgtgggactttggatttttctttcaggtagaggaagccttgttgggctccagagagaggatgagtgatgagcctgtgtcacagacactccacacttgtcagccacttgggatcctcagcttctctagcaggagggtggagggtgggtggggacagcctcctctctgtggtgctgcagatccctggggttctgggttcccagtctcctcttcccttgctgcctgcctctgtctccagctgccccaaggtgtccgtaagccaaggctgcagggcagcagcagagtgctgaaggtttgctctgccagggtgtgtgagagagagagagagtgtgtgtgtgcgtgcgcgtgcgcgtgcgcgcgactataaagcaatccccatatctggtggcttaaagaagaggggagtttgtttctccttcacttctgactgaggtgggtgccccagggcaagtggcttgcggaagatcaggtcatccctccatcttgcccctgtatgcctaagggtgaaggtcaaaaaccttttctctgaaggtgagtgtttcaggttctgtgggccatatggccctgttgtagctactcaactctgtagcgcaaaggtagccagagacagtacagagatgagtgggtgaggctgcattccaataaaactttacttgcacaaacaggctggatttggtccacaggccgtagcttacccatcctgcctggggcatcgcgtttggccatggagattgggtcctaggcaaactcatgctctaggaggaagaggaaggcagggcaagcaatgctgtttttgtagaagccaccggaaattgcaccacttctcatgttcccctggagagaacttcgtgcctacctgccaacaagggaggcttggaaagtcattctgtggccagggccctgttttgtgggggaaggggaggaagcatgctgggagacagagggcagtccctactgctgctctatctccagtggcagctcccttgtccatccctccgcgcggcctgacagcccctcagcctccatctttcccaccccctctactgggcatctcctgcagctcagcccagctctctggcccctgtagcaggggttacctttgcccaccctggagaagctccctcttcaaggagcctcgccacccaaagggcaccttgtctcagagtgtggcttgggctcttaacctgggttgatactggttgagctgtgtgacactgggtgagctttgtgatcttgggccagttacttaactgctctgtgcctctagaacatggggatagctctcgtcgtcacttcctaaggccttgtgcagatgcatgggttacccaggtaaaggaggtggcatggcacatggcacgtggcttgtaatgtggtcgcagagctccccttgtctctgtctgcagcttgctccctgtgccaccattctgacagcccccgcaggtaggcatggttatctatacctcatggactgggaactagaggcacagggaggtgcagtgacttgcccagggccccacagctagaagtgtcagacccagctgtcccccgaggcagcctatgatgtgctgagcgtcgccgacatgtacctgctgccaggcctgaagaggctgtgcggccgcagcctggctcagatgctagacgaggacactgtggtgggtgtgtggcgcgtggccaagctcttccgcctggcgcggcttgaggaccagtgcactgagtacatggccaaggtcattgagaagctggtggagcgggaggacttcgtggaggcggtgaaggaggaggcagcggctgtggcagcccggcaggagacggactctatcccgctggtggacgacatccgcttccacgtggccagcacggtgcagacctacagcgccatagaggaggcgcagcagcgtctgcgggcactcgaggacctgctcgtgtccatcggtctggactgttgagcccctggctgggcagccccaggggccaggagctctcttggagacaagcatgtgtatgcgtttgtgtgcagctcttcttcctgctccctgcacattgagggcttcatggggggtgcgaggggctcagtggggcttctcttccctccatgagcctggagaccccaggggaggatccatttgggatgagccccctccccccaatgcacaagccagcccccaagaccctgggggtggacaccactcagggaaacctggggtgggggtgggctttggtcttagcactttccttctccagatcccccctacccaccccagtcccaaatccagtcctctggcccttgcctagccctgaattgcttctctaagctggtgttcccatgcacagggccattcaggaagggctgggggagtgtgtgtggcaataaagcttgaaggcaccgtgggagcatgagcc

SEQ ID NO: 28016 - DNA, 3826 bp, Homo sapiens
  misc_feature (1)..(1): n is a, c, g, or t
  misc_feature (3)..(4): n is a, c, g, or t
  misc_feature (7)..(7): n is a, c, g, or t
ngnncgnggcggggcggggctgagcgtgtttacatccgccgggtgcgcggcttcgccgcccgaggtcgttcggctcgggtaccatcctccgcgccatggacaccagcgacctgttcgccagctgcaggaagggggatgtgggccgagtgcggtacctgctggagcagcgagacgtggaggtgaatgtgcgggacaagtgggacagcacccccttgtactatgcctgcttgtgtgggcacgaggagctggtactctaccttctggccaatggagcccgctgcgaggccaacaccttcgatggtgagcgctgcctctatggggcactgagtgaccccatccgccgggctctacgcgattacaagcaggtcacggcttcctgcaggaggcgggattactatgacgacttcttgcagcggcttctagagcagggcatccacagtgacgtggtctttgtagtacacgggaagccattccgggtgcatcgctgcgtcctgggtgcacgtagtgcctactttgccaacatgctggacaccaaatggaagggcaagagtgtcgtggttctcaggcacccactgatcaaccccgtggcctttggggccctgctgcagtacctgtacacaggccgcctggacattggcgtagagcatgtgagtgactgtgagcgcctggccaagcaatgccagctgtgggacctgctcagcgacctggaggccaagtgcgagaaggtgtctgagtttgtggcgtctaagccaggcacgtgtgtgaaggtgctgaccatcgagcccccacctgcagacccccgcctccgggaggacatggcgctgctggccgattgtgccctgccccccgagctccgaggtgatctttgggagctgcccttcccttgtcctgacggcttcaacagctgccctgacatctgcttccgagtggctggctgcagcttcctctgccacaaggcctttttctgtggccgcagtgactacttccgagccctgctggatgaccacttccgagagagcgaggagccagcgacctcagggggccccccagccgtcaccctgcatggcatctcacccgacgtcttcactcacgtgctctactacatgtacagcgaccacactgagtgggggctcaggcagagctggggatggcacacaacctgtgctgccgtgggctgagagggagcgccagggccctgggggtctgtggaagggcccagctggccccatggttgacgttttgagaaggctggaggggaaggctgtgggactttggatttttctttcaggtagaggaagccttgttgggctccagagagaggatgagtgatgagcctgtgtcacagacactccacacttgtcagccacttgggatcctcagcttctctagcaggagggtggagggtgggtggggacagcctcctctctgtggtgctgcagatccctggggttctgggttcccagtctcctcttcccttgctgcctgcctctgtctccagctgccccaaggtgtccgtaagccaaggctgcagggcagcagcagagtgctgaaggtttgctctgccagggtgtgtgagagagagagagagtgtgtgtgtgcgtgcgcgtgcgcgtgcgcgcgactataaagcaatccccatatctggtggcttaaagaagaggggagtttgtttctccttcacttctgactgaggtgggtgccccagggcaagtggcttgcggaagatcaggtcatccctccatcttgcccctgtatgcctaagggtgaaggtcaaaaaccttttctctgaaggtgagtgtttcaggttctgtgggccatatggccctgttgtagctactcaactctgtagcgcaaaggtagccagagacagtacagagatgagtgggtgaggctgcattccaataaaactttacttgcacaaacaggctggatttggtccacaggccgtagcttacccatcctgcctggggcatcgcgtttggccatggagattgggtcctaggcaaactcatgctctaggaggaagaggaaggcagggcaagcaatgctgtttttgtagaagccaccggaaattgcaccacttctcatgttcccctggagagaacttcgtgcctacctgccaacaagggaggcttggaaagtcattctgtggccagggccctgttttgtgggggaaggggaggaagcatgctgggagacagagggcagtccctactgctgctctatctccagtggcagctcccttgtccatccctccgcgcggcctgacagcccctcagcctccatctttcccaccccctctactgggcatctcctgcagctcagcccagctctctggcccctgtagcaggggttacctttgcccaccctggagaagctccctcttcaaggagcctcgccacccaaagggcaccttgtctcagagtgtggcttgggctcttaacctgggttgatactggttgagctgtgtgacactgggtgagctttgtgatcttgggccagttacttaactgctctgtgcctctagaacatggggatagctctcgtcgtcacttcctaaggccttgtgcagatgcatgggttacccaggtaaaggaggtggcatggcacatggcacgtggcttgtaatgtggtcgcagagctccccttgtctctgtctgcagcttgctccctgtgccacccaggctctggcctgaatctgagggcttcagtcttatccagcacaggatgtatctgtaggtgggctctgtgtccccacagcctcttgagagggagggagctggtagatagtctcccacccctggcagagtccctgcataggtcttgactagctgcctctgtcccaccattctgacagcccccgcaggtaggcatggttatctatacctcatggactgggaactagaggcacagggaggtgcagtgacttgcccagggccccacagctagaagtgtcagacccagctgtcccccgaggcagcctatgatgtgctgagcgtcgccgacatgtacctgctgccaggcctgaagaggctgtgcggccgcagcctggctcagatgctagacgaggacactgtggtgggtgtgtggcgcgtggccaagctcttccgcctggcgcggcttgaggaccagtgcactgagtacatggccaaggtcattgagaagctggtggagcgggaggacttcgtggaggcggtgaaggaggaggcagcggctgtggcagcccggcaggagacggactctatcccgctggtggacgacatccgcttccacgtggccagcacggtgcagacctacagcgccatagaggaggcgcagcagcgtctgcgggcactcgaggacctgctcgtgtccatcggtctggactgttgagcccctggctgggcagccccaggggccaggagctctcttggagacaagcatgtgtatgcgtttgtgtgcagctcttcttcctgctccctgcacattgagggcttcatggggggtgcgaggggctcagtggggcttctcttccctccatgagcctggagaccccaggggaggatccatttgggatgagccccctccccccaatgcacaagccagcccccaagaccctgggggtggacaccactcagggaaacctggggtgggggtgggctttggtcttagcactttccttctccagatcccccctacccaccccagtcccaaatccagtcctctggcccttgcctagccctgaattgcttctctaagctggtgttcccatgcacagggccattcaggaagggctgggggagtgtgtgtggcaataaagcttgaaggcaccgtgggagcatgagcc

SEQ ID NO: 28017 - DNA, 3782 bp, Homo sapiens
  misc_feature (1)..(1): n is a, c, g, or t
  misc_feature (3)..(4): n is a, c, g, or t
  misc_feature (7)..(7): n is a, c, g, or t
ngnncgnggcggggcggggctgagcgtgtttacatccgccgggtgcgcggcttcgccgcccgaggtcgttcggctcgggtaccatcctccgcgccatggacaccagcgacctgttcgccagctgcaggaagggggatgtgggccgagtgcggtacctgctggagcagcgagacgtggaggtgaatgtgcgggacaagtgggacagcacccccttgtactatgcctgcttgtgtgggcacgaggagctggtactctaccttctggccaatggagcccgctgcgaggccaacaccttcgatggtgagcgctgcctctatggggcactgagtgaccccatccgccgggctctacgcgattacaagcaggtcacggcttcctgcaggaggcgggattactatgacgacttcttgcagcggcttctagagcagggcatccacagtgacgtggtctttgtagtacacgggaagccattccgggtgcatcgctgcgtcctgggtgcacgtagtgcctactttgccaacatgctggacaccaaatggaagggcaagagtgtcgtggttctcaggcacccactgatcaaccccgtggcctttggggccctgctgcagtacctgtacacaggccgcctggacattggcgtagagcatgtgagtgactgtgagcgcctggccaagcaatgccagctgtgggacctgctcagcgacctggaggccaagtgcgagaaggtgtctgagtttgtcacgtgctctactacatgtacagcgaccacactgagtgggggctcaggcagagctggggatggcacacaacctgtgctgccgtgggctgagagggagcgccagggccctgggggtctgtggaagggcccagctggccccatggttgacgttttgagaaggctggaggggaaggctgtgggactttggatttttctttcaggtagaggaagccttgttgggctccagagagaggatgagtgatgagcctgtgtcacagacactccacacttgtcagccacttgggatcctcagcttctctagcaggagggtggagggtgggtggggacagcctcctctctgtggtgctgcagatccctggggttctgggttcccagtctcctcttcccttgctgcctgcctctgtctccagctgccccaaggtgtccgtaagccaaggctgcagggcagcagcagagtgctgaaggtttgctctgccagggtgtgtgagagagagagagagtgtgtgtgtgcgtgcgcgtgcgcgtgcgcgcgactataaagcaatccccatatctggtggcttaaagaagaggggagtttgtttctccttcacttctgactgaggtgggtgccccagggcaagtggcttgcggaagatcaggtcatccctccatcttgcccctgtatgcctaagggtgaaggtcaaaaaccttttctctgaaggtgagtgtttcaggttctgtgggccatatggccctgttgtagctactcaactctgtagcgcaaaggtagccagagacagtacagagatgagtgggtgaggctgcattccaataaaactttacttgcacaaacaggctggatttggtccacaggccgtagcttacccatcctgcctggggcatcgcgtttggccatggagattgggtcctaggcaaactcatgctctaggaggaagaggaaggcagggcaagcaatgctgtttttgtagaagccaccggaaattgcaccacttctcatgttcccctggagagaacttcgtgcctacctgccaacaagggaggcttggaaagtcattctgtggccagggccctgttttgtgggggaaggggaggaagcatgctgggagacagagggcagtccctactgctgctctatctccagtggcagctcccttgtccatccctccgcgcggcctgacagcccctcagcctccatctttcccaccccctctactgggcatctcctgcagctcagcccagctctctggcccctgtagcaggggttacctttgcccaccctggagaagctccctcttcaaggagcctcgccacccaaagggcaccttgtctcagagtgtggcttgggctcttaacctgggttgatactggttgagctgtgtgacactgggtgagctttgtgatcttgggccagttacttaactgctctgtgcctctagaacatggggatagctctcgtcgtcacttcctaaggccttgtgcagatgcatgggttacccaggtaaaggaggtggcatggcacatggcacgtggcttgtaatgtggtcgcagagctccccttgtctctgtctgcagcttgctccctgtgccacccaggctctggcctgaatctgagggcttcagtcttatccagcacaggatgtatctgtaggtgggctctgtgtccccacagcctcttgagagggagggagctggtagatagtctcccacccctggcagagtccctgcataggtcttgactagctgcctctgtcccaccattctgacagcccccgcaggtaggcatggttatctatacctcatggactgggaactagaggcacagggaggtgcagtgacttgcccagggccccacagctagaagtgtcagacccaggtctgtataactcggagctcagaccctggctcctgcgagggccctgcctcccgcctgccctgccagcctgctcagggcatgggagaaccccccagtcttctgccccctagcggtcctgcagatccctgtgggaatctgggccagccccccgacccccaaccccatacatgcgcagggagctcctactcccactggaagccttcccgccagtgccccccaaccaccacaggccctagccttggctgttgtgccctgggagcccttggtgacctcggggggcaccttcatccctgtcttcactgcagctgtcccccgaggcagcctatgatgtgctgagcgtcgccgacatgtacctgctgccaggcctgaagaggctgtgcggccgcagcctggctcagatgctagacgaggacactgtggtgggtgtgtggcgcgtggccaagctcttccgcctggcgcggcttgaggaccagtgcactgagtacatggccaaggtcattgagaagctggtggagcgggaggacttcgtggaggcggtgaaggaggaggcagcggctgtggcagcccggcaggagacggactctatcccgctggtggacgacatccgcttccacgtggccagcacggtgcagacctacagcgccatagaggaggcgcagcagcgtctgcgggcactcgaggacctgctcgtgtccatcggtctggactgttgagcccctggctgggcagccccaggggccaggagctctcttggagacaagcatgtgtatgcgtttgtgtgcagctcttcttcctgctccctgcacattgagggcttcatggggggtgcgaggggctcagtggggcttctcttccctccatgagcctggagaccccaggggaggatccatttgggatgagccccctccccccaatgcacaagccagcccccaagaccctgggggtggacaccactcagggaaacctggggtgggggtgggctttggtcttagcactttccttctccagatcccccctacccaccccagtcccaaatccagtcctctggcccttgcctagccctgaattgcttctctaagctggtgttcccatgcacagggccattcaggaagggctgggggagtgtgtgtggcaataaagcttgaaggcaccgtgggagcatgagcc

SEQ ID NO: 28018 - DNA, 2726 bp, Homo sapiens
gccatggtacggtccgagagcgttagatctgcagatccctggggttctgggttcccagtctcctcttcccttgctgcctgcctctgtctccagctgccccaaggtgtccgtaagccaaggctgcagggcagcagcagagtgctgaaggtttgctctgccagggtgtgtgagagagagagagagtgtgtgtgtgcgtgcgcgtgcgcgtgcgcgcgactataaagcaatccccatatctggtggcttaaagaagaggggagtttgtttctccttcacttctgactgaggtgggtgccccagggcaagtggcttgcggaagatcaggtcatccctccatcttgcccctgtatgcctaagggtgaaggtcaaaaaccttttctctgaaggtgagtgtttcaggttctgtgggccatatggccctgttgtagctactcaactctgtagcgcaaaggtagccagagacagtacagagatgagtgggtgaggctgcattccaataaaactttacttgcacaaacaggctggatttggtccacaggccgtagcttacccatcctgcctggggcatcgcgtttggccatggagattgggtcctaggcaaactcatgctctaggaggaagaggaaggcagggcaagcaatgctgtttttgtagaagccaccggaaattgcaccacttctcatgttcccctggagagaacttcgtgcctacctgccaacaagggaggcttggaaagtcattctgtggccagggccctgttttgtgggggaaggggaggaagcatgctgggagacagagggcagtccctactgctgctctatctccagtggcagctcccttgtccatccctccgcgcggcctgacagcccctcagcctccatctttcccaccccctctactgggcatctcctgcagctcagcccagctctctggcccctgtagcaggggttacctttgcccaccctggagaagctccctcttcaaggagcctcgccacccaaagggcaccttgtctcagagtgtggcttgggctcttaacctgggttgatactggttgagctgtgtgacactgggtgagctttgtgatcttgggccagttacttaactgctctgtgcctctagaacatggggatagctctcgtcgtcacttcctaaggccttgtgcagatgcatgggttacccaggtaaaggaggtggcatggcacatggcacgtggcttgtaatgtggtcgcagagctccccttgtctctgtctgcagcttgctccctgtgccacccaggctctggcctgaatctgagggcttcagtcttatccagcacaggatgtatctgtaggtgggctctgtgtccccacagcctcttgagagggagggagctggtagatagtctcccacccctggcagagtccctgcataggtcttgactagctgcctctgtcccaccattctgacagcccccgcaggtaggcatggttatctatacctcatggactgggaactagaggcacagggaggtgcagtgacttgcccagggccccacagctagaagtgtcagacccaggtctgtataactcggagctcagaccctggctcctgcgagggccctgcctcccgcctgccctgccagcctgctcagggcatgggagaaccccccagtcttctgccccctagcggtcctgcagatccctgtgggaatctgggccagccccccgacccccaaccccatacatgcgcagggagctcctactcccactggaagccttcccgccagtgccccccaaccaccacaggccctagccttggctgttgtgccctgggagcccttggtgacctcggggggcaccttcatccctgtcttcactgcagctgtcccccgaggcagcctatgatgtgctgagcgtcgccgacatgtacctgctgccaggcctgaagaggctgtgcggccgcagcctggctcagatgctagacgaggacactgtggtgggtgtgtggcgcgtggccaagctcttccgcctggcgcggcttgaggaccagtgcactgagtacatggccaaggtcattgagaagctggtggagcgggaggacttcgtggaggcggtgaaggaggaggcagcggctgtggcagcccggcaggagacggactctatcccgctggtggacgacatccgcttccacgtggccagcacggtgcagacctacagcgccatagaggaggcgcagcagcgtctgcgggcactcgaggacctgctcgtgtccatcggtctggactgttgagcccctggctgggcagccccaggggccaggagctctcttggagacaagcatgtgtatgcgtttgtgtgcagctcttcttcctgctccctgcacattgagggcttcatggggggtgcgaggggctcagtggggcttctcttccctccatgagcctggagaccccaggggaggatccatttgggatgagccccctccccccaatgcacaagccagcccccaagaccctgggggtggacaccactcagggaaacctggggtgggggtgggctttggtcttagcactttccttctccagatcccccctacccaccccagtcccaaatccagtcctctggcccttgcctagccctgaattgcttctctaagctggtgttcccatgcacagggccattcaggaagggctgggggagtgtgtgtggcaataaagcttgaaggcaccgtgggagcatgagcc

SEQ ID NO: 28019 - DNA, 3036 bp, Homo sapiens
ggctggtactggtccggagattttaaggatgggggctcaggcagagctggggatggcacacaacctgtgctgccgtgggctgagagggagcgccagggccctgggggtctgtggaagggcccagctggccccatggttgacgttttgagaaggctggaggggaaggctgtgggactttggatttttctttcaggtagaggaagccttgttgggctccagagagaggatgagtgatgagcctgtgtcacagacactccacacttgtcagccacttgggatcctcagcttctctagcaggagggtggagggtgggtggggacagcctcctctctgtggtgctgcagatccctggggttctgggttcccagtctcctcttcccttgctgcctgcctctgtctccagctgccccaaggtgtccgtaagccaaggctgcagggcagcagcagagtgctgaaggtttgctctgccagggtgtgtgagagagagagagagtgtgtgtgtgcgtgcgcgtgcgcgtgcgcgcgactataaagcaatccccatatctggtggcttaaagaagaggggagtttgtttctccttcacttctgactgaggtgggtgccccagggcaagtggcttgcggaagatcaggtcatccctccatcttgcccctgtatgcctaagggtgaaggtcaaaaaccttttctctgaaggtgagtgtttcaggttctgtgggccatatggccctgttgtagctactcaactctgtagcgcaaaggtagccagagacagtacagagatgagtgggtgaggctgcattccaataaaactttacttgcacaaacaggctggatttggtccacaggccgtagcttacccatcctgcctggggcatcgcgtttggccatggagattgggtcctaggcaaactcatgctctaggaggaagaggaaggcagggcaagcaatgctgtttttgtagaagccaccggaaattgcaccacttctcatgttcccctggagagaacttcgtgcctacctgccaacaagggaggcttggaaagtcattctgtggccagggccctgttttgtgggggaaggggaggaagcatgctgggagacagagggcagtccctactgctgctctatctccagtggcagctcccttgtccatccctccgcgcggcctgacagcccctcagcctccatctttcccaccccctctactgggcatctcctgcagctcagcccagctctctggcccctgtagcaggggttacctttgcccaccctggagaagctccctcttcaaggagcctcgccacccaaagggcaccttgtctcagagtgtggcttgggctcttaacctgggttgatactggttgagctgtgtgacactgggtgagctttgtgatcttgggccagttacttaactgctctgtgcctctagaacatggggatagctctcgtcgtcacttcctaaggccttgtgcagatgcatgggttacccaggtaaaggaggtggcatggcacatggcacgtggcttgtaatgtggtcgcagagctccccttgtctctgtctgcagcttgctccctgtgccacccaggctctggcctgaatctgagggcttcagtcttatccagcacaggatgtatctgtaggtgggctctgtgtccccacagcctcttgagagggagggagctggtagatagtctcccacccctggcagagtccctgcataggtcttgactagctgcctctgtcccaccattctgacagcccccgcaggtaggcatggttatctatacctcatggactgggaactagaggcacagggaggtgcagtgacttgcccagggccccacagctagaagtgtcagacccaggtctgtataactcggagctcagaccctggctcctgcgagggccctgcctcccgcctgccctgccagcctgctcagggcatgggagaaccccccagtcttctgccccctagcggtcctgcagatccctgtgggaatctgggccagccccccgacccccaaccccatacatgcgcagggagctcctactcccactggaagccttcccgccagtgccccccaaccaccacaggccctagccttggctgttgtgccctgggagcccttggtgacctcggggggcaccttcatccctgtcttcactgcagctgtcccccgaggcagcctatgatgtgctgagcgtcgccgacatgtacctgctgccaggcctgaagaggctgtgcggccgcagcctggctcagatgctagacgaggacactgtggtgggtgtgtggcgcgtggccaagctcttccgcctggcgcggcttgaggaccagtgcactgagtacatggccaaggtcattgagaagctggtggagcgggaggacttcgtggaggcggtgaaggaggaggcagcggctgtggcagcccggcaggagacggactctatcccgctggtggacgacatccgcttccacgtggccagcacggtgcagacctacagcgccatagaggaggcgcagcagcgtctgcgggcactcgaggacctgctcgtgtccatcggtctggactgttgagcccctggctgggcagccccaggggccaggagctctcttggagacaagcatgtgtatgcgtttgtgtgcagctcttcttcctgctccctgcacattgagggcttcatggggggtgcgaggggctcagtggggcttctcttccctccatgagcctggagaccccaggggaggatccatttgggatgagccccctccccccaatgcacaagccagcccccaagaccctgggggtggacaccactcagggaaacctggggtgggggtgggctttggtcttagcactttccttctccagatcccccctacccaccccagtcccaaatccagtcctctggcccttgcctagccctgaattgcttctctaagctggtgttcccatgcacagggccattcaggaagggctgggggagtgtgtgtggcaataaagcttgaaggcaccgtgggagcatgagcc

SEQ ID NO: 28020 - DNA, 2098 bp, Homo sapiens
  misc_feature (1)..(1): n is a, c, g, or t
  misc_feature (3)..(4): n is a, c, g, or t
  misc_feature (7)..(7): n is a, c, g, or t
ngnncgnggcggggcggggctgagcgtgtttacatccgccgggtgcgcggcttcgccgcccgaggtcgttcggctcgggtaccatcctccgcgccatggacaccagcgacctgttcgccagctgcaggaagggggatgtgggccgagtgcggtacctgctggagcagcgagacgtggaggtgaatgtgcgggacaagtgggacagcacccccttgtactatgcctgcttgtgtgggcacgaggagctggtactctaccttctggccaatggagcccgctgcgaggccaacaccttcgatggtgagcgctgcctctatggggcactgagtgaccccatccgccgggctctacgcgattacaagcaggtcacggcttcctgcaggaggcgggattactatgacgacttcttgcagcggcttctagagcagggcatccacagtgacgtggtctttgtagtacacgggaagccattccgggtgcatcgctgcgtcctgggtgcacgtagtgcctactttgccaacatgctggacaccaaatggaagggcaagagtgtcgtggttctcaggcacccactgatcaaccccgtggcctttggggccctgctgcagtacctgtacacaggccgcctggacattggcgtagagcatgtgagtgactgtgagcgcctggccaagcaatgccagctgtgggacctgctcagcgacctggaggccaagtgcgagaaggtgtctgagtttgtggcgtctaagccaggcacgtgtgtgaaggtgctgaccatcgagcccccacctgcagacccccgcctccgggaggacatggcgctgctggccgattgtgccctgccccccgagctccgaggtgatctttgggagctgcccttcccttgtcctgacggcttcaacagctgccctgacatctgcttccgagtggctggctgcagcttcctctgccacaagtgcctgtgccctcctgttgcccctggccccagcccgttgccctgagcccccgtctagctcctcaggagacagaccctggccctcacacttcctgagcccggcctcccccagggcctttttctgtggccgcagtgactacttccgagccctgctggatgaccacttccgagagagcgaggagccagcgacctcagggggccccccagccgtcaccctgcatggcatctcacccgacgtcttcactcacgtgctctactacatgtacagcgaccacactgagctgtcccccgaggcagcctatgatgtgctgagcgtcgccgacatgtacctgctgccaggcctgaagaggctgtgcggccgcagcctggctcagatgctagacgaggacactgtggtgggtgtgtggcgcgtggccaagctcttccgcctggcgcggcttgaggaccagtgcactgagtacatggccaaggtcattgagaagctggtggagcgggaggacttcgtggaggcggtgaaggaggaggcagcggctgtggcagcccggcaggagacggactctatcccgctggtggacgacatccgcttccacgtggccagcacggtgcagacctacagcgccatagaggaggcgcagcagcgtctgcgggcactcgaggacctgctcgtgtccatcggtctggactgttgagcccctggctgggcagccccaggggccaggagctctcttggagacaagcatgtgtatgcgtttgtgtgcagctcttcttcctgctccctgcacattgagggcttcatggggggtgcgaggggctcagtggggcttctcttccctccatgagcctggagaccccaggggaggatccatttgggatgagccccctccccccaatgcacaagccagcccccaagaccctgggggtggacaccactcagggaaacctggggtgggggtgggctttggtcttagcactttccttctccagatcccccctacccaccccagtcccaaatccagtcctctggcccttgcctagccctgaattgcttctctaagctggtgttcccatgcacagggccattcaggaagggctgggggagtgtgtgtggcaataaagcttgaaggcaccgtgggagcatgagcc

SEQ ID NO: 28021 - DNA, 2072 bp, Homo sapiens
  misc_feature (1)..(1): n is a, c, g, or t
  misc_feature (3)..(4): n is a, c, g, or t
  misc_feature (7)..(7): n is a, c, g, or t
ngnncgnggcggggcggggctgagcgtgtttacatccgccgggtgcgcggcttcgccgcccgaggtcgttcggctcgggtaccatcctccgcgccatggacaccagcgacctgttcgccagctgcaggaagggggatgtgggccgagtgcggtacctgctggagcagcgagacgtggaggtgaatgtgcgggacaagtgggacagcacccccttgtactatgcctgcttgtgtgggcacgaggagctggtactctaccttctggccaatggagcccgctgcgaggccaacaccttcgatggtgagcgctgcctctatggggcactgagtgaccccatccgccgggctctacgcgattacaagcaggtcacggcttcctgcaggaggcgggattactatgacgacttcttgcagcggcttctagagcagggcatccacagtgacgtggtctttgtagtacacgggaagccattccgggtgcatcgctgcgtcctgggtgcacgtagtgcctactttgccaacatgctggacaccaaatggaagggcaagagtgtcgtggttctcaggcacccactgatcaaccccgtggcctttggggccctgctgcagtacctgtacacaggccgcctggacattggcgtagagcatgtgagtgactgtgagcgcctggccaagcaatgccagctgtgggacctgctcagcgacctggaggccaagtgcgagaaggtgtctgagtttgtggcgtctaagccaggcacgtgtgtgaaggtgctgaccatcgagcccccacctgcagacccccgcctccgggaggacatggcgctgctggccgattgtgccctgccccccgagctccgaggtgatctttgggagctgcccttcccttgtcctgacggcttcaacagctgccctgacatctgcttccgagtggctggctgcagcttcctctgccacaaggcctttttctgtggccgcagtgactacttccgagccctgctggatgaccacttccgagagagcgaggagccagcgacctcagggggccccccagccgtcaccctgcatggcatctcacccgacgtcttcactcacgtgctctactacatgtacagcgaccacactgagctgtcccccgaggcagcctatgatgtgctgagcgtcgccgacatgtacctgctgccaggcctgaagaggctgtgcggccgcagcctggctcagatgctagacgaggacactgtggtgggtgtgtggcgcgtggccaagctcttccgcctggcgcggcttgaggaccagtgcactgagtacatggccaaggtcattgagaagaaggtgggccagtggtctgcagtgggtgggaaggaggggtgagagggcaggcacccctccactgagctggcccttcccgctcatagctggtggagcgggaggacttcgtggaggcggtgaaggaggaggcagcggctgtggcagcccggcaggagacggactctatcccgctggtggacgacatccgcttccacgtggccagcacggtgcagacctacagcgccatagaggaggcgcagcagcgtctgcgggcactcgaggacctgctcgtgtccatcggtctggactgttgagcccctggctgggcagccccaggggccaggagctctcttggagacaagcatgtgtatgcgtttgtgtgcagctcttcttcctgctccctgcacattgagggcttcatggggggtgcgaggggctcagtggggcttctcttccctccatgagcctggagaccccaggggaggatccatttgggatgagccccctccccccaatgcacaagccagcccccaagaccctgggggtggacaccactcagggaaacctggggtgggggtgggctttggtcttagcactttccttctccagatcccccctacccaccccagtcccaaatccagtcctctggcccttgcctagccctgaattgcttctctaagctggtgttcccatgcacagggccattcaggaagggctgggggagtgtgtgtggcaataaagcttgaaggcaccgtgggagcatgagcc

SEQ ID NO: 28022 - DNA, 2193 bp, Homo sapiens
  misc_feature (1)..(1): n is a, c, g, or t
  misc_feature (3)..(4): n is a, c, g, or t
  misc_feature (7)..(7): n is a, c, g, or t
ngnncgnggcggggcggggctgagcgtgtttacatccgccgggtgcgcggcttcgccgcccgaggtcgttcggctcgggtaccatcctccgcgccatggacaccagcgacctgttcgccagctgcaggaagggggatgtgggccgagtgcgaccatgaacccgtcctgacccaggctctgacctccttcctgcccaggtacctgctggagcagcgagacgtggaggtactatgcctgcttgtgtgggcacgaggagctggtactctaccttctggccaatggagcccgctgcgaggccaacaccttcgatggtgagcgctgcctctatggggcactgagtgaccccatccgccgggctctacgcgattacaagcaggtcacggcttcctgcaggaggcgggattactatgacgacttcttgcagcggcttctagagcagggcatccacagtgacgtggtctttgtagtacacgggaagccattccgggtgcatcgctgcgtcctgggtgcacgtagtgcctactttgccaacatgctggacaccaaatggaagggcaagagtgtcgtggttctcaggcacccactgatcaaccccgtggcctttggggccctgctgcagtacctgtacacaggccgcctggacattggcgtagagcatgtgagtgactgtgagcgcctggccaagcaatgccagctgtgggacctgctcagcgacctggaggccaagtgcgagaaggtgtctgagtttggtgcgagcagggtttggggcccggggccatgggtgcggcctggcagggctggcctggctccctgaagttgttcttcccctgtagtggcgtctaagccaggcacgtgtgtgaaggtgctgaccatcgagcccccacctgcagacccccgcctccgggaggacatggcgctgctggccgattgtgccctgccccccgagctccgaggtgatctttgggagctgcccttcccttgtcctgacggcttcaacagctgccctgacatctgcttccgagtggctggctgcagcttcctctgccacaagtgcctgtgccctcctgttgcccctggccccagcccgttgccctgagcccccgtctagctcctcaggagacagaccctggccctcacacttcctgagcccggcctcccccagggcctttttctgtggccgcagtgactacttccgagccctgctggatgaccacttccgagagagcgaggagccagcgacctcagggggccccccagccgtcaccctgcatggcatctcacccgacgtcttcactcacgtgctctactacatgtacagcgaccacactgagctgtcccccgaggcagcctatgatgtgctgagcgtcgccgacatgtacctgctgccaggcctgaagaggctgtgcggccgcagcctggctcagatgctagacgaggacactgtggtgggtgtgtggcgcgtggccaagctcttccgcctggcgcggcttgaggaccagtgcactgagtacatggccaaggtcattgagaagctggtggagcgggaggacttcgtggaggcggtgaaggaggaggcagcggctgtggcagcccggcaggagacggactctatcccgctggtggacgacatccgcttccacgtggccagcacggtgcagacctacagcgccatagaggaggcgcagcagcgtctgcgggcactcgaggacctgctcgtgtccatcggtctggactgttgagcccctggctgggcagccccaggggccaggagctctcttggagacaagcatgtgtatgcgtttgtgtgcagctcttcttcctgctccctgcacattgagggcttcatggggggtgcgaggggctcagtggggcttctcttccctccatgagcctggagaccccaggggaggatccatttgggatgagccccctccccccaatgcacaagccagcccccaagaccctgggggtggacaccactcagggaaacctggggtgggggtgggctttggtcttagcactttccttctccagatcccccctacccaccccagtcccaaatccagtcctctggcccttgcctagccctgaattgcttctctaagctggtgttcccatgcacagggccattcaggaagggctgggggagtgtgtgtggcaataaagcttgaaggcaccgtgggagcatgagcc

SEQ ID NO: 28023 - DNA, 2114 bp, Homo sapiens
gtactcccgtagcctccctgggccgctccctgacatcccgtgccactcaagagttagtgcatagtgtcaacgctgagtgggttcacagcacttccaggtgcagcctggaggcctcctttgggctgcccccgcctcagtggggctacattagcattggcgactcccctcgctcaccttccgcatcccatcagttgctgtatcccgcgactcctgcctcctagaattgtgtgccctccacaccatcaggaggcctgcagcagctttttcccgggctccctgcttctaacagggccagcttcttcctgcagtagagagctctggtgggagtgaaggctccatcacctcctctcccaaacgctgaaaggccaaaggtccagcctcggcactggctctggcttctgtccctgtagcccatcgtcccccagcactgatagcacacagtgtctgcctgttcgaccccacctccacatccttgcctgcactttgccttgagtgcctctcctgctctggtctgcctgtcacctgccctcacctgggggaggcttccccataccaaaagggatgttttctctccgttcctttccacgggccttctttctcagaccatgaacccgtcctgacccaggctctgacctccttcctgcccaggtacctgctggagcagcgagacgtggaggtactatgcctgcttgtgtgggcacgaggagctggtactctaccttctggccaatggagcccgctgcgaggccaacaccttcgatggtgagcgctgcctctatggggcactgagtgaccccatccgccgggctctacgcgattacaagcaggtcacggcttcctgcaggaggcgggattactatgacgacttcttgcagcggcttctagagcagggcatccacagtgacgtggtctttgtagtacacgggaagccattccgggtgcatcgctgcgtcctgggtgcacgtagtgcctactttgccaacatgctggacaccaaatggaagggcaagagtgtcgtggttctcaggcacccactgatcaaccccgtggcctttggggccctgctgcagtacctgtacacagggcctttttctgtggccgcagtgactacttccgagccctgctggatgaccacttccgagagagcgaggagccagcgacctcagggggccccccagccgtcaccctgcatggcatctcacccgacgtcttcactcacgtgctctactacatgtacagcgaccacactgagctgtcccccgaggcagcctatgatgtgctgagcgtcgccgacatgtacctgctgccaggcctgaagaggctgtgcggccgcagcctggctcagatgctagacgaggacactgtggtgggtgtgtggcgcgtggccaagctcttccgcctggcgcggcttgaggaccagtgcactgagtacatggccaaggtcattgagaagctggtggagcgggaggacttcgtggaggcggtgaaggaggaggcagcggctgtggcagcccggcaggagacggactctatcccgctggtggacgacatccgcttccacgtggccagcacggtgcagacctacagcgccatagaggaggcgcagcagcgtctgcgggcactcgaggacctgctcgtgtccatcggtctggactgttgagcccctggctgggcagccccaggggccaggagctctcttggagacaagcatgtgtatgcgtttgtgtgcagctcttcttcctgctccctgcacattgagggcttcatggggggtgcgaggggctcagtggggcttctcttccctccatgagcctggagaccccaggggaggatccatttgggatgagccccctccccccaatgcacaagccagcccccaagaccctgggggtggacaccactcagggaaacctggggtgggggtgggctttggtcttagcactttccttctccagatcccccctacccaccccagtcccaaatccagtcctctggcccttgcctagccctgaattgcttctctaagctggtgttcccatgcacagggccattcaggaagggctgggggagtgtgtgtggcaataaagcttgaaggcaccgtgggagcatgagcc

SEQ ID NO: 28024 - DNA, 1912 bp, Homo sapiens
  misc_feature (1)..(1): n is a, c, g, or t
  misc_feature (3)..(4): n is a, c, g, or t
  misc_feature (7)..(7): n is a, c, g, or t
ngnncgnggcggggcggggctgagcgtgtttacatccgccgggtgcgcggcttcgccgcccgaggtcgttcggctcgggtaccatcctccgcgccatggacaccagcgacctgttcgccagctgcaggaagggggatgtgggccgagtgcgaccatgaacccgtcctgacccaggctctgacctccttcctgcccaggtacctgctggagcagcgagacgtggaggtactatgcctgcttgtgtgggcacgaggagctggtactctaccttctggccaatggagcccgctgcgaggccaacaccttcgatggtgagcgctgcctctatggggcactgagtgaccccatccgccgggctctacgcgattacaagcaggtcacggcttcctgcaggaggcgggattactatgacgacttcttgcagcggcttctagagcagggcatccacagtgacgtggtctttgtagtacacgggaagccattccgggtgcatcgctgcgtcctgggtgcacgtagtgcctactttgccaacatgctggacaccaaatggaagggcaagagtgtcgtggttctcaggcacccactgatcaaccccgtggcctttggggccctgctgcagtacctgtacacaggccgcctggacattggcgtagagcatgtgagtgactgtgagcgcctggccaagcaatgccagctgtgggacctgctcagcgacctggaggccaagtgcgagaaggtgtctgagtttggtgcgagcagggtttggggcccggggccatgggtgcggcctggcagggctggcctggctccctgaagttgttcttcccctgtagtggcgtctaagccaggcacgtgtgtgaaggtgctgaccatcgagcccccacctgcagacccccgcctccgggaggacatggcgctgctggccgattgtgccctgccccccgagctccgaggtgatctttgggagctgcccttcccttgtcctgacggcttcaacagctgccctgacatctgcttccgagtggctggctgcagcttcctctgccacaactgtcccccgaggcagcctatgatgtgctgagcgtcgccgacatgtacctgctgccaggcctgaagaggctgtgcggccgcagcctggctcagatgctagacgaggacactgtggtgggtgtgtggcgcgtggccaagctcttccgcctggcgcggcttgaggaccagtgcactgagtacatggccaaggtcattgagaagctggtggagcgggaggacttcgtggaggcggtgaaggaggaggcagcggctgtggcagcccggcaggagacggactctatcccgctggtggacgacatccgcttccacgtggccagcacggtgcagacctacagcgccatagaggaggcgcagcagcgtctgcgggcactcgaggacctgctcgtgtccatcggtctggactgttgagcccctggctgggcagccccaggggccaggagctctcttggagacaagcatgtgtatgcgtttgtgtgcagctcttcttcctgctccctgcacattgagggcttcatggggggtgcgaggggctcagtggggcttctcttccctccatgagcctggagaccccaggggaggatccatttgggatgagccccctccccccaatgcacaagccagcccccaagaccctgggggtggacaccactcagggaaacctggggtgggggtgggctttggtcttagcactttccttctccagatcccccctacccaccccagtcccaaatccagtcctctggcccttgcctagccctgaattgcttctctaagctggtgttcccatgcacagggccattcaggaagggctgggggagtgtgtgtggcaataaagcttgaaggcaccgtgggagcatgagcc

SEQ ID NO: 28025 - DNA, 342 bp, Homo sapiens
ttggggcccggggccatgggtgcggcctggcagggctggcctggctccctgaagttgttcttcccctgtagtggcgtctaagccaggcacgtgtgtgaaggtgctgaccatcgagcccccacctgcagacccccgcctccgggaggacatggcgctgctggccgattgtgccctgccccccgagctccgagtaagtgcggggctggtgggcaggaagggcgttttgggatggcaggccgtgacaggcagcccagatacttgggctcaattccttgtgtggtcctggaccagttacttcccttttctgaacctagtcgttcacttctgtgaacaactgctctg

SEQ ID NO: 28026 - DNA, 1997 bp, Homo sapiens
  misc_feature (1)..(1): n is a, c, g, or t
  misc_feature (3)..(4): n is a, c, g, or t
  misc_feature (7)..(7): n is a, c, g, or t
ngnncgnggcggggcggggctgagcgtgtttacatccgccgggtgcgcggcttcgccgcccgaggtcgttcggctcgggtaccatcctccgcgccatggacaccagcgacctgttcgccagctgcaggaagggggatgtgggccgagtgcgaccatgaacccgtcctgacccaggctctgacctccttcctgcccaggtacctgctggagcagcgagacgtggaggtactatgcctgcttgtgtgggcacgaggagctggtactctaccttctggccaatggagcccgctgcgaggccaacaccttcgatggtgagcgctgcctctatggggcactgagtgaccccatccgccgggctctacgcgattacaagcaggtcacggcttcctgcaggaggcgggattactatgacgacttcttgcagcggcttctagagcagggcatccacagtgacgtggtctttgtagtacacgggaagccattccgggtgcatcgctgcgtcctgggtgcacgtagtgcctactttgccaacatgctggacaccaaatggaagggcaagagtgtcgtggttctcaggcacccactgatcaaccccgtggcctttggggccctgctgcagtacctgtacacaggccgcctggacattggcgtagagcatgtgagtgactgtgagcgcctggccaagcaatgccagctgtgggacctgctcagcgacctggaggccaagtgcgagaaggtgtctgagtttgtggcgtctaagccaggcacgtgtgtgaaggtgctgaccatcgagcccccacctgcagacccccgcctccgggaggacatggcgctgctggccgattgtgccctgccccccgagctccgaggtgatctttgggagctgcccttcccttgtcctgacggcttcaacagctgccctgacatctgcttccgagtggctggctgcagcttcctctgccacaaggcctttttctgtggccgcagtgactacttccgagccctgctggatgaccacttccgagagagcgaggagccagcgacctcagggggccccccagccgtcaccctgcatggcatctcacccgacgtcttcactcacgtgctctactacatgtacagcgaccacactgagctgtcccccgaggcagcctatgatgtgctgagcgtcgccgacatgtacctgctgccaggcctgaagaggctgtgcggccgcagcctggctcagatgctagacgaggacactgtggtgggtgtgtggcgcgtggccaagctcttccgcctggcgcggcttgaggaccagtgcactgagtacatggccaaggtcattgagaagctggtggagcgggaggacttcgtggaggcggtgaaggaggaggcagcggctgtggcagcccggcaggagacggactctatcccgctggtggacgacatccgcttccacgtggccagcacggtgcagacctacagcgccatagaggaggcgcagcagcgtctgcgggcactcgaggacctgctcgtgtccatcggtctggactgttgagcccctggctgggcagccccaggggccaggagctctcttggagacaagcatgtgtatgcgtttgtgtgcagctcttcttcctgctccctgcacattgagggcttcatggggggtgcgaggggctcagtggggcttctcttccctccatgagcctggagaccccaggggaggatccatttgggatgagccccctccccccaatgcacaagccagcccccaagaccctgggggtggacaccactcagggaaacctggggtgggggtgggctttggtcttagcactttccttctccagatcccccctacccaccccagtcccaaatccagtcctctggcccttgcctagccctgaattgcttctctaagctggtgttcccatgcacagggccattcaggaagggctgggggagtgtgtgtggcaataaagcttgaaggcaccgtgggagcatgagcc

SEQ ID NO: 28027 - DNA, 848 bp, Homo sapiens
  misc_feature (1)..(1): n is a, c, g, or t
  misc_feature (3)..(4): n is a, c, g, or t
  misc_feature (7)..(7): n is a, c, g, or t
ngnncgnggcggggcggggctgagcgtgtttacatccgccgggtgcgcggcttcgccgcccgaggtcgttcggctcgggtaccatcctccgcgccatggacaccagcgacctgttcgccagctgcaggaagggggatgtgggccgagtgcggtacctgctggagcagcgagacgtggaggtgaatgtgcgggacaagtgggacagcacccccttgtactatgcctgcttgtgtgggcacgaggagctggtactctaccttctggccaatggagcccgctgcgaggccaacaccttcgatggtgagcgctgcctctatggggcactgagtgaccccatccgccgggctctacgcgattacaagcaggtcacggcttcctgcaggaggcgggattactatgacgacttcttgcagcggcttctagagcagggcatccacagtgacgtggtctttgtagtacacgggaagccattccgggtgcatcgctgcgtcctgggtgcacgtagtgcctactttgccaacatgctggacaccaaatggaagggcaagagtgtcgtggttctcaggcacccactgatcaaccccgtggcctttggggccctgctgcagtacctgtacacagtgaccccctgggtccagggtaggaggagagggagtgggccgtccttctggacagcagtacacctaggtgtggctgggctgacctttcacctctagacacttcatggtccccccggggtggttccagctgcctctcgggttgggttgcaagagagaggactagtgtgcctgctcaggaagagcttgtcccacccacatgctgaggccctcccatctgttccctggggc

SEQ ID NO: 28028 - DNA, 1888 bp, Homo sapiens
  misc_feature (1)..(1): n is a, c, g, or t
  misc_feature (3)..(4): n is a, c, g, or t
  misc_feature (7)..(7): n is a, c, g, or t
ngnncgnggcggggcggggctgagcgtgtttacatccgccgggtgcgcggcttcgccgcccgaggtcgttcggctcgggtaccatcctccgcgccatggacaccagcgacctgttcgccagctgcaggaagggggatgtgggccgagtgcggtacctgctggagcagcgagacgtggaggtgaatgtgcgggacaagtgggacagcacccccttgtactatgcctgcttgtgtgggcacgaggagctggtactctaccttctggccaatggagcccgctgcgaggccaacaccttcgatggtgagcgctgcctctatggggcactgagtgaccccatccgccgggctctacgcgattacaagcaggtcacggcttcctgcaggaggcgggattactatgacgacttcttgcagcggcttctagagcagggcatccacagtgacgtggtctttgtagtacacgggaagccattccgggtgcatcgctgcgtcctgggtgcacgtagtgcctactttgccaacatgctggacaccaaatggaagggcaagagtgtcgtggttctcaggcacccactgatcaaccccgtggcctttggggccctgctgcagtacctgtacacaggccgcctggacattggcgtagagcatgtgagtgactgtgagcgcctggccaagcaatgccagctgtgggacctgctcagcgacctggaggccaagtgcgagaaggtgtctgagtttgtggcgtctaagccaggcacgtgtgtgaaggtgctgaccatcgagcccccacctgcagacccccgcctccgggaggacatggcgctgctggccgattgtgccctgccccccgagctccgaggcctttttctgtggccgcagtgactacttccgagccctgctggatgaccacttccgagagagcgaggagccagcgacctcagggggccccccagccgtcaccctgcatggcatctcacccgacgtcttcactcacgtgctctactacatgtacagcgaccacactgagctgtcccccgaggcagcctatgatgtgctgagcgtcgccgacatgtacctgctgccaggcctgaagaggctgtgcggccgcagcctggctcagatgctagacgaggacactgtggtgggtgtgtggcgcgtggccaagctcttccgcctggcgcggcttgaggaccagtgcactgagtacatggccaaggtcattgagaagctggtggagcgggaggacttcgtggaggcggtgaaggaggaggcagcggctgtggcagcccggcaggagacggactctatcccgctggtggacgacatccgcttccacgtggccagcacggtgcagacctacagcgccatagaggaggcgcagcagcgtctgcgggcactcgaggacctgctcgtgtccatcggtctggactgttgagcccctggctgggcagccccaggggccaggagctctcttggagacaagcatgtgtatgcgtttgtgtgcagctcttcttcctgctccctgcacattgagggcttcatggggggtgcgaggggctcagtggggcttctcttccctccatgagcctggagaccccaggggaggatccatttgggatgagccccctccccccaatgcacaagccagcccccaagaccctgggggtggacaccactcagggaaacctggggtgggggtgggctttggtcttagcactttccttctccagatcccccctacccaccccagtcccaaatccagtcctctggcccttgcctagccctgaattgcttctctaagctggtgttcccatgcacagggccattcaggaagggctgggggagtgtgtgtggcaataaagcttgaaggcaccgtgggagcatgagcc

SEQ ID NO: 28029 - DNA, 1637 bp, Homo sapiens
  misc_feature (1)..(1): n is a, c, g, or t
  misc_feature (3)..(4): n is a, c, g, or t
  misc_feature (7)..(7): n is a, c, g, or t
ngnncgnggcggggcggggctgagcgtgtttacatccgccgggtgcgcggcttcgccgcccgaggtcgttcggctcgggtaccatcctccgcgccatggacaccagcgacctgttcgccagctgcaggaagggggatgtgggccgagtgcggtacctgctggagcagcgagacgtggaggtgaatgtgcgggacaagtgggacagcacccccttgtactatgcctgcttgtgtgggcacgaggagctggtactctaccttctggccaatggagcccgctgcgaggccaacaccttcgatggtgagcgctgcctctatggggcactgagtgaccccatccgccgggctctacgcgattacaagcaggtcacggcttcctgcaggaggcgggattactatgacgacttcttgcagcggcttctagagcagggcatccacagtgacgtggtctttgtagtacacgggaagccattccgggtgcatcgctgcgtcctgggtgcacgtagtgcctactttgccaacatgctggacaccaaatggaagggcaagagtgtcgtggttctcaggcacccactgatcaaccccgtggcctttggggccctgctgcagtacctgtacacaggccgcctggacattggcgtagagcatgtgagtgactgtgagcgcctggccaagcaatgccagctgtgggacctgctcagcgacctggaggccaagtgcgagaaggtgtctgagtttgtcacgtgctctactacatgtacagcgaccacactgagctgtcccccgaggcagcctatgatgtgctgagcgtcgccgacatgtacctgctgccaggcctgaagaggctgtgcggccgcagcctggctcagatgctagacgaggacactgtggtgggtgtgtggcgcgtggccaagctcttccgcctggcgcggcttgaggaccagtgcactgagtacatggccaaggtcattgagaagctggtggagcgggaggacttcgtggaggcggtgaaggaggaggcagcggctgtggcagcccggcaggagacggactctatcccgctggtggacgacatccgcttccacgtggccagcacggtgcagacctacagcgccatagaggaggcgcagcagcgtctgcgggcactcgaggacctgctcgtgtccatcggtctggactgttgagcccctggctgggcagccccaggggccaggagctctcttggagacaagcatgtgtatgcgtttgtgtgcagctcttcttcctgctccctgcacattgagggcttcatggggggtgcgaggggctcagtggggcttctcttccctccatgagcctggagaccccaggggaggatccatttgggatgagccccctccccccaatgcacaagccagcccccaagaccctgggggtggacaccactcagggaaacctggggtgggggtgggctttggtcttagcactttccttctccagatcccccctacccaccccagtcccaaatccagtcctctggcccttgcctagccctgaattgcttctctaagctggtgttcccatgcacagggccattcaggaagggctgggggagtgtgtgtggcaataaagcttgaaggcaccgtgggagcatgagcc

SEQ ID NO: 28030 - DNA, 1750 bp, Homo sapiens
  misc_feature (1)..(1): n is a, c, g, or t
  misc_feature (3)..(4): n is a, c, g, or t
  misc_feature (7)..(7): n is a, c, g, or t
ngnncgnggcggggcggggctgagcgtgtttacatccgccgggtgcgcggcttcgccgcccgaggtcgttcggctcgggtaccatcctccgcgccatggacaccagcgacctgttcgccagctgcaggaagggggatgtgggccgagtgcggtacctgctggagcagcgagacgtggaggtgaatgtgcgggacaagtgggacagcacccccttgtactatgcctgcttgtgtgggcacgaggagctggtactctaccttctggccaatggagcccgctgcgaggccaacaccttcgatggtgagcgctgcctctatggggcactgagtgaccccatccgccgggctctacgcgattacaagcaggtcacggcttcctgcaggaggcgggattactatgacgacttcttgcagcggcttctagagcagggcatccacagtgacgtggtctttgtagtacacgggaagccattccgggtgcatcgctgcgtcctgggtgcacgtagtgcctactttgccaacatgctggacaccaaatggaagggcaagagtgtcgtggttctcaggcacccactgatcaaccccgtggcctttggggccctgctgcagtacctgtacacaggccgcctggacattggcgtagagcatgtgagtgactgtgagcgcctggccaagcaatgccagctgtgggacctgctcagcgacctggaggccaagtgcgagaaggtgtctgagtttgtggcgtctaagccaggcacgtgtgtgaaggtgctgaccatcgagcccccacctgcagacccccgcctccgggaggacatggcgctgctggccgattgtgccctgccccccgagctccgaggtgatctttgggagctgcccttcccttgtcctgacggcttcaacagctgccctgacatctgcttccgagtggctggctgcagcttcctctgccacaaggcctttttctgtggccgcagtgactacttccgagccctgctggatgaccacttccgagagagcgaggagccagcgacctcagggggccccccagccgtcaccctgcatggcatctcacccgacgtcttcactcacgtgctctactacatgtacagcgaccacactgagctgtcccccgaggcagcctatgatgtgctgagcgtcgccgacatgtacctgctgccaggcctgaagaggctgtgcggccgcagcctggctcagatgctagacgaggacactgtggtgggtgtgtggcgcgtggccaagctcttccgcctggcgcggcttgaggaccagtgcactgagtacatggccaaggtcattgagaaggagctctcttggagacaagcatgtgtatgcgtttgtgtgcagctcttcttcctgctccctgcacattgagggcttcatggggggtgcgaggggctcagtggggcttctcttccctccatgagcctggagaccccaggggaggatccatttgggatgagccccctccccccaatgcacaagccagcccccaagaccctgggggtggacaccactcagggaaacctggggtgggggtgggctttggtcttagcactttccttctccagatcccccctacccaccccagtcccaaatccagtcctctggcccttgcctagccctgaattgcttctctaagctggtgttcccatgcacagggccattcaggaagggctgggggagtgtgtgtggcaataaagcttgaaggcaccgtgggagcatgagcc

SEQ ID NO: 28031 - DNA, 2184 bp, Homo sapiens
  misc_feature (1)..(1): n is a, c, g, or t
  misc_feature (3)..(4): n is a, c, g, or t
  misc_feature (7)..(7): n is a, c, g, or t
ngnncgnggcggggcggggctgagcgtgtttacatccgccgggtgcgcggcttcgccgcccgaggtcgttcggctcgggtaccatcctccgcgccatggacaccagcgacctgttcgccagctgcaggaagggggatgtgggccgagtgcggtacctgctggagcagcgagacgtggaggtgaatgtgcgggacaagtgggacagcacccccttgtactatgcctgcttgtgtgggcacgaggagctggtactctaccttctggccaatggagcccgctgcgaggccaacaccttcgatggtgagcgctgcctctatggggcactgagtgaccccatccgccgggctctacgcgattacaagcaggtcacggcttcctgcaggaggcgggattactatgacgacttcttgcagcggcttctagagcagggcatccacagtgacgtggtctttgtagtacacgggaagccattccgggtgcatcgctgcgtcctgggtgcacgtagtgcctactttgccaacatgctggacaccaaatggaagggcaagagtgtcgtggttctcaggcacccactgatcaaccccgtggcctttggggccctgctgcagtacctgtacacaggccgcctggacattggcgtagagcatgtgagtgactgtgagcgcctggccaagcaatgccagctgtgggacctgctcagcgacctggaggccaagtgcgagaaggtgtctgagtttgtggcgtctaagccaggcacgtgtgtgaaggtgctgaccatcgagcccccacctgcagacccccgcctccgggaggacatggcgctgctggccgattgtgccctgccccccgagctccgaggtgatctttgggagctgcccttcccttgtcctgacggcttcaacagctgccctgacatctgcttccgagtggctggctgcagcttcctctgccacaagtgcctgtgccctcctgttgcccctggccccagcccgttgccctgagcccccgtctagctcctcaggagacagaccctggccctcacacttcctgagcccggcctcccccagggcctttttctgtggccgcagtgactacttccgagccctgctggatgaccacttccgagagagcgaggagccagcgacctcagggggccccccagccgtcaccctgcatggcatctcacccgacgtcttcactcacgtgctctactacatgtacagcgaccacactgagctgtcccccgaggcagcctatgatgtgctgagcgtcgccgacatgtacctgctgccaggcctgaagaggctgtgcggccgcagcctggctcagatgctagacgaggacactgtggtgggtgtgtggcgcgtggccaagctcttccgcctggcgcggcttgaggaccagtgcactgagtacatggccaaggtcattgagaagaaggtgggccagtggtctgcagtgggtgggaaggaggggtgagagggcaggcacccctccactgagctggcccttcccgctcatagctggtggagcgggaggacttcgtggaggcggtgaaggaggaggcagcggctgtggcagcccggcaggagacggactctatcccgctggtggacgacatccgcttccacgtggccagcacggtgcagacctacagcgccatagaggaggcgcagcagcgtctgcgggcactcgaggacctgctcgtgtccatcggtctggactgttgagcccctggctgggcagccccaggggccaggagctctcttggagacaagcatgtgtatgcgtttgtgtgcagctcttcttcctgctccctgcacattgagggcttcatggggggtgcgaggggctcagtggggcttctcttccctccatgagcctggagaccccaggggaggatccatttgggatgagccccctccccccaatgcacaagccagcccccaagaccctgggggtggacaccactcagggaaacctggggtgggggtgggctttggtcttagcactttccttctccagatcccccctacccaccccagtcccaaatccagtcctctggcccttgcctagccctgaattgcttctctaagctggtgttcccatgcacagggccattcaggaagggctgggggagtgtgtgtggcaataaagcttgaaggcaccgtgggagcatgagcc

SEQ ID NO: 28032 - DNA, 347 bp, Homo sapiens
actcctaggcacttgggttgtttttatatcttggctattgtaaataatattgtgcctgattctcttgggcacaacagttcacaggttttaatgatagaccttgaaaagtatgttcagctaaataaaaatggaaacataaaaaatcttttgaaaatgttttgaaaaggccccaactatcgttgaatgctttcagtagagagtatatattctattcagtgattaagacattatttttatcaggagactgagggagagaattgtttgaactcaggaggcggaggttgcagtgagccagggtcacgccacggtattccagcctggacaacagagtgagactccgtccaaaa

SEQ ID NO: 28033 - DNA, 740 bp, Homo sapiens
cagagaggaggtcagagtgaagcaatctaagaaggacttatctgttgttgctggttttgaagatggaggaagaagccacaactcaaggaatgcagatggtctctaaagctggaaaagacaaggaaactgattttttcccagagcctccagaagggaacacagccctcttgacgcttgagttttatttagcccagtgagtcctgtctggaccttttaactacagagctgtaagagaaatttgtgttgtctaaagctacaaagtttgtggtaatttgttatagcagtgatagaaaactaatacagccaccttaaatgtgcatacttcaggccccgcaaaacttttatcttccgctgacagggaatataaagagtacaggctttgaagttggaaaacctggtctcgtaacttacttgctgtgttactgtaggcaaatcgctgaactcttccaggccttagtttcttcacaggtacattggagataatacctacaaacctgatctattgtgcagatcaaaagagaaagtgattaataaaacttggaaagtgctctaaaaatgttcatgtgtcattttaagttgttaataaagagtattagagtgactaagtgactccaagcttattagctggaaaaatagaagtaggagagccgattctctgggacatgcctgtagtcccagttacttgggagactgaggtggggagaattgcttgagtccagcctggattccattggggagat

SEQ ID NO: 28034 - DNA, 657 bp, Homo sapiens
  misc_feature (649)..(657): n is a, c, g, or t
actccttcgacgaccagaccccaacacaagcctgatgtagaagccacttgcttcaggtagctctaaatgtactgtctcataccatggcttaaaaaaaaaaaatccaggatgagttaaaagtgttcgtggtttcatcacctagccaaggttaatgtctgggtcttccgtttctagccagagaactggaaacaaatcactgttttgctaggagctttgcatgacctcacgccctaggctgccgggtcctgggctgtcctgatgggctgtgaaatcccacccactcccagggctgccgggtcctgggctgtcctgatgggctgtgaaatcccacccactcccctccccgcgaggcaaggacagcctctgccctgcctgcctgggagcacggtatgggcttgcctaggcctcagtgtcttaacactgtggtgactgaaattccttgttttaccttcaccaagtaacccagagccaggatccttgatgactctggtaaggcagtgactacccctgctcagaatgcaagggtcgctagggaagattttagaaaaaaaaaaaggactccaaaaatggagaatctaaatgtagtcctttgaaaatgtcacccatagatcctctaccactaactgtaataaatttgaccaaatagcannnnnnnnn

SEQ ID NO: 28035 - DNA, 2002 bp, Homo sapiens
cgggttttagcatgtataggagattccaaagcagagttacctatatcaattttagtactattattttcatattctactggataagaaattacttatttggaactaagaattattcttgcaacagaagcttatcagtaacactatttgattgctttttgctgtgtgcacaggtgaggacctgtctagacttctatactatgtacattgtattaattttgttcataaattaggtaattgagttatagatactaatttaatatttaaaaaatttagattgttgattttaaatatcagaataaccaaactgtaacaacagtgctgggattttggtatttaaaaagggcagagtataccagaatattgaaaactggtattgaaatcactacatataattgaattatgaaaaagtacctttaagataataaagcactacataaatatgagctcatatcatatatttgacagtagggcattatttttacaggttaacattcaattaatctgactatgaattagaaaaatcttgaatttgtagagttcatttaactttattaaagcaatttgccaactcagctacagaaatacagaaaatattactatctggagaactacccagtcgtaagtttatcatcgttgaaattgcttaagcagagattaggtgaccattcctcaggaatagtatacgaaggattcctgcagtggtggaggtgtgtatttgattgctgtcagtgtgccttctgatactaacattctgtaattccctgctcatttatcacacaacaaaacatgagacaaaaataactccataaaatatatgttgattataccatataggttgtatacatatagactataaatatgagctttcaaaaacgttttgccattagctaataactaacaaaatcagttttattagggtggttttgtgtttatattgcatggtgttcaatgagcttatatctgtagttttcatcaaatgtggaaaattttgggccatttttgtattatttttctgccctttcctgtcctcctgggactttaattacagcctgttgtaaaccacttgatattgttccttttggttctttttttatatcttctgtcactgtatttatgttttcctttaagtaattggataggcatataatgacttttagcatacttacacagtatctttttcatttctcagtctgtttctggtgactgatttttctcctggtttcgggtttcattttctgcttcttgtaatatctactaattttatattagatgccaggcattgatgatttcacattgttggttatagatttattcttataggcagttaaattaattgcagttcagtttcttcttttcaagcctttgttagggtaagtatagagtgagcttcaccccacagagagtttaacaccatttctaaggcatagctattgtgggatcactagaaaattctgtgagtgatcagctgggacactcaacactggctagttggacctcagatgcctcacaggcctgtgtggcactctgcttgacctcgtagagttttgctctaggcttacatgtcttaatatccagccacctctcaaggggctcctatgcagatttctggaattctgtttttacatatctgttagctctctggtactctgctctgcaacttcagccacttcagcctccctgaactccagcctctgtcttctcaactacatgaaaccaccatgctttgtttgggatcccctaccctgctctgaggtctgtgcctgcaggtagaaatctagaatgatggatgggcctcacttcattcctctcaggggtcatagtcttaaggtgcatgtcaatatctgcagttgtttcatatatttttgactaattttctgtttcttcacagtaagaagctaaatctttcccctgttactctcaaagccagaagtaaaggataaagcattaaaataaaagcaaagaaaatattttaaaatctaatataaaaatccattttgctatg

SEQ ID NO: 28036 - DNA, 245 bp, Homo sapiens
tgggagtttctgtttaaattacaaaacagtgtaagattttattataaattctctttctctttatgttttattgtagaatctgtctattatgcttcttcaggaaaaagaacattaagatttattttaatttgttctaaaagtacataagaaagtgtgatttttgagtatttaagcacatctggttactaatagaagacaagagacttaatagaatgttgatcctgtaaaagctgagctcacatcat

SEQ ID NO: 28037 - DNA, 128 bp, Homo sapiens
ggcttgtgaagatttgtctatatttgttttttttaatgggggaatgaaggctggtatctcctacttagccatcttgatgacaatacctccatgtattctggagtgttttaattgtttaaaattacaaa

SEQ ID NO: 28038 - DNA, 440 bp, Homo sapiens
ccctcgaccttcagagcccctgaggacaccactgtgcattaaataatgctcacagtgatgatcctgagtaactgtgaaaagagtaaactgtgttcaatgcacttcctgcaatgagaaaaattgccatcacaaaaatgattagggctgggcatggtggctcacacctgtaatcccagcacctttgggaggccaaggcgggcggatcacctgaggccaggagtttgagaccagcctggccaatatggtgagaccccctctactaaaaaaaaaatgcaaaacttagtcggatgtggtggtgtgtgcctgtactcccagctacttggaaggctgaggcagtagaatcacttgaaccaggaggcagaggttgcagtgagctgagagcaagccactgtactccagcctgggtgacagaacaagactccgtcaaaaaaaaaaaaaat

SEQ ID NO: 28039 - DNA, 1599 bp, Homo sapiens
aaggtggatgcgcgtgaacagacgccctcgcaggccgccggaagcaaaggcgtgagcgcgcgtgcgtgcgtgtgcgggtgcgtgagcgtgagcgcgcggaggccggaagcgagcgctgcgcagtcgggtggtcgcgggccatggagggtagcttttcggatggcggagcgctgccggaggggctcgcggaagaggccgagccgcagggcgccgcctggagcggggacagtggcactgtttcccagagccacagcagcgcctcggggccgtgggaggacgagggcgcggaggacggcgcgccgggccgcgacctgccgctgcttcgccgcgccgctgcgggctacgccgcctgcctgctgcccggggccggggcgcggcccgaggtcgaggccctggacgcgagcctagaggacctgcttaccagagtggacgagttcgtgggcatgctggacatgcttcgcggcgactcgtcccacgtcgtcagcgagggcgtgccgcgcatccacgcgaaggccgccgagatgcggcgcatctacagcaggatcgaccggctggaggccttcgtgaggatggtggggggccgcgtggccaggatggaggagcaggtcaccaaggccgaggccgagctgggcaccttccccagggcgttcaagaagctcctgcacacgatgaacgtgccctcgctctttagcaagtctgctccctcgaggccacagcaagccggctacgaagcccccgtcctgtttcggaccgaagactacttcccttgttgcagtgaaaggcctcagctctgacggcctgaccactgcggcaagaggaccccagctggggtgcttacctccagtatgaagtgaattgcaaatcctgcttatggacatatatgatgttggagtgtgggattttaaagtttactttctacaaactctccgtagtatattcatgattcagtgtagaatgtatagactttatgtcttccaagtttaaaaaaagagacagggtcttggtatgttgcccagactgttcggaaactcctgggctcaagtgatccttccacctcagcctccccagtagctgggactacggggtcgccactgcacccagcctgtgtcttccagctctaatcagaaagctgcttgtcgagggcatggggaatcaaactgaatgaacttttctctgcactgtggcaaaactgttatttttatggattttactaaatggcgttaccttttcaagatttatatgtttgtataatcataagaaaattgagccattaaagccttgttattcaatcctaatagtcagttttctagaacctacttttagggtaaatggtacattatttaatattatattaaacctcctatagcgtggattgtagaccaaaggaaatggtacaatttctgagaatatatgttgattttttgtgactaattccaaagttgtatttgaaagtatgacctcacagtcttcatttgtccatagcaaacatatgtgtgtgtgtgtgtatatatatatgtgggttgccaatgtttggtttataatttaaatgttaatagaaattttgagttttattggaaatgatttccttctgaaaagagc

SEQ ID NO: 28040 - DNA, 1294 bp, Homo sapiens
aaggtggatgcgcgtgaacagacgccctcgcaggccgccggaagcaaaggcgtgagcgcgcgtgcgtgcgtgtgcgggtgcgtgagcgtgagcgcgcggaggccggaagcgagcgctgcgcagtcgggtggtcgcgggccatggagggtagcttttcggatggcggagcgctgccggaggggctcgcggaagaggccgagccgcagggcgccgcctggagcggggacagtggcactgtttcccagagccacagcagcgcctcggggccgtgggaggacgagggcgcggaggacggcgcgccgggccgcgacctgccgctgcttcgccgcgccgctgcgggctacgccgcctgcctgctgcccggggccggggcgcggcccgaggtcgaggccctggacgcgagcctagaggacctgcttaccagagtggacgagttcgtgggcatgctggacatgcttcgcggcgactcgtcccacgtcgtcagcgagggcgtgccgcgcatccacgcgaaggccgccgagatgcggcgcatctacagcaggatcgaccggctggaggccttcgtgaggatggtggggggccgcgtggccaggatggaggagcaggtcaccaaggccgaggccgagctgggcaccttccccagggcgttcaagaagctcctgcacacgatgaacgtgccctcgctctttagcaagtctgctccctcgaggccacagcaagccggctacgaagcccccgtcctgtttcggaccgaagactacttcccttgttgcagtgaaaggcctcagctctgacggcctgaccactgcggcaagaggaccccagctggggtgcttacctccagtatgaagtgaattgcaaatcctgcttatggacatatatgatgttggagtgtgggattttaaagtttactttctacaaactctccgtagtatattcatgattcagtgtagaatgtatagactttatgtcttccaagtttaaaaaaagagacagggtcttggtatgttgcccagactgttcggaaactcctgggctcaagtgatccttccacctcagcctccccagtagctgggactacggggtcgccactgcacccagcctgtgtcttccagctctaatcagaaagctgcttgtcgagggcatggggaatcaaactgaatgaacttttctctgcactgtggcaaaactgttatttttatggattttactaaatggcgttaccttttcaagatttatatgtttgtataatcataagaaaattgagccattaaagccttgttattcaatccta

SEQ ID NO: 28041 - DNA, 770 bp, Homo sapiens
ttctacaggaggctaccctgcccctgctaccctgggagaagcctcagctttctgggcagagtttgtctccctgtcatttatactctcaggctttatacatttacacagtaagttctccctcctggagggttaaaaggaataatttcaacagggtgaaggcctggcacggtggctcacaactgtaatccaaggactttgggaggctgaggtgggtggatcacctgaggtcaggaatttgagaccagcctggccaacttggtgaaaccctgtctctactaaaaacaaaaattagccaggtgaggtggcacacacctatagccccagctactgggggaggctgaggcaggagaattgcttgaacctgggaggcagaggttacagtgagctgagatggcaccactgcactccagcctaggtgacaaagcagcaagacgcagtctcaaaacaaaacaacaacaacaaaaaaaaacgggaaaacaggtacagacaatagctgcctggagttgtacagaaacttgattgggtaaccctggacctttccaggctgtggccagcagttgaccctgcctgcctttcctccattgttttcccatgtctgaccttccctgttgcaaagcagtggcctactacagggtctctctggagggagcaaggaggctcagtggccccattcagcaattcgaagtccctttaattgttttgtgcttccaacctgttttgttcccgttcagatttctctcgccttccaataaaaacttccctgtcctgtg

SEQ ID NO: 28042 - DNA, 999 bp, Homo sapiens
ttctacaggaggctaccctgcccctgctaccctgggagaagcctcagctttctgggcagagtttgtctccctgtcatttatactctcaggctttatacatttacacagtaagttctccctcctggagggttaaaaggaataatttcaacagggtgaaggcctggcacggtggctcacaactgtaatccaaggactttgggaggctgaggtgggtggatcacctgaggtcaggaatttgagaccagcctggccaacttggtgaaaccctgtctctactaaaaacaaaaattagccaggtgaggtggcacacacctatagccccagctactgggggaggctgaggcaggagaattgcttgaacctgggaggcagaggttacagtgagctgagatggcaccactgcactccagcctaggtgacaaagcagcaagacgcagtctcaaaacaaaacaacaacaacaaaaaaaaacgggaaaacaggtacagacaatagctgcctggagttgtacagaaacttgattgggtaaccctggacctttccaggctgtggccagcagttgaccctgcctgcctttcctccattgttttcccatgtctgaccttccctgttgcaaagcagtggcctactacagggtctctctggagggagcaaggaggctcagtggccccattcagcaattcgaagtccctttaattgttttgtgcttccaacctgttttgttcccgttcagatttctctcgccttccaataaaaacttccctgtcctgtgccccagtccctcagagtccacaagaggttcaacttgctcatctgatgtgtgaattacatcacacagttgaatgagaatttgttaattacaacagaacttttataaatatgtcacttactgtatccaattgtacaattgtccatgggtggcttaatcccaccatggcaaataagcgtctgtttatgcaaccctaatcagtgctgagaaagatcagagctcaactagaatg

SEQ ID NO: 28043 - DNA, 125 bp, Homo sapiens
ttgattacaagcccgtcaagagtattgttagatgattgcatgagcttgagaaagagttctaaaaatgattactatgcttctcagtccactctaacccccagactgtgtattttttcacttggaca

SEQ ID NO: 28044 - DNA, 1313 bp, Homo sapiens
gactattttcaaaatagggcataatgtgaagactattttcaaaaaggaaatacatgtgaagactattttcaaaaagaaaaggcatgccagtcataatgatataccaacacagtgtaggtgcttgatacaaaatgccctttggttatttggagaggtattaaatttagtatgcctcacatggaataaaaataatttatttttgaaattatatttaaaaactaaaattaaaaaaataactttcaaacatagcttataattttttctataagactttgaaggagatacgcaattttgtgttcccatattatttaaaagaatgtatctaggaaaaacatttcattcggaaggagaagattgagtatagtttctttttaattagtaagcttttaattgacacatcatgcaagttaaaatgtatacaaattaagcatgttcatgcaataaatttccacaaagcaaaatactcatgtgatcacaattaactatggttttaaagatcatttttttgttttagtttgcaaaataatattatgaagtcataagaatttaaatatgattgcaatttacaatacatttttattaataaaagttgtaaagacctttgttactattgctctgtggtttacaaagaagataattgtgaacactgggatcccgttgggttcctatagattcccctgcagctgggtgttttagggcatagaattacatatgtgactattgtgacttttatttcaactggactctaaggaatacttttcattagtagtcatttaagatttcctggaagctcttctctgtgatttgaaaaattctctggataatatttccaaattgatgaccttctggagttaaaacaactttttctttggtctagctttaaagatatctttattttctattccattcatcaccattttttcattgaaaaaattaaccatgcttatcccacttcaaatgagcagctgcactttgaaactagatccttcttttggctgtaattgtccaaatgaggaggaccaggtttgtggactatttgaaaagaattggttgtgactcaaagcatttttctgctttcaatttttctcttcaaattttagtgtattcccaagccagaaaaaaaaagaaagaaagaaggaaagagggagggagaaaaggaagaaggaagaaaagaaggaagggctgggcaaggtggctcctgcctgtaatcccagcactttgggaggccaacgcagggttattacttgaggccagcagtttgagactaccctgggcaacatagcaagaccctgtctctatcaaaaattaaaaaa

SEQ ID NO: 28045 - DNA, 667 bp, Homo sapiens
tctgaaataacattttacatttgttgttggtcttgtcttaagcaaatgggattatatttagttatgcagatttaggaagggctcttccttccttctcaaataaaaataaccaggaaaaagcagtcgttttcatatgttctacctgggacattcattatagtctgggtacagcattgtatgtatcttgaaaactactgtactacctttgacagtgaggtgttttacccatagttcaaaattgctgttactgcctagagatgacactgctgtgaatagtataccttattcgaaggcttggtgcttttaggcatggactggtggcatctcttggacaaggcattgcaattgccctggaggactggccaaacaagttttcatgttgaaaagctgagtaaaaatgactctgggtgtaggccaatatagtatcactcgggaaaaagaaaagcacaatatgcctctccctgggaagcagtttggccagggcaaagctcccagaaatggaaatttaagcttgttgatttgggaaactcttggtatttgcccctcagcctttgtgaaatggatcttctttttaaaggggggaggggtaggatagaggagacttaaaggcttaaaataatgtcccctctgaaccatctaatcacctccttagaactaagcaggtaag

SEQ ID NO: 28046 - DNA, 351 bp, Homo sapiens
gtggacacatttaagcaatagcaaatagtgtccccccaaaagatatatccaagctctaactcctagtacctgtgaatatgacctttgcagatataactacatctttgcagatataattaagttaaggatcttgagatgagatcattctaaatcaaatgcctggtgtacttataagtagaggagaagccacaaagacacagaaaagactgtgctgtgaaaatgatggaagagattggagggcagccacaagccaaggaataccaaggatcagaagctaagagagaggcatagagtggattctccctcagagccttccaagagtgagtggctctaccatactgattttgtact

SEQ ID NO: 28047 - DNA, 492 bp, Homo sapiens
aaattaagtttttgtgatgtgttaatcatccaccttagaaataggctatcagctaatttggtggtcagtgctagagatagtgtgataggggcttttgcatacctgtgaaataaatggtgtgtgttttttttttttttttaggcagaatctctgtcatcctggctggagtgcagtagcatcatcttggctcactgcaacctccaccttccaggttcaagggattctcatgcttcaagcctcaagcctgggattacaggcgtctgccatcatgcatggctaatttttgtgtttttagtagggacacggtttcaccatgttggccaggctggtcttgaactgctgacatcaggtgatccgccctcctcagcctcccaaagtgctgggattacaggcgtgagccaccacacccggccgcgtttcttttttttaataagttctctcagaaaggatgacaacatgtccaaagtcattcatctattaagatggtatgag

SEQ ID NO: 28048 - DNA, 503 bp, Homo sapiens
ctttctgatctggatgcctttcatttcgttttcttgtctaattacccttgctagagtatccagtatgatggtgaatggcagtggtgcagtgggcatccttgtcttgttgctgatcttaggggaaagcttttggccttcggccataaagtatcaagttagctgtgggtttttgtagttgcccttaatcagattgaggaaattcccttgtattcctagttggttgaatgtttttatcttgagatattaacttctttaaagttttgttttactttttaatataaaaattttggtgtgtgtgttttattccaaccagtgctgattcctaaagaaaagcccccaatcacggttgtgggtgatgttggaggaaggattgccatcatcgtggtatgtagacctcttttattattaattctagtatttgccattgttattctgttgattgattgattgattgattttattacagagatctagcctgggcgaaagagtgagattccatctca

SEQ ID NO: 28049 - DNA, 551 bp, Homo sapiens
gcaagacatgcaaaagtttaagaatgaggtcaacacattagaagaagagttcctggctttgaagaaagaaaatgttcaacttcataaagaggttgaagaagaaatggagaagcacagaagtaatagcacagaattatcaggaaccctaactgatggtactactgttggcaatgatgatgatggactaaatcagcagattcctaggaaggaaaatgaagagcatgacagcctgcagataaaacagctaatgaaaagaacaaggtcaaaaaccaaatatatcctgaggctgactttgctgactcaatgaagccatctgaaatagcctcagaggattgtgaattgtctcactctgtttatgagaattttatgttgctgattgaacaacttagaatggagtataaagattctgctagcctaccaagaatccaagacacattttgtttgtgtgaacacttactgaaacttaagaataatcactgtgaccaacttacagtaaaacttaaacaaatggaaaatatggtcagtgtactacaaaatgagctatctgaaac

SEQ ID NO: 28050 - DNA, 1910 bp, Homo sapiens
agcgggccagccacagcagagaggtgggggttgtgaccggagttagatgccagcgcagaagggacgtgagcccagccgaggaggaattttgttgtcagagaataaaaggaggttgtccataattgactttaagcagcaatcagtaaaacattgagctcttcagctccgcctttcttgctctgaaaattggaaaaccaagaaggttttgatgttttgtgtgacgccacctgaattagaaaccaagatgaacataaccaaaggtggtctggtgttgttttcagcaaactcgaattcatcatgtatggagctatcaaagaaaattgcagagcggctaggggtggagatgggcaaagtgcaggtttaccaggaacctaacagagaaacgagagtacaaattcaagagtctgtgaggggaaaagatgttttcatcatccaaactgtttcgaaggacgtgaacaccaccatcatggagctcctgatcatggtgtatgcatgtaagacctcttgtgccaagagcatcattggcgtgataccctactttccttacagcaagcagtgcaagatgagaaaaagaggctccattgtctctaaattgctggcttccatgatgtgcaaagctggtctaactcatcttattactatggatttacaccagaaggaaattcagggcttcttcaatattcctgttgacaatttaagagcatctcccttcttattacagtatattcaagaagagatcccagattacaggaatgcagtaatcgtggccaagtctccagcctcggcgaagagggcacagtcttttgctgagcgcctgcgcctgggaattgcagtgattcatggagaggcgcaggatgccgagtcggacttggtggatggacggcattccccacccatggtcagaagtgtggctgccatccaccccagcctggagatccccatgctgattcctaaagaaaagcccccaatcacggttgtgggtgatgttggaggaaggattgccatcatcgtggatgacatcattgatgatgttgacagctttcttgctgcagcagagaccctgaaggaaagaggtgcatataagatctttgtgatggcaactcatggcttgttgtcttctgacgccccccggcggattgaagagtctgccattgatgaggtggtggtcaccaatacaattccacatgaagtccagaagctccagtgccccaagattaaaactgtggatatcagcatgatcctttcagaggcgatccgtcggatccacaatggggagtccatgtcctaccttttcagaaacataggcttagatgactgagttttcctttaggaaaactcccgagggccaaactggaaacataagagtgactgctcggtgggatggatttcacaggaaccgtcatgcttgttcctccctctcccctgtaacctcacttcttattgattcctaagaagatagaccaactttttatgtcggtttgggtgtttgtgagtttggggagcaatttttataaaagaaaaactttattctcctcttttgaaaaggtaagacctcgttttagttgtaactgtttaaaaaataacacttggaataagatttgtaagctcacaaagccttcttccaaagttgcttgagccaagtgcttaaaaagttaataaaataaaatgatctgtatgatacctgcaattgaaaagccgaaaagattatactgtcaagtccagtaaatgacatttttagagatgcttttgtagacaagcatatggaatatgtgattgtatttattttctgcaactaaaaaaggaataaaaacttgtgtttgtgtgtttttctaaaactttgtgttttggcaatcgttttataactaaaataaaatgaaagctaaatctacacgctgtgaatgttgaaatgt

SEQ ID NO: 28051 - DNA, 2119 bp, Homo sapiens
agcgggccagccacagcagagaggtgggggttgtgaccggagttagatgccagcgcagaagggacgtgagcccagccgaggtaccgctgaagaggaatcaattttggtatgcagataatcactgggctcatgggtcttgctctttacaaagagaattcagcggggtgccaagtcgttttctgtgtgggttgagagacaggctgtgcagcccactgttgcataggactaactactacaaatcatgctgagaccgagctatttttgctgcttagaggctttgcagccttgagaggaattttgttgtcagagaataaaaggaggttgtccataattgactttaagcagcaatcagtaaaacattgagctcttcagctccgcctttcttgctctgaaaattggaaaaccaagaaggttttgatgttttgtgtgacgccacctgaattagaaaccaagatgaacataaccaaaggtggtctggtgttgttttcagcaaactcgaattcatcatgtatggagctatcaaagaaaattgcagagcggctaggggtggagatgggcaaagtgcaggtttaccaggaacctaacagagaaacgagagtacaaattcaagagtctgtgaggggaaaagatgttttcatcatccaaactgtttcgaaggacgtgaacaccaccatcatggagctcctgatcatggtgtatgcatgtaagacctcttgtgccaagagcatcattggcgtgataccctactttccttacagcaagcagtgcaagatgagaaaaagaggctccattgtctctaaattgctggcttccatgatgtgcaaagctggtctaactcatcttattactatggatttacaccagaaggaaattcagggcttcttcaatattcctgttgacaatttaagagcatctcccttcttattacagtatattcaagaagagatcccagattacaggaatgcagtaatcgtggccaagtctccagcctcggcgaagagggcacagtcttttgctgagcgcctgcgcctgggaattgcagtgattcatggagaggcgcaggatgccgagtcggacttggtggatggacggcattccccacccatggtcagaagtgtggctgccatccaccccagcctggagatccccatgctgattcctaaagaaaagcccccaatcacggttgtgggtgatgttggaggaaggattgccatcatcgtggatgacatcattgatgatgttgacagctttcttgctgcagcagagaccctgaaggaaagaggtgcatataagatctttgtgatggcaactcatggcttgttgtcttctgacgccccccggcggattgaagagtctgccattgatgaggtggtggtcaccaatacaattccacatgaagtccagaagctccagtgccccaagattaaaactgtggatatcagcatgatcctttcagaggcgatccgtcggatccacaatggggagtccatgtcctaccttttcagaaacataggcttagatgactgagttttcctttaggaaaactcccgagggccaaactggaaacataagagtgactgctcggtgggatggatttcacaggaaccgtcatgcttgttcctccctctcccctgtaacctcacttcttattgattcctaagaagatagaccaactttttatgtcggtttgggtgtttgtgagtttggggagcaatttttataaaagaaaaactttattctcctcttttgaaaaggtaagacctcgttttagttgtaactgtttaaaaaataacacttggaataagatttgtaagctcacaaagccttcttccaaagttgcttgagccaagtgcttaaaaagttaataaaataaaatgatctgtatgatacctgcaattgaaaagccgaaaagattatactgtcaagtccagtaaatgacatttttagagatgcttttgtagacaagcatatggaatatgtgattgtatttattttctgcaactaaaaaaggaataaaaacttgtgtttgtgtgtttttctaaaactttgtgttttggcaatcgttttataactaaaataaaatgaaagctaaatctacacgctgtgaatgttgaaatgt

SEQ ID NO: 28052 - DNA, 2121 bp, Homo sapiens
cgcccctccccgcccaccggcctcgcagtcaccgcggacgccaatcttgtgcatggagtcgccattttgctcctagagaggccgccagaagacccggcgctttcttccttctgcagctgaggctgcggcggggccggggctggggtcggggccagaattcagcggggtgccaagtcgttttctgtgtgggttgagagacaggctgtgcagcccactgttgcataggactaactactacaaatcatgctgagaccgagctatttttgctgcttagaggctttgcagccttgagaggaattttgttgtcagagaataaaaggaggttgtccataattgactttaagcagcaatcagtaaaacattgagctcttcagctccgcctttcttgctctgaaaattggaaaaccaagaaggttttgatgttttgtgtgacgccacctgaattagaaaccaagatgaacataaccaaaggtggtctggtgttgttttcagcaaactcgaattcatcatgtatggagctatcaaagaaaattgcagagcggctaggggtggagatgggcaaagtgcaggtttaccaggaacctaacagagaaacgagagtacaaattcaagagtctgtgaggggaaaagatgttttcatcatccaaactgtttcgaaggacgtgaacaccaccatcatggagctcctgatcatggtgtatgcatgtaagacctcttgtgccaagagcatcattggcgtgataccctactttccttacagcaagcagtgcaagatgagaaaaagaggctccattgtctctaaattgctggcttccatgatgtgcaaagctggtctaactcatcttattactatggatttacaccagaaggaaattcagggcttcttcaatattcctgttgacaatttaagagcatctcccttcttattacagtatattcaagaagagatcccagattacaggaatgcagtaatcgtggccaagtctccagcctcggcgaagagggcacagtcttttgctgagcgcctgcgcctgggaattgcagtgattcatggagaggcgcaggatgccgagtcggacttggtggatggacggcattccccacccatggtcagaagtgtggctgccatccaccccagcctggagatccccatgctgattcctaaagaaaagcccccaatcacggttgtgggtgatgttggaggaaggattgccatcatcgtggatgacatcattgatgatgttgacagctttcttgctgcagcagagaccctgaaggaaagaggtgcatataagatctttgtgatggcaactcatggcttgttgtcttctgacgccccccggcggattgaagagtctgccattgatgaggtggtggtcaccaatacaattccacatgaagtccagaagctccagtgccccaagattaaaactgtggatatcagcatgatcctttcagaggcgatccgtcggatccacaatggggagtccatgtcctaccttttcagaaacataggcttagatgactgagttttcctttaggaaaactcccgagggccaaactggaaacataagagtgactgctcggtgggatggatttcacaggaaccgtcatgcttgttcctccctctcccctgtaacctcacttcttattgattcctaagaagatagaccaactttttatgtcggtttgggtgtttgtgagtttggggagcaatttttataaaagaaaaactttattctcctcttttgaaaaggtaagacctcgttttagttgtaactgtttaaaaaataacacttggaataagatttgtaagctcacaaagccttcttccaaagttgcttgagccaagtgcttaaaaagttaataaaataaaatgatctgtatgatacctgcaattgaaaagccgaaaagattatactgtcaagtccagtaaatgacatttttagagatgcttttgtagacaagcatatggaatatgtgattgtatttattttctgcaactaaaaaaggaataaaaacttgtgtttgtgtgtttttctaaaactttgtgttttggcaatcgttttataactaaaataaaatgaaagctaaatctacacgctgtgaatgttgaaatgt

SEQ ID NO: 28053 - DNA, 1983 bp, Homo sapiens
agcgggccagccacagcagagaggtgggggttgtgaccggagttagatgccagcgcagaagggacgtgagcccagccgaggtaccgctgaagaggaatcaattttggtatgcagataatcactgggctcatgggtcttgctctttacaaagaggaggaattttgttgtcagagaataaaaggaggttgtccataattgactttaagcagcaatcagtaaaacattgagctcttcagctccgcctttcttgctctgaaaattggaaaaccaagaaggttttgatgttttgtgtgacgccacctgaattagaaaccaagatgaacataaccaaaggtggtctggtgttgttttcagcaaactcgaattcatcatgtatggagctatcaaagaaaattgcagagcggctaggggtggagatgggcaaagtgcaggtttaccaggaacctaacagagaaacgagagtacaaattcaagagtctgtgaggggaaaagatgttttcatcatccaaactgtttcgaaggacgtgaacaccaccatcatggagctcctgatcatggtgtatgcatgtaagacctcttgtgccaagagcatcattggcgtgataccctactttccttacagcaagcagtgcaagatgagaaaaagaggctccattgtctctaaattgctggcttccatgatgtgcaaagctggtctaactcatcttattactatggatttacaccagaaggaaattcagggcttcttcaatattcctgttgacaatttaagagcatctcccttcttattacagtatattcaagaagagatcccagattacaggaatgcagtaatcgtggccaagtctccagcctcggcgaagagggcacagtcttttgctgagcgcctgcgcctgggaattgcagtgattcatggagaggcgcaggatgccgagtcggacttggtggatggacggcattccccacccatggtcagaagtgtggctgccatccaccccagcctggagatccccatgctgattcctaaagaaaagcccccaatcacggttgtgggtgatgttggaggaaggattgccatcatcgtggatgacatcattgatgatgttgacagctttcttgctgcagcagagaccctgaaggaaagaggtgcatataagatctttgtgatggcaactcatggcttgttgtcttctgacgccccccggcggattgaagagtctgccattgatgaggtggtggtcaccaatacaattccacatgaagtccagaagctccagtgccccaagattaaaactgtggatatcagcatgatcctttcagaggcgatccgtcggatccacaatggggagtccatgtcctaccttttcagaaacataggcttagatgactgagttttcctttaggaaaactcccgagggccaaactggaaacataagagtgactgctcggtgggatggatttcacaggaaccgtcatgcttgttcctccctctcccctgtaacctcacttcttattgattcctaagaagatagaccaactttttatgtcggtttgggtgtttgtgagtttggggagcaatttttataaaagaaaaactttattctcctcttttgaaaaggtaagacctcgttttagttgtaactgtttaaaaaataacacttggaataagatttgtaagctcacaaagccttcttccaaagttgcttgagccaagtgcttaaaaagttaataaaataaaatgatctgtatgatacctgcaattgaaaagccgaaaagattatactgtcaagtccagtaaatgacatttttagagatgcttttgtagacaagcatatggaatatgtgattgtatttattttctgcaactaaaaaaggaataaaaacttgtgtttgtgtgtttttctaaaactttgtgttttggcaatcgttttataactaaaataaaatgaaagctaaatctacacgctgtgaatgttgaaatgt

SEQ ID NO: 28054 - DNA, 1907 bp, Homo sapiens
cgcccctccccgcccaccggcctcgcagtcaccgcggacgccaatcttgtgcatggagtcgccattttgctcctagagaggccgccagaagacccggcgctttcttccttctgcagctgaggctgcggcggggccggggctggggtcggggccaggaggaattttgttgtcagagaataaaaggaggttgtccataattgactttaagcagcaatcagtaaaacattgagctcttcagctccgcctttcttgctctgaaaattggaaaaccaagaaggttttgatgttttgtgtgacgccacctgaattagaaaccaagatgaacataaccaaaggtggtctggtgttgttttcagcaaactcgaattcatcatgtatggagctatcaaagaaaattgcagagcggctaggggtggagatgggcaaagtgcaggtttaccaggaacctaacagagaaacgagagtacaaattcaagagtctgtgaggggaaaagatgttttcatcatccaaactgtttcgaaggacgtgaacaccaccatcatggagctcctgatcatggtgtatgcatgtaagacctcttgtgccaagagcatcattggcgtgataccctactttccttacagcaagcagtgcaagatgagaaaaagaggctccattgtctctaaattgctggcttccatgatgtgcaaagctggtctaactcatcttattactatggatttacaccagaaggaaattcagggcttcttcaatattcctgttgacaatttaagagcatctcccttcttattacagtatattcaagaagagatcccagattacaggaatgcagtaatcgtggccaagtctccagcctcggcgaagagggcacagtcttttgctgagcgcctgcgcctgggaattgcagtgattcatggagaggcgcaggatgccgagtcggacttggtggatggacggcattccccacccatggtcagaagtgtggctgccatccaccccagcctggagatccccatgctgattcctaaagaaaagcccccaatcacggttgtgggtgatgttggaggaaggattgccatcatcgtggatgacatcattgatgatgttgacagctttcttgctgcagcagagaccctgaaggaaagaggtgcatataagatctttgtgatggcaactcatggcttgttgtcttctgacgccccccggcggattgaagagtctgccattgatgaggtggtggtcaccaatacaattccacatgaagtccagaagctccagtgccccaagattaaaactgtggatatcagcatgatcctttcagaggcgatccgtcggatccacaatggggagtccatgtcctaccttttcagaaacataggcttagatgactgagttttcctttaggaaaactcccgagggccaaactggaaacataagagtgactgctcggtgggatggatttcacaggaaccgtcatgcttgttcctccctctcccctgtaacctcacttcttattgattcctaagaagatagaccaactttttatgtcggtttgggtgtttgtgagtttggggagcaatttttataaaagaaaaactttattctcctcttttgaaaaggtaagacctcgttttagttgtaactgtttaaaaaataacacttggaataagatttgtaagctcacaaagccttcttccaaagttgcttgagccaagtgcttaaaaagttaataaaataaaatgatctgtatgatacctgcaattgaaaagccgaaaagattatactgtcaagtccagtaaatgacatttttagagatgcttttgtagacaagcatatggaatatgtgattgtatttattttctgcaactaaaaaaggaataaaaacttgtgtttgtgtgtttttcta

SEQ ID NO: 28055 - DNA, 1836 bp, Homo sapiens
cgcccctccccgcccaccggcctcgcagtcaccgcggacgccaatcttgtgcatggagtcgccattttgctcctagagaggccgccagaagacccggcgctttcttccttctgcagctgaggctgcggcggggccggggctggggtcggggccaggctctgaaaattggaaaaccaagaaggttttgatgttttgtgtgacgccacctgaattagaaaccaagatgaacataaccaaaggtggtctggtgttgttttcagcaaactcgaattcatcatgtatggagctatcaaagaaaattgcagaaaacgagagtacaaattcaagagtctgtgaggggaaaagatgttttcatcatccaaactgtttcgaaggacgtgaacaccaccatcatggagctcctgatcatggtgtatgcatgtaagacctcttgtgccaagagcatcattggcgtgataccctactttccttacagcaagcagtgcaagatgagaaaaagaggctccattgtctctaaattgctggcttccatgatgtgcaaagctggtctaactcatcttattactatggatttacaccagaaggaaattcagggcttcttcaatattcctgttgacaatttaagagcatctcccttcttattacagtatattcaagaagagatcccagattacaggaatgcagtaatcgtggccaagtctccagcctcggcgaagagggcacagtcttttgctgagcgcctgcgcctgggaattgcagtgattcatggagaggcgcaggatgccgagtcggacttggtggatggacggcattccccacccatggtcagaagtgtggctgccatccaccccagcctggagatccccatgctgattcctaaagaaaagcccccaatcacggttgtgggtgatgttggaggaaggattgccatcatcgtggatgacatcattgatgatgttgacagctttcttgctgcagcagagaccctgaaggaaagaggtgcatataagatctttgtgatggcaactcatggcttgttgtcttctgacgccccccggcggattgaagagtctgccattgatgaggtggtggtcaccaatacaattccacatgaagtccagaagctccagtgccccaagattaaaactgtggatatcagcatgatcctttcagaggcgatccgtcggatccacaatggggagtccatgtcctaccttttcagaaacataggcttagatgactgagttttcctttaggaaaactcccgagggccaaactggaaacataagagtgactgctcggtgggatggatttcacaggaaccgtcatgcttgttcctccctctcccctgtaacctcacttcttattgattcctaagaagatagaccaactttttatgtcggtttgggtgtttgtgagtttggggagcaatttttataaaagaaaaactttattctcctcttttgaaaaggtaagacctcgttttagttgtaactgtttaaaaaataacacttggaataagatttgtaagctcacaaagccttcttccaaagttgcttgagccaagtgcttaaaaagttaataaaataaaatgatctgtatgatacctgcaattgaaaagccgaaaagattatactgtcaagtccagtaaatgacatttttagagatgcttttgtagacaagcatatggaatatgtgattgtatttattttctgcaactaaaaaaggaataaaaacttgtgtttgtgtgtttttctaaaactttgtgttttggcaatcgttttataactaaaataaaatgaaagctaaatctacacgctgtgaatgttgaaatgt

SEQ ID NO: 28056 - DNA, 1932 bp, Homo sapiens
cgcccctccccgcccaccggcctcgcagtcaccgcggacgccaatcttgtgcatggagtcgccattttgctcctagagaggccgccagaagacccggcgctttcttccttctgcagctgaggctgcggcggggccggggctggggtcggggccaggaggaattttgttgtcagagaataaaaggaggttgtccataattgactttaagcagcaatcagtaaaacattgagctcttcagctccgcctttcttgctctgaaaattggaaaaccaagaaggttttgatgttttgtgtgacgccacctgaattagaaaccaagatgaacataaccaaaggtggtctggtgttgttttcagcaaactcgaattcatcatgtatggagctatcaaagaaaattgcagaaaacgagagtacaaattcaagagtctgtgaggggaaaagatgttttcatcatccaaactgtttcgaaggacgtgaacaccaccatcatggagctcctgatcatggtgtatgcatgtaagacctcttgtgccaagagcatcattggcgtgataccctactttccttacagcaagcagtgcaagatgagaaaaagaggctccattgtctctaaattgctggcttccatgatgtgcaaagctggtctaactcatcttattactatggatttacaccagaaggaaattcagggcttcttcaatattcctgttgacaatttaagagcatctcccttcttattacagtatattcaagaagagatcccagattacaggaatgcagtaatcgtggccaagtctccagcctcggcgaagagggcacagtcttttgctgagcgcctgcgcctgggaattgcagtgattcatggagaggcgcaggatgccgagtcggacttggtggatggacggcattccccacccatggtcagaagtgtggctgccatccaccccagcctggagatccccatgctgattcctaaagaaaagcccccaatcacggttgtgggtgatgttggaggaaggattgccatcatcgtggatgacatcattgatgatgttgacagctttcttgctgcagcagagaccctgaaggaaagaggtgcatataagatctttgtgatggcaactcatggcttgttgtcttctgacgccccccggcggattgaagagtctgccattgatgaggtggtggtcaccaatacaattccacatgaagtccagaagctccagtgccccaagattaaaactgtggatatcagcatgatcctttcagaggcgatccgtcggatccacaatggggagtccatgtcctaccttttcagaaacataggcttagatgactgagttttcctttaggaaaactcccgagggccaaactggaaacataagagtgactgctcggtgggatggatttcacaggaaccgtcatgcttgttcctccctctcccctgtaacctcacttcttattgattcctaagaagatagaccaactttttatgtcggtttgggtgtttgtgagtttggggagcaatttttataaaagaaaaactttattctcctcttttgaaaaggtaagacctcgttttagttgtaactgtttaaaaaataacacttggaataagatttgtaagctcacaaagccttcttccaaagttgcttgagccaagtgcttaaaaagttaataaaataaaatgatctgtatgatacctgcaattgaaaagccgaaaagattatactgtcaagtccagtaaatgacatttttagagatgcttttgtagacaagcatatggaatatgtgattgtatttattttctgcaactaaaaaaggaataaaaacttgtgtttgtgtgtttttctaaaactttgtgttttggcaatcgttttataactaaaataaaatgaaagctaaatctacacgctgtgaatgttgaaatgt

SEQ ID NO: 28057 - DNA, 1685 bp, Homo sapiens
cgcccctccccgcccaccggcctcgcagtcaccgcggacgccaatcttgtgcatggagtcgccattttgctcctagagaggccgccagaagacccggcgctttcttccttctgcagctgaggctgcggcggggccggggctggggtcggggccagaaacgagagtacaaattcaagagtctgtgaggggaaaagatgttttcatcatccaaactgtttcgaaggacgtgaacaccaccatcatggagctcctgatcatggtgtatgcatgtaagacctcttgtgccaagagcatcattggcgtgataccctactttccttacagcaagcagtgcaagatgagaaaaagaggctccattgtctctaaattgctggcttccatgatgtgcaaagctggtctaactcatcttattactatggatttacaccagaaggaaattcagggcttcttcaatattcctgttgacaatttaagagcatctcccttcttattacagtatattcaagaagagatcccagattacaggaatgcagtaatcgtggccaagtctccagcctcggcgaagagggcacagtcttttgctgagcgcctgcgcctgggaattgcagtgattcatggagaggcgcaggatgccgagtcggacttggtggatggacggcattccccacccatggtcagaagtgtggctgccatccaccccagcctggagatccccatgctgattcctaaagaaaagcccccaatcacggttgtgggtgatgttggaggaaggattgccatcatcgtggatgacatcattgatgatgttgacagctttcttgctgcagcagagaccctgaaggaaagaggtgcatataagatctttgtgatggcaactcatggcttgttgtcttctgacgccccccggcggattgaagagtctgccattgatgaggtggtggtcaccaatacaattccacatgaagtccagaagctccagtgccccaagattaaaactgtggatatcagcatgatcctttcagaggcgatccgtcggatccacaatggggagtccatgtcctaccttttcagaaacataggcttagatgactgagttttcctttaggaaaactcccgagggccaaactggaaacataagagtgactgctcggtgggatggatttcacaggaaccgtcatgcttgttcctccctctcccctgtaacctcacttcttattgattcctaagaagatagaccaactttttatgtcggtttgggtgtttgtgagtttggggagcaatttttataaaagaaaaactttattctcctcttttgaaaaggtaagacctcgttttagttgtaactgtttaaaaaataacacttggaataagatttgtaagctcacaaagccttcttccaaagttgcttgagccaagtgcttaaaaagttaataaaataaaatgatctgtatgatacctgcaattgaaaagccgaaaagattatactgtcaagtccagtaaatgacatttttagagatgcttttgtagacaagcatatggaatatgtgattgtatttattttctgcaactaaaaaaggaataaaaacttgtgtttgtgtgtttttctaaaactttgtgttttggcaatcgttttataactaaaataaaatgaaagctaaatctacacgctgtgaatgttgaaatgt

SEQ ID NO: 28058 - DNA, 1869 bp, Homo sapiens
cgcccctccccgcccaccggcctcgcagtcaccgcggacgccaatcttgtgcatggagtcgccattttgctcctagagaggccgccagaagacccggcgctttcttccttctgcagctgaggctgcggcggggccggggctggggtcggggccaggaggaattttgttgtcagagaataaaaggaggttgtccataattgactttaagcagcaatcagtaaaacattgagctcttcagctccgcctttcttgctctgaaaattggaaaaccaagaaggttttgatgttttgtgtgacgccacctgaattagaaaccaagatgaacataaccaaaggtggtctggtgttgttttcagcaaactcgaattcatcatgtatggagctatcaaagaaaattgcagagcggctaggggtggagatgggcaaagtgcaggtttaccaggaacctaacagagaaacgagagtacaaattcaagagtctgtgaggggaaaagatgttttcatcatccaaactgtttcgaaggacgtgaacaccaccatcatggagctcctgatcatggtgtatgcatgtaagacctcttgtgccaagagcatcattggcgtgataccctactttccttacagcaagcagtgcaagatgagaaaaagaggctccattgtctctaaattgctggcttccatgatgtgcaaagctgatcccagattacaggaatgcagtaatcgtggccaagtctccagcctcggcgaagagggcacagtcttttgctgagcgcctgcgcctgggaattgcagtgattcatggagaggcgcaggatgccgagtcggacttggtggatggacggcattccccacccatggtcagaagtgtggctgccatccaccccagcctggagatccccatgctgattcctaaagaaaagcccccaatcacggttgtgggtgatgttggaggaaggattgccatcatcgtggatgacatcattgatgatgttgacagctttcttgctgcagcagagaccctgaaggaaagaggtgcatataagatctttgtgatggcaactcatggcttgttgtcttctgacgccccccggcggattgaagagtctgccattgatgaggtggtggtcaccaatacaattccacatgaagtccagaagctccagtgccccaagattaaaactgtggatatcagcatgatcctttcagaggcgatccgtcggatccacaatggggagtccatgtcctaccttttcagaaacataggcttagatgactgagttttcctttaggaaaactcccgagggccaaactggaaacataagagtgactgctcggtgggatggatttcacaggaaccgtcatgcttgttcctccctctcccctgtaacctcacttcttattgattcctaagaagatagaccaactttttatgtcggtttgggtgtttgtgagtttggggagcaatttttataaaagaaaaactttattctcctcttttgaaaaggtaagacctcgttttagttgtaactgtttaaaaaataacacttggaataagatttgtaagctcacaaagccttcttccaaagttgcttgagccaagtgcttaaaaagttaataaaataaaatgatctgtatgatacctgcaattgaaaagccgaaaagattatactgtcaagtccagtaaatgacatttttagagatgcttttgtagacaagcatatggaatatgtgattgtatttattttctgcaactaaaaaaggaataaaaacttgtgtttgtgtgtttttctaaaactttgtgttttggcaatcgttttataactaaaataaaatgaaagctaaatctacacgctgtgaatgttgaaatgt

SEQ ID NO: 28059 - DNA, 1853 bp, Homo sapiens
cgcccctccccgcccaccggcctcgcagtcaccgcggacgccaatcttgtgcatggagtcgccattttgctcctagagaggccgccagaagacccggcgctttcttccttctgcagctgaggctgcggcggggccggggctggggtcggggccaggaggaattttgttgtcagagaataaaaggaggttgtccataattgactttaagcagcaatcagtaaaacattgagctcttcagctccgcctttcttgctctgaaaattggaaaaccaagaaggttttgatgttttgtgtgacgccacctgaattagaaaccaagatgaacataaccaaaggtggtctggtgttgttttcagcaaactcgaattcatcatgtatggagctatcaaagaaaattgcagagcggctaggggtggagatgggcaaagtgcaggtttaccaggaacctaacagagaaacgagagtacaaattcaagagtctgtgaggggaaaagatgttttcatcatccaaactgtttcgaaggacgtgaacaccaccatcatggagctcctgatcatggtgtatgcatgtaagacctcttgtgccaagagcatcattggcgtgataccctactttccttacagcaagcagtgcaagatgagaaaaagaggctccattgtctctaaattgctggcttccatgatgtgcaaagctggtctaactcatcttattactatggatttacaccagaaggaaattcagggcttcttcaatattcctgttgacaatttaagagcatctcccttcttattacagtatattcaagaagagatcccagattacaggaatgcagtaatcgtggccaagtctccagcctcggcgaagagggcacagtcttttgctgagcgcctgcgcctgggaattgcagtgattcatggagaggcgcaggatgccgagtcggacttggtggatggacggcattccccacccatggtcagaagtgtggctgccatccaccccagcctggagatccccatgctgattcctaaagaaaagcccccaatcacggttgtgggtgatgttggaggaaggattgccatcatcgtggatgacatcattgatgatgttgacagctttcttgctgcagcagagaccctgaaggaaagaggtgcatataagatctttgtgatggcaactcatggcttgttgtcttctgacgccccccggcggattgaagagtctgccattgatgaggtggtggtcaccaatacaattccacatgaagtccagaagctccagtgccccaagattaaaactgtggatatcagcatgatcagaaacataggcttagatgactgagttttcctttaggaaaactcccgagggccaaactggaaacataagagtgactgctcggtgggatggatttcacaggaaccgtcatgcttgttcctccctctcccctgtaacctcacttcttattgattcctaagaagatagaccaactttttatgtcggtttgggtgtttgtgagtttggggagcaatttttataaaagaaaaactttattctcctcttttgaaaaggtaagacctcgttttagttgtaactgtttaaaaaataacacttggaataagatttgtaagctcacaaagccttcttccaaagttgcttgagccaagtgcttaaaaagttaataaaataaaatgatctgtatgatacctgcaattgaaaagccgaaaagattatactgtcaagtccagtaaatgacatttttagagatgcttttgtagacaagcatatggaatatgtgattgtatttattttctgcaactaaaaaaggaataaaaacttgtgtttgtgtgtttttcta

SEQ ID NO: 28060 - DNA, 1069 bp, Homo sapiens
gctgccatggggcacggtgatggggacatggggccatgccgtctgcacaaggccaagtggaagagcagatttttcacggtaaatgtaggcagaccctttttttttcctggttgtctaacctattattgtagaagtgctcatatacattcttttccatctgtgctttggcaggatgacatcattgatgatgttgacagctttcttgctgcagcagagaccctgaaggaaagaggtgcatataagatctttgtgatggcaactcatggcttgttgtcttctgacgccccccggcggattgaagagtctgccattgatgaggtggtggtcaccaatacaattccacatgaagtccagaagctccagtgccccaagattaaaactgtggatatcagcatgatcctttcagaggcgatccgtcggatccacaatggggagtccatgtcctaccttttcagaaacataggcttagatgactgagttttcctttaggaaaactcccgagggccaaactggaaacataagagtgactgctcggtgggatggatttcacaggaaccgtcatgcttgttcctccctctcccctgtaacctcacttcttattgattcctaagaagatagaccaactttttatgtcggtttgggtgtttgtgagtttggggagcaatttttataaaagaaaaactttattctcctcttttgaaaaggtaagacctcgttttagttgtaactgtttaaaaaataacacttggaataagatttgtaagctcacaaagccttcttccaaagttgcttgagccaagtgcttaaaaagttaataaaataaaatgatctgtatgatacctgcaattgaaaagccgaaaagattatactgtcaagtccagtaaatgacatttttagagatgcttttgtagacaagcatatggaatatgtgattgtatttattttctgcaactaaaaaaggaataaaaacttgtgtttgtgtgtttttctaaaactttgtgttttggcaatcgttttataactaaaataaaatgaaagctaaatctacacgctgtgaatgttgaaatgt

SEQ ID NO: 28061 - DNA, 1519 bp, Homo sapiens
attttttttctactttttaacttatgaatggtgctgcagtaaacatttgtgtacaagtttttgtgtggacatgtgttttctcttctcttggatacgtacctaggtttagaactgccaggtcatacagtaacttcatgtttaaactttcaaggagctgccagactgtttttcaaagcagctgcgccattttacattcccacagccgtgagttgggggggggctccagtttctctgcatccctccagtacttgttattatcttttttgccatacctatcctagtgggtgtgaggttatcaaatcttaacctaagaaacacaggctgggcgcggtggctcacgcctgtaatcccagcactttgggaggccgaggccggtggatcatgaggtcaggaggtcgagaccatcctggctaacgcggtgaaaccccgtctctactaaaaatacaaaaaaattacttgagcgtggtggcgggcgcctgtcgtcccagcttacttgggaggctgaagcaggagaatggcatgaacccaggaggcagagcttgcagtgagctgagatggcatcactgcactccaggctgagcgacagagcaagactccgtctaaaaataaataaataaataaataattgaaacattgacttgagacatagatccactgtgttttcctgtcgtggcaagcctcagatttgagaagctgtcacatttccagatcaaaccatgaagctacttggctttctgatgctgtggttttttttcttttgcttcacaggtggtggtcaccaatacaattccacatgaagtccagaagctccagtgccccaagattaaaactgtggatatcagcatgatcctttcagaggcgatccgtcggatccacaatggggagtccatgtcctaccttttcagaaacataggcttagatgactgagttttcctttaggaaaactcccgagggccaaactggaaacataagagtgactgctcggtgggatggatttcacaggaaccgtcatgcttgttcctccctctcccctgtaacctcacttcttattgattcctaagaagatagaccaactttttatgtcggtttgggtgtttgtgagtttggggagcaatttttataaaagaaaaactttattctcctcttttgaaaaggtaagacctcgttttagttgtaactgtttaaaaaataacacttggaataagatttgtaagctcacaaagccttcttccaaagttgcttgagccaagtgcttaaaaagttaataaaataaaatgatctgtatgatacctgcaattgaaaagccgaaaagattatactgtcaagtccagtaaatgacatttttagagatgcttttgtagacaagcatatggaatatgtgattgtatttattttctgcaactaaaaaaggaataaaaacttgtgtttgtgtgtttttctaaaactttgtgttttggcaatcgttttataactaaaataaaatgaaagctaaatctacacgctgtgaatgttgaaatgt

SEQ ID NO: 28062 - DNA, 1465 bp, Homo sapiens
attttttttctactttttaacttatgaatggtgctgcagtaaacatttgtgtacaagtttttgtgtggacatgtgttttctcttctcttggatacgtacctaggtttagaactgccaggtcatacagtaacttcatgtttaaactttcaaggagctgccagactgtttttcaaagcagctgcgccattttacattcccacagccgtgagttgggggggggctccagtttctctgcatccctccagtacttgttattatcttttttgccatacctatcctagtgggtgtgaggttatcaaatcttaacctaagaaacacaggctgggcgcggtggctcacgcctgtaatcccagcactttgggaggccgaggccggtggatcatgaggtcaggaggtcgagaccatcctggctaacgcggtgaaaccccgtctctactaaaaatacaaaaaaattacttgagcgtggtggcgggcgcctgtcgtcccagcttacttgggaggctgaagcaggagaatggcatgaacccaggaggcagagcttgcagtgagctgagatggcatcactgcactccaggctgagcgacagagcaagactccgtctaaaaataaataaataaataaataattgaaacattgacttgagacatagatccactgtgttttcctgtcgtggcaagcctcagatttgagaagctgtcacatttccagatcaaaccatgaagctacttggctttctgatgctgtggttttttttcttttgcttcacaggtggtggtcaccaatacaattccacatgaagtccagaagctccagtgccccaagattaaaactgtggatatcagcatgatcagaaacataggcttagatgactgagttttcctttaggaaaactcccgagggccaaactggaaacataagagtgactgctcggtgggatggatttcacaggaaccgtcatgcttgttcctccctctcccctgtaacctcacttcttattgattcctaagaagatagaccaactttttatgtcggtttgggtgtttgtgagtttggggagcaatttttataaaagaaaaactttattctcctcttttgaaaaggtaagacctcgttttagttgtaactgtttaaaaaataacacttggaataagatttgtaagctcacaaagccttcttccaaagttgcttgagccaagtgcttaaaaagttaataaaataaaatgatctgtatgatacctgcaattgaaaagccgaaaagattatactgtcaagtccagtaaatgacatttttagagatgcttttgtagacaagcatatggaatatgtgattgtatttattttctgcaactaaaaaaggaataaaaacttgtgtttgtgtgtttttctaaaactttgtgttttggcaatcgttttataactaaaataaaatgaaagctaaatctacacgctgtgaatgttgaaatgt

SEQ ID NO: 28063 - DNA, 1011 bp, Homo sapiens
cgcccctccccgcccaccggcctcgcagtcaccgcggacgccaatcttgtgcatggagtcgccattttgctcctagagaggccgccagaagacccggcgctttcttccttctgcagctgaggctgcggcggggccggggctggggtcggggccaggaggaattttgttgtcagagaataaaaggaggttgtccataattgactttaagcagcaatcagtaaaacattgagctcttcagctccgcctttcttgctctgaaaattggaaaaccaagaaggttttgatgttttgtgtgacgccacctgaattagaaaccaagatgaacataaccaaaggtggtctggtgttgttttcagcaaactcgaattcatcatgtatggagctatcaaagaaaattgcagagcggctaggggtggagatgggcaaagtgcaggtttaccaggaacctaacagagaaacataagagtgactgctcggtgggatggatttcacaggaaccgtcatgcttgttcctccctctcccctgtaacctcacttcttattgattcctaagaagatagaccaactttttatgtcggtttgggtgtttgtgagtttggggagcaatttttataaaagaaaaactttattctcctcttttgaaaaggtaagacctcgttttagttgtaactgtttaaaaaataacacttggaataagatttgtaagctcacaaagccttcttccaaagttgcttgagccaagtgcttaaaaagttaataaaataaaatgatctgtatgatacctgcaattgaaaagccgaaaagattatactgtcaagtccagtaaatgacatttttagagatgcttttgtagacaagcatatggaatatgtgattgtatttattttctgcaactaaaaaaggaataaaaacttgtgtttgtgtgtttttctaaaactttgtgttttggcaatcgttttataactaaaataaaatgaaagctaaatctacacgctgtgaatgttgaaatgt

SEQ ID NO: 28064 - DNA, 630 bp, Homo sapiens
agcgggccagccacagcagagaggtgggggttgtgaccggagttagatgccagcgcagaagggacgtgagcccagccgaggtaccgctgaagaggaatcaattttggtatgcagataatcactgggctcatgggtcttgctctttacaaagagaattcagcggggtgccaagtcgttttctgtgtgggttgagagacaggctgtgcagcccactgttgcataggactaactactacaaatcatgctgagaccgagctatttttgctgcttagaggctttgcagccttgagtaagtttcttcatctggaaacctagcttccctgtctaaaatgggtctcattctagtgcttgcttcactgggttgtcataagcattgtgaacactcagatgttaggcatgagttaacattgtgttggagagataagcagagcctgggatcatacaggagtggaagagtaattcggtttagaatttgcccttcaaattctcatcaatattgatattaaaaacagatttccttggagtgaggcacatcactaataaacatacataataagtttttttatttttattttttttgcagagtcattgctctccagcctgggcaacaagagtgaaactccatcttaa

SEQ ID NO: 28065 - DNA, 420 bp, Homo sapiens
acaaaaacaaaactatttattgcttgtgtctgctttattttcaaaggtctaactcatcttattactatggatttacaccagaaggaaattcagggcttcttcaatattcctgttgacaatttaagagcatctcccttcttattacagtatattcaagaagaggtgagctagctcaaacttttttattttaacattctgattaaggttgaaagatgtatttccatttccttaggatacccctaaaggattaaaacttgatgtattgtacttaaagtaccattatactttatagctataatccaacgcattttagaattctgaatctgcagtttgtttctttagataagctcttaaaattgctttttcttttggacctcaagtacctagaattggactagatatgattgtaatgagtaattt

SEQ ID NO: 28066 - DNA, 1985 bp, Homo sapiens
cgcccctccccgcccaccggcctcgcagtcaccgcggacgccaatcttgtgcatggagtcgccattttgctcctagagaggccgccagaagacccggcgctttcttccttctgcagctgaggctgcggcggggccggggctggggtcggggccaggaggaattttgttgtcagagaataaaaggaggttgtccataattgactttaagcagcaatcagtaaaacattgagctcttcagctccgcctttcttgctctgaaaattggaaaaccaagaaggttttgatgttttgtgtgacgccacctgaattagaaaccaagatgaacataaccaaaggtggtctggtgttgttttcagcaaactcgaattcatcatgtatggagctatcaaagaaaattgcagagcggctaggggtggagatgggcaaagtgcaggtttaccaggaacctaacagagaaacgagagtacaaattcaagagtctgtgaggggaaaagatgttttcatcatccaaactgtttcgaaggacgtgaacaccaccatcatggagctcctgatcatggtgtatgcatgtaagacctcttgtgccaagagcatcattggcgtgataccctactttccttacagcaagcagtgcaagatgagaaaaagaggctccattgtctctaaattgctggcttccatgatgtgcaaagctggtctaactcatcttattactatggatttacaccagaaggaaattcagggcttcttcaatattcctgttgacaatttaagagcatctcccttcttattacagtatattcaagaagagatcccagattacaggaatgcagtaatcgtggccaagtctccagcctcggcgaagagggcacagtcttttgctgagcgcctgcgcctgggaattgcagtgattcatggagaggcgcaggatgccgagtcggacttggtggatggacggcattccccacccatggtcagaagtgtggctgccatccaccccagcctggagatccccatgctgattcctaaagaaaagcccccaatcacggttgtgggtgatgttggaggaaggattgccatcatcgtggatgacatcattgatgatgttgacagctttcttgctgcagcagagaccctgaaggaaagaggtgcatataagatctttgtgatggcaactcatggcttgttgtcttctgacgccccccggcggattgaagagtctgccattgatgaggtggtggtcaccaatacaattccacatgaagtccagaagctccagtgccccaagattaaaactgtggatatcagcatgatcctttcagaggcgatccgtcggatccacaatggggagtccatgtcctaccttttcagaaacataggcttagatgactgagttttcctttaggaaaactcccgagggccaaactggaaacataagagtgactgctcggtgggatggatttcacaggaaccgtcatgcttgttcctccctctcccctgtaacctcacttcttattgattcctaagaagatagaccaactttttatgtcggtttgggtgtttgtgagtttggggagcaatttttataaaagaaaaactttattctcctcttttgaaaaggtaagacctcgttttagttgtaactgtttaaaaaataacacttggaataagatttgtaagctcacaaagccttcttccaaagttgcttgagccaagtgcttaaaaagttaataaaataaaatgatctgtatgatacctgcaattgaaaagccgaaaagattatactgtcaagtccagtaaatgacatttttagagatgcttttgtagacaagcatatggaatatgtgattgtatttattttctgcaactaaaaaaggaataaaaacttgtgtttgtgtgtttttctaaaactttgtgttttggcaatcgttttataactaaaataaaatgaaagctaaatctacacgctgtgaatgttgaaatgt

SEQ ID NO: 28067 - DNA, 1889 bp, Homo sapiens
cgcccctccccgcccaccggcctcgcagtcaccgcggacgccaatcttgtgcatggagtcgccattttgctcctagagaggccgccagaagacccggcgctttcttccttctgcagctgaggctgcggcggggccggggctggggtcggggccaggctctgaaaattggaaaaccaagaaggttttgatgttttgtgtgacgccacctgaattagaaaccaagatgaacataaccaaaggtggtctggtgttgttttcagcaaactcgaattcatcatgtatggagctatcaaagaaaattgcagagcggctaggggtggagatgggcaaagtgcaggtttaccaggaacctaacagagaaacgagagtacaaattcaagagtctgtgaggggaaaagatgttttcatcatccaaactgtttcgaaggacgtgaacaccaccatcatggagctcctgatcatggtgtatgcatgtaagacctcttgtgccaagagcatcattggcgtgataccctactttccttacagcaagcagtgcaagatgagaaaaagaggctccattgtctctaaattgctggcttccatgatgtgcaaagctggtctaactcatcttattactatggatttacaccagaaggaaattcagggcttcttcaatattcctgttgacaatttaagagcatctcccttcttattacagtatattcaagaagagatcccagattacaggaatgcagtaatcgtggccaagtctccagcctcggcgaagagggcacagtcttttgctgagcgcctgcgcctgggaattgcagtgattcatggagaggcgcaggatgccgagtcggacttggtggatggacggcattccccacccatggtcagaagtgtggctgccatccaccccagcctggagatccccatgctgattcctaaagaaaagcccccaatcacggttgtgggtgatgttggaggaaggattgccatcatcgtggatgacatcattgatgatgttgacagctttcttgctgcagcagagaccctgaaggaaagaggtgcatataagatctttgtgatggcaactcatggcttgttgtcttctgacgccccccggcggattgaagagtctgccattgatgaggtggtggtcaccaatacaattccacatgaagtccagaagctccagtgccccaagattaaaactgtggatatcagcatgatcctttcagaggcgatccgtcggatccacaatggggagtccatgtcctaccttttcagaaacataggcttagatgactgagttttcctttaggaaaactcccgagggccaaactggaaacataagagtgactgctcggtgggatggatttcacaggaaccgtcatgcttgttcctccctctcccctgtaacctcacttcttattgattcctaagaagatagaccaactttttatgtcggtttgggtgtttgtgagtttggggagcaatttttataaaagaaaaactttattctcctcttttgaaaaggtaagacctcgttttagttgtaactgtttaaaaaataacacttggaataagatttgtaagctcacaaagccttcttccaaagttgcttgagccaagtgcttaaaaagttaataaaataaaatgatctgtatgatacctgcaattgaaaagccgaaaagattatactgtcaagtccagtaaatgacatttttagagatgcttttgtagacaagcatatggaatatgtgattgtatttattttctgcaactaaaaaaggaataaaaacttgtgtttgtgtgtttttctaaaactttgtgttttggcaatcgttttataactaaaataaaatgaaagctaaatctacacgctgtgaatgttgaaatgt

SEQ ID NO: 28068 - DNA, 1953 bp, Homo sapiens
agcgggccagccacagcagagaggtgggggttgtgaccggagttagatgccagcgcagaagggacgtgagcccagccgaggtaccgctgaagaggaatcaattttgatgaggaaacaagctcagagggttgaaatgacttgtccaaggttacaggccagtggaggcttgaacccaggaggaattttgttgtcagagaataaaaggaggttgtccataattgactttaagcagcaatcagtaaaacattgagctcttcagctccgcctttcttgctctgaaaattggaaaaccaagaaggttttgatgttttgtgtgacgccacctgaattagaaaccaagatgaacataaccaaaggtggtctggtgttgttttcagcaaactcgaattcatcatgtatggagctatcaaagaaaattgcagaaaacgagagtacaaattcaagagtctgtgaggggaaaagatgttttcatcatccaaactgtttcgaaggacgtgaacaccaccatcatggagctcctgatcatggtgtatgcatgtaagacctcttgtgccaagagcatcattggcgtgataccctactttccttacagcaagcagtgcaagatgagaaaaagaggctccattgtctctaaattgctggcttccatgatgtgcaaagctggtctaactcatcttattactatggatttacaccagaaggaaattcagggcttcttcaatattcctgttgacaatttaagagcatctcccttcttattacagtatattcaagaagagatcccagattacaggaatgcagtaatcgtggccaagtctccagcctcggcgaagagggcacagtcttttgctgagcgcctgcgcctgggaattgcagtgattcatggagaggcgcaggatgccgagtcggacttggtggatggacggcattccccacccatggtcagaagtgtggctgccatccaccccagcctggagatccccatgctgattcctaaagaaaagcccccaatcacggttgtgggtgatgttggaggaaggattgccatcatcgtggatgacatcattgatgatgttgacagctttcttgctgcagcagagaccctgaaggaaagaggtgcatataagatctttgtgatggcaactcatggcttgttgtcttctgacgccccccggcggattgaagagtctgccattgatgaggtggtggtcaccaatacaattccacatgaagtccagaagctccagtgccccaagattaaaactgtggatatcagcatgatcctttcagaggcgatccgtcggatccacaatggggagtccatgtcctaccttttcagaaacataggcttagatgactgagttttcctttaggaaaactcccgagggccaaactggaaacataagagtgactgctcggtgggatggatttcacaggaaccgtcatgcttgttcctccctctcccctgtaacctcacttcttattgattcctaagaagatagaccaactttttatgtcggtttgggtgtttgtgagtttggggagcaatttttataaaagaaaaactttattctcctcttttgaaaaggtaagacctcgttttagttgtaactgtttaaaaaataacacttggaataagatttgtaagctcacaaagccttcttccaaagttgcttgagccaagtgcttaaaaagttaataaaataaaatgatctgtatgatacctgcaattgaaaagccgaaaagattatactgtcaagtccagtaaatgacatttttagagatgcttttgtagacaagcatatggaatatgtgattgtatttattttctgcaactaaaaaaggaataaaaacttgtgtttgtgtgtttttctaaaactttgtgttttggcaatcgttttataactaaaataaaatgaaagctaaatctacacgctgtgaatgttgaaatgt

SEQ ID NO: 28069 - DNA, 1962 bp, Homo sapiens
gcaagacatgcaaaagtttaagaatgaggtcaacacattagaagaagagttcctggctttgaagaaagaaaatgttcaacttcataaagaggttgaagaagaaatggagaagcacagaagtaatagcacagaattatcaggaaccctaactgatggtactactgttggcaatgatgatgatggactaaatcagcagattcctaggaaggaaaatgaagagcatgacaggctctgaaaattggaaaaccaagaaggttttgatgttttgtgtgacgccacctgaattagaaaccaagatgaacataaccaaaggtggtctggtgttgttttcagcaaactcgaattcatcatgtatggagctatcaaagaaaattgcagagcggctaggggtggagatgggcaaagtgcaggtttaccaggaacctaacagagaaacgagagtacaaattcaagagtctgtgaggggaaaagatgttttcatcatccaaactgtttcgaaggacgtgaacaccaccatcatggagctcctgatcatggtgtatgcatgtaagacctcttgtgccaagagcatcattggcgtgataccctactttccttacagcaagcagtgcaagatgagaaaaagaggctccattgtctctaaattgctggcttccatgatgtgcaaagctggtctaactcatcttattactatggatttacaccagaaggaaattcagggcttcttcaatattcctgttgacaatttaagagcatctcccttcttattacagtatattcaagaagagatcccagattacaggaatgcagtaatcgtggccaagtctccagcctcggcgaagagggcacagtcttttgctgagcgcctgcgcctgggaattgcagtgattcatggagaggcgcaggatgccgagtcggacttggtggatggacggcattccccacccatggtcagaagtgtggctgccatccaccccagcctggagatccccatgctgattcctaaagaaaagcccccaatcacggttgtgggtgatgttggaggaaggattgccatcatcgtggatgacatcattgatgatgttgacagctttcttgctgcagcagagaccctgaaggaaagaggtgcatataagatctttgtgatggcaactcatggcttgttgtcttctgacgccccccggcggattgaagagtctgccattgatgaggtggtggtcaccaatacaattccacatgaagtccagaagctccagtgccccaagattaaaactgtggatatcagcatgatcctttcagaggcgatccgtcggatccacaatggggagtccatgtcctaccttttcagaaacataggcttagatgactgagttttcctttaggaaaactcccgagggccaaactggaaacataagagtgactgctcggtgggatggatttcacaggaaccgtcatgcttgttcctccctctcccctgtaacctcacttcttattgattcctaagaagatagaccaactttttatgtcggtttgggtgtttgtgagtttggggagcaatttttataaaagaaaaactttattctcctcttttgaaaaggtaagacctcgttttagttgtaactgtttaaaaaataacacttggaataagatttgtaagctcacaaagccttcttccaaagttgcttgagccaagtgcttaaaaagttaataaaataaaatgatctgtatgatacctgcaattgaaaagccgaaaagattatactgtcaagtccagtaaatgacatttttagagatgcttttgtagacaagcatatggaatatgtgattgtatttattttctgcaactaaaaaaggaataaaaacttgtgtttgtgtgtttttctaaaactttgtgttttggcaatcgttttataactaaaataaaatgaaagctaaatctacacgctgtgaatgttgaaatgt

SEQ ID NO: 28070 - DNA, 1706 bp, Homo sapiens
agcgggccagccacagcagagaggtgggggttgtgaccggagttagatgccagcgcagaagggacgtgagcccagccgaggtaccgctgaagaggaatcaattttgatgaggaaacaagctcagagggttgaaatgacttgtccaaggttacaggccagtggaggcttgaacccagaaacgagagtacaaattcaagagtctgtgaggggaaaagatgttttcatcatccaaactgtttcgaaggacgtgaacaccaccatcatggagctcctgatcatggtgtatgcatgtaagacctcttgtgccaagagcatcattggcgtgataccctactttccttacagcaagcagtgcaagatgagaaaaagaggctccattgtctctaaattgctggcttccatgatgtgcaaagctggtctaactcatcttattactatggatttacaccagaaggaaattcagggcttcttcaatattcctgttgacaatttaagagcatctcccttcttattacagtatattcaagaagagatcccagattacaggaatgcagtaatcgtggccaagtctccagcctcggcgaagagggcacagtcttttgctgagcgcctgcgcctgggaattgcagtgattcatggagaggcgcaggatgccgagtcggacttggtggatggacggcattccccacccatggtcagaagtgtggctgccatccaccccagcctggagatccccatgctgattcctaaagaaaagcccccaatcacggttgtgggtgatgttggaggaaggattgccatcatcgtggatgacatcattgatgatgttgacagctttcttgctgcagcagagaccctgaaggaaagaggtgcatataagatctttgtgatggcaactcatggcttgttgtcttctgacgccccccggcggattgaagagtctgccattgatgaggtggtggtcaccaatacaattccacatgaagtccagaagctccagtgccccaagattaaaactgtggatatcagcatgatcctttcagaggcgatccgtcggatccacaatggggagtccatgtcctaccttttcagaaacataggcttagatgactgagttttcctttaggaaaactcccgagggccaaactggaaacataagagtgactgctcggtgggatggatttcacaggaaccgtcatgcttgttcctccctctcccctgtaacctcacttcttattgattcctaagaagatagaccaactttttatgtcggtttgggtgtttgtgagtttggggagcaatttttataaaagaaaaactttattctcctcttttgaaaaggtaagacctcgttttagttgtaactgtttaaaaaataacacttggaataagatttgtaagctcacaaagccttcttccaaagttgcttgagccaagtgcttaaaaagttaataaaataaaatgatctgtatgatacctgcaattgaaaagccgaaaagattatactgtcaagtccagtaaatgacatttttagagatgcttttgtagacaagcatatggaatatgtgattgtatttattttctgcaactaaaaaaggaataaaaacttgtgtttgtgtgtttttctaaaactttgtgttttggcaatcgttttataactaaaataaaatgaaagctaaatctacacgctgtgaatgttgaaatgt

SEQ ID NO: 28071 - DNA, 1590 bp, Homo sapiens
agcgggccagccacagcagagaggtgggggttgtgaccggagttagatgccagcgcagaagggacgtgagcccagccgaggtaccgctgaagaggaatcaattttgatgaggaaacaagctcagagggttgaaatgacttgtccaaggttacaggccagtggaggcttgaacccagaaacgagagtacaaattcaagagtctgtgaggggaaaagatgttttcatcatccaaactgtttcgaaggacgtgaacaccaccatcatggagctcctgatcatggtgtatgcatgtaagacctcttgtgccaagagcatcattggcgtgataccctactttccttacagcaagcagtgcaagatgagaaaaagaggctccattgtctctaaattgctggcttccatgatgtgcaaagctgatcccagattacaggaatgcagtaatcgtggccaagtctccagcctcggcgaagagggcacagtcttttgctgagcgcctgcgcctgggaattgcagtgattcatggagaggcgcaggatgccgagtcggacttggtggatggacggcattccccacccatggtcagaagtgtggctgccatccaccccagcctggagatccccatgctgattcctaaagaaaagcccccaatcacggttgtgggtgatgttggaggaaggattgccatcatcgtggatgacatcattgatgatgttgacagctttcttgctgcagcagagaccctgaaggaaagaggtgcatataagatctttgtgatggcaactcatggcttgttgtcttctgacgccccccggcggattgaagagtctgccattgatgaggtggtggtcaccaatacaattccacatgaagtccagaagctccagtgccccaagattaaaactgtggatatcagcatgatcctttcagaggcgatccgtcggatccacaatggggagtccatgtcctaccttttcagaaacataggcttagatgactgagttttcctttaggaaaactcccgagggccaaactggaaacataagagtgactgctcggtgggatggatttcacaggaaccgtcatgcttgttcctccctctcccctgtaacctcacttcttattgattcctaagaagatagaccaactttttatgtcggtttgggtgtttgtgagtttggggagcaatttttataaaagaaaaactttattctcctcttttgaaaaggtaagacctcgttttagttgtaactgtttaaaaaataacacttggaataagatttgtaagctcacaaagccttcttccaaagttgcttgagccaagtgcttaaaaagttaataaaataaaatgatctgtatgatacctgcaattgaaaagccgaaaagattatactgtcaagtccagtaaatgacatttttagagatgcttttgtagacaagcatatggaatatgtgattgtatttattttctgcaactaaaaaaggaataaaaacttgtgtttgtgtgtttttctaaaactttgtgttttggcaatcgttttataactaaaataaaatgaaagctaaatctacacgctgtgaatgttgaaatgt

SEQ ID NO: 28072 - DNA, 552 bp, Homo sapiens
gcaagacatgcaaaagtttaagaatgaggtcaacacattagaagaagagttcctggctttgaagaaagaaaatgttcaacttcataaagaggttgaagaagaaatggagaagcacagaagtaatagcacagaattatcaggaaccctaactgatggtactactgttggcaatgatgatgatggactaaatcagcagattcctaggaaggaaaatgaagagcatgacaggtaagcctatagcagcgtttaacaggagacaattggtcaagcgtggtggctcacgcctgtaatccagcaatttgggaggccaaggcgggtgaatcacctgaggtcaggagttcaagaccagcctgaccaacatggataaaccccatctctactaaaaatacaaaattagccaggtgtagtggtgcatgcttgtaatcccagttactcaggaggctgaggcaagagaatcgtttgaacctgggaggcggggttgtggtgagccgtgatcatgccattgcactcgagcctgggcaacaagagtaaaactccatttcaaaaaaaaaa

SEQ ID NO: 28073 - DNA, 567 bp, Homo sapiens
ttataatattattttttattatatgttattatttattaatcaatcactttaggtatatgagaaaatattgactcctatctggccttcatcaactgacctcgaaaagcctcatgagatgctttttcttaatgtgattttgttcagcctcactgtttttaccttaatttcaactgcccacacacttgaccgtgcagtcaggagtgactggcttctccttgtcctcatttatgcatgtttggaggagctgattcctgaactcatatttaatctctactgccagggaaatgctacattatttttctaattggaagtataattagagtgatgttggtagggtagaaaaagagggagtcacttgatgctttcaggttaatcagagctatgggtgctacaggcttgtctttctaagtgacatattcttatctaattctcagatcaggttttgaaagctttgggggtctttttagattttaatccctactttctttatggtacaaatatgtacaaaagaaaaaggtcttatattcttttacacaaatttataaataaattttgaactccttctgt

SEQ ID NO: 28074 - DNA, 1702 bp, Homo sapiens
ccagctcaagtcaacatcctgggctgttaacccgcgataaggtcggacggggcctcagtggagaatacgtggggaagttctctggggcgggcgcagtctgctgctgattctgagaaaccgaaactcagctgttaaaaccgctgcctctgcactttggaatcccatctggagactcgctaagcgtcccagccgcatccctcccgcagcgacggcggcccgggacccgcgggctgtgaaccatgaacacccgcaatagagtggtgaactccgggctcggcgcctcccctgcctcccgcccgacccgggatccccaggacccttctgggcggcaaggggagctgagccccgtggaagaccagagagagggtttggaggcagcccctaagggcccttcgcgggagagcgtcgtgcacgcgggccagaggcgcacaagtgcatacaccttgatagcaccaaatataaaccggagaaatgagatacaaagaattgcggagcaggagctggccaacctggagaagtggaaggagcagaacagagctaaaccggttcacctggtgcccagacggctaggtggaagccagtcagaaactgaagtcagacagaaacaacaactccagctgatgcaatctaaatacaagcaaaagctaaaaagagaagaatctgtaagaatcaagaaggaagctgaagaagctgaactccaaaaaatgaaggcaattcagagagagaagagcaataaactggaggagaaaaaaagacttcaagaaaaccttagaagagaagcatttagagagcatcagcaatacaaaaccgctgagttcttgagcaaactgaacacagaatcgccagacagaagtgcctgtcaaagtgctgtttgtggcccacaatcctcaacatgggccagaagctgggcttacagagattctctaaaggcagaagaaaacagaaaattgcaaaagatgaaggatgaacaacatcaaaagagtgaattactggaactgaaacggcagcagcaagagcaagaaagagccaaaatccaccagactgaacacaggagggtaaataatgcttttctggaccgactccaaggcaaaagtcaaccaggtggcctcgagcaatctggaggctgttggaatatgaatagcggtaacagctggggttctctattagttttttcgaggcacctaagggtatatgagaaaatattgactcctatctggccttcatcaactgacctcgaaaagcctcatgagatgctttttcttaatgtgattttgttcagcctcactgtttttaccttaatttcaactgcccacacacttgaccgtgcagtcaggagtgactggcttctccttgtcctcatttatgcatgtttggaggagctgattcctgaactcatatttaatctctactgccagggaaatgctacattatttttctaattggaagtataattagagtgatgttggtagggtagaaaaagagggagtcacttgatgctttcaggttaatcagagctatgggtgctacaggcttgtctttctaagtgacatattcttatctaattctcagatcaggttttgaaagctttgggggtctttttagattttaatccctactttctttatggtacaaatatgtacaaaagaaaaaggtcttatattcttttacacaaatttataaataaattttgaactccttctgt

SEQ ID NO: 28075 - DNA, 997 bp, Homo sapiens
agagaaccacttgaatgaaaagcaggaacagagatcgatgggcgatctatttcccagcaataaactggaggagaaaaaaagacttcaagaaaaccttagaagagaagcatttagagagcatcagcaatacaaaaccgctgagttcttgagcaaactgaacacagaatcgccagacagaagtgcctgtcaaagtgctgtttgtggcccacaatcctcaacatgggccagaagctgggcttacagagattctctaaaggcagaagaaaacagaaaattgcaaaagatgaaggatgaacaacatcaaaagagtgaattactggaactgaaacggcagcagcaagagcaagaaagagccaaaatccaccagactgaacacaggagggtaaataatgcttttctggaccgactccaaggcaaaagtcaaccaggtggcctcgagcaatctggaggctgttggaatatgaatagcggtaacagctggggtatatgagaaaatattgactcctatctggccttcatcaactgacctcgaaaagcctcatgagatgctttttcttaatgtgattttgttcagcctcactgtttttaccttaatttcaactgcccacacacttgaccgtgcagtcaggagtgactggcttctccttgtcctcatttatgcatgtttggaggagctgattcctgaactcatatttaatctctactgccagggaaatgctacattatttttctaattggaagtataattagagtgatgttggtagggtagaaaaagagggagtcacttgatgctttcaggttaatcagagctatgggtgctacaggcttgtctttctaagtgacatattcttatctaattctcagatcaggttttgaaagctttgggggtctttttagattttaatccctactttctttatggtacaaatatgtacaaaagaaaaaggtcttatattcttttacacaaatttataaataaattttgaactccttctgt

SEQ ID NO: 28076 - DNA, 398 bp, Homo sapiens
aattaaggatatgtcaccatttaaagactgatagatgaggactgagcttctccaaagaatgaaagaggaaagctatgcctcaattcacagaggcttggaggaaatatcggaaccagtaaaaagccagagacagagtaaacaaggaggaaggcagaaattatgataaaaccaagccatggaaagaagcagtggtttcttgaaatgtcatatagacacttaagcagtaggcccccaataagtgtgtatgttaggtggattgatttttattttttaatcattgttaatttaaatcagtcttctcatatttcttaacatatacatttattcttcaataattgcttttatatgtaaaaaatatatttttttatttttctagggttctctattagttttttcga

SEQ ID NO: 28077 - DNA, 309 bp, Homo sapiens
aaagagacagaccaaggaagaaacacaaagacagaaatttcacgggcagaagacgtagcccggccattctctgtgatctaagtagcttgaagtaacaacctataatcatggtgaggtatagcacaaacaatactgtaatttgcctttcatcataattttgtgttccagagttcagactgaaaaatggtaactgtttttgttctctgtaatttcaatacaatttagctaaaaagagaagaatctgtaagaatcaagaaggaagctgaagaagctgaactccaaaaaatgaaggcaattcagagagagaag

SEQ ID NO: 28078 - DNA, 302 bp, Homo sapiens
ttttttttctctttgtacctttacaggccagaagctgggcttacagagattctctaaaggcagaagaaaacagaaaattgcaaaagatgaaggatgaacaacatcaaaaggtacttacaagcccctactagttattgctaactgtttatttgaggtactagataattttgaagaatttctgaacagaaatatttagacacatgaaaatcctgaaaacaagaatacaagcattgaaaataaaaggtgagtttctggatgtgttttaagagtatggtggtggctccttctggtcaaaactttca

SEQ ID NO: 28079 - DNA, 306 bp, Homo sapiens
tatttaatctctactgccagggaaatgctacattatttttctaattggaagtataattagagtgatgttggtagggtagaaaaagagggagtcacttgatgctttcaggttaatcagagctatgggtgctacaggcttgtctttctaagtgacatattcttatctaattctcagatcaggttttgaaagctttgggggtctttttagattttaatccctactttctttatggtacaaatatgtacaaaagaaaaaggtcttatattcttttacacaaatttataaataaattttgaactccttctg

SEQ ID NO: 28080 - DNA, 1670 bp, Homo sapiens
ccagctcaagtcaacatcctgggctgttaacccgcgataaggtcggacggggcctcagtggagaatacgtggggaagttctctggggcgggcgcagtctgctgctgattctgagaaaccgaaactcagctgttaaaaccgctgcctctgcactttggaatcccatctggagactcgctaagcgtcccagccgcatccctcccgcagcgacggcggcccgggacccgcgggctgtgaaccatgaacacccgcaatagagtggtgaactccgggctcggcgcctcccctgcctcccgcccgacccgggatccccaggacccttctgggcggcaaggggagctgagccccgtggaagaccagagagagggtttggaggcagcccctaagggcccttcgcgggagagcgtcgtgcacgcgggccagaggcgcacaagtgcatacaccttgatagcaccaaatataaaccggagaaatgagatacaaagaattgcggagcaggagctggccaacctggagaagtggaaggagcagaacagagctaaaccggttcacctggtgcccagacggctaggtggaagccagtcagaaactgaagtcagacagaaacaacaactccagctgatgcaatctaaatacaagcaaaagctaaaaagagaagaatctgtaagaatcaagaaggaagctgaagaagctgaactccaaaaaatgaaggcaattcagagagagaagagcaataaactggaggagaaaaaaagacttcaagaaaaccttagaagagaagcatttagagagcatcagcaatacaaaaccgctgagttcttgagcaaactgaacacagaatcgccagacagaagtgcctgtcaaagtgctgtttgtggcccacaatcctcaacatgggccagaagctgggcttacagagattctctaaaggcagaagaaaacagaaaattgcaaaagatgaaggatgaacaacatcaaaagagtgaattactggaactgaaacggcagcagcaagagcaagaaagagccaaaatccaccagactgaacacaggagggtaaataatgcttttctggaccgactccaaggcaaaagtcaaccaggtggcctcgagcaatctggaggctgttggaatatgaatagcggtaacagctggggtatatgagaaaatattgactcctatctggccttcatcaactgacctcgaaaagcctcatgagatgctttttcttaatgtgattttgttcagcctcactgtttttaccttaatttcaactgcccacacacttgaccgtgcagtcaggagtgactggcttctccttgtcctcatttatgcatgtttggaggagctgattcctgaactcatatttaatctctactgccagggaaatgctacattatttttctaattggaagtataattagagtgatgttggtagggtagaaaaagagggagtcacttgatgctttcaggttaatcagagctatgggtgctacaggcttgtctttctaagtgacatattcttatctaattctcagatcaggttttgaaagctttgggggtctttttagattttaatccctactttctttatggtacaaatatgtacaaaagaaaaaggtcttatattcttttacacaaatttataaataaattttgaactccttctgt

SEQ ID NO: 28081 - DNA, 1056 bp, Homo sapiens
ccagctcaagtcaacatcctgggctgttaacccgcgataaggtcggacggggcctcagtggagaatacgtggggaagttctctggggcgggcgcagtctgctgctgattctgagaaaccgaaactcagctgttaaaaccgctgcctctgcactttggaatcccatctggagactcgctaagcgtcccagccgcatccctcccgcagcgacggcggcccgggacccgcgggctgtgaaccatgaacacccgcaatagagtggtgaactccgggctcggcgcctcccctgcctcccgcccgacccgggatccccaggacccttctgggcggcaaggggagctgagccccgtggaagaccagagagagggtttggaggcagcccctaagggcccttcgcgggagagcgtcgtgcacgcgggccagaggcggtaggagcaagcctacgtcccagcaagactcgcagataaactagcctcttacaaccagaggagtggagctgagagagtgaggagcacaagtgcatacaccttgatagcaccaaatataaaccggagaaatgagatacaaagaattgcggagcaggagctggccaacctggagaagtggaaggagcagaacagagctaaaccggttcacctggtgcccagacggctaggtggaagccagtcagaaactgaagtcagacagaaacaacaactccagctgatgcaatctaaatacaagcaaaagctaaaaagagaagaatctgtaagaatcaagaaggaagctgaagaagctgaactccaaaaaatgaaggcaattcagagagagaagagcaataaactggaggagaaaaaaagacttcaagaaaaccttagaagagaagcatttagagagcatcagcaatacaaaaccgctgagttcttgagcaaactgaacacagaatcgccagacagaagtgcctgtcaaagtgctgtttgtggcccacaatcctcaacatggaaacttcctatcctgcctagggatcacagtgtgcccaagaagctgggttacagagcattctctaagggcagaagac

SEQ ID NO: 28082 - DNA, 1703 bp, Homo sapiens
ccagctcaagtcaacatcctgggctgttaacccgcgataaggtcggacggggcctcagtggagaatacgtggggaagttctctggggcgggcgcagtctgctgctgattctgagaaaccgaaactcagctgttaaaaccgctgcctctgcactttggaatcccatctggagactcgctaagcgtcccagccgcatccctcccgcagcgacggcggcccgggacccgcgggctgtgaaccatgaacacccgcaatagagtggtgaactccgggctcggcgcctcccctgcctcccgcccgacccgggatccccaggacccttctgggcggcaaggggagctgagccccgtggaagaccagagagagggtttggaggcagcccctaagggcccttcgcgggagagcgtcgtgcacgcgggccagaggcgcacaagtgcatacaccttgatagcaccaaatataaaccggagaaatgagatacaaagaattgcggagcaggagctggccaacctggagaagtggaaggagcagaacagagctaaaccggttcacctggtgcccagacggctaggtggaagccagtcagaaactgaagtcagacagaaacaacaactccagctgatgcaatctaaatacaagcaaaagctaaaaagagaagaatctgtaagaatcaagaaggaagctgaagaagctgaactccaaaaaatgaaggcaattcagagagagaagagcaataaactggaggagaaaaaaagacttcaagaaaaccttagaagagaagcatttagagagcatcagcaatacaaaaccgctgagttcttgagcaaactgaacacagaatcgccagacagaagtgcctgtcaaagtgctgtttgtggcccacaatcctcaacatggaaacttcctatcctgcctagggatcacagctgggccagaagctgggcttacagagattctctaaaggcagaagaaaacagaaaattgcaaaagatgaaggatgaacaacatcaaaagagtgaattactggaactgaaacggcagcagcaagagcaagaaagagccaaaatccaccagactgaacacaggagggtaaataatgcttttctggaccgactccaaggcaaaagtcaaccaggtggcctcgagcaatctggaggctgttggaatatgaatagcggtaacagctggggtatatgagaaaatattgactcctatctggccttcatcaactgacctcgaaaagcctcatgagatgctttttcttaatgtgattttgttcagcctcactgtttttaccttaatttcaactgcccacacacttgaccgtgcagtcaggagtgactggcttctccttgtcctcatttatgcatgtttggaggagctgattcctgaactcatatttaatctctactgccagggaaatgctacattatttttctaattggaagtataattagagtgatgttggtagggtagaaaaagagggagtcacttgatgctttcaggttaatcagagctatgggtgctacaggcttgtctttctaagtgacatattcttatctaattctcagatcaggttttgaaagctttgggggtctttttagattttaatccctactttctttatggtacaaatatgtacaaaagaaaaaggtcttatattcttttacacaaatttataaataaattttgaactccttctgt

SEQ ID NO: 28083 - DNA, 1114 bp, Homo sapiens
ccagctcaagtcaacatcctgggctgttaacccgcgataaggtcggacggggcctcagtggagaatacgtggggaagttctctggggcgggcgcagtctgctgctgattctgagaaaccgaaactcagctgttaaaaccgctgcctctgcactttggaatcccatctggagactcgctaagcgtcccagccgcatccctcccgcagcgacggcggcccgggacccgcgggctgtgaaccatgaacacccgcaatagagtggtgaactccgggctcggcgcctcccctgcctcccgcccgacccgggatccccaggacccttctgggcggcaaggggagctgagccccgtggaagaccagagagagggtttggaggcagcccctaagggcccttcgcgggagagcgtcgtgcacgcgggccagaggcgcacaagtgcatacaccttgatagcaccaaatataaaccggagaaatgagatacaaagaattgcggagcaggagctggccaacctggagaagtggaaggagcagaacagagctaaaccggttcacctggtgcccagacggctaggtggaagccagtcagaaactgaagtcagacagaaacaacaactccagctgatgcaatctaaatacaagcaaaagctaaaaagagaagaatctgtaagaatcaagaaggaagctgaagaagctgaactccaaaaaatgaaaccaaatacagcatgttctcgacttataagtgggagctaaatgctgagaacacttggacacatagaggggaacaacaaacactgtagcctatcagaaggtagaaggtgggaggagggagaggatcaggaaaaacaactaatagatactaggcttaatacctgggtgatggaataatctgtacaacaaacccccacgaagcacatttacctgtgtaacaaacctgcacatcctgcacatgtacccctgaattcaaaatgaaagttaaggcccattgtggtgactcatacatgtaatcccagctaatcgggagggtgaggcaggagaattgcttgaacccaggaggtggaggttgcagtaagtcaagatcacgcaactgcactccaggtttgggcaacagagcgaga

SEQ ID NO: 28084 - DNA, 236 bp, Homo sapiens
aagggcgtaatgtttcacttggtggagaacgacagggaaatgatgggtctctgaaagtagccatcaaacagattcatagactgtatgtgtaccatggactgaaccagctatactactggaaactagtagacaaggataaataagataatttccctgccagagggacaaacataggttctttgcaagcccataagaggggcatttaacccatctggcaaccttgaacaaaaacaaaa

SEQ ID NO: 28085 - DNA, 655 bp, Homo sapiens
tgagcaaatggtataactatcaataatagtctttcttgtgtttatttttacctcaaaaaagtagtgaattaaatgtatttttaatgcatgccttcacctttaaggggcttacattctgacaggtaggcaaacacaagtctataagtagctacttcgagaagaaggtataatggaaacataaaccaagtattgtgggtaaaagtcttttatatgagaggaaacatggaaagacttcagaaaatcagcctttatttcctctatttttgcagtgtttgtggataattcatatcaatttggtctattgttgaacaagctggtatatgaaataaggtcttacctccctctctccagttgccagatgagccttttaggagactggactttcttttttttttttttttttaattattatactttaagttttagggtacatgtgcacattgtgcaggttagttacatatgtatgtatacatgtgccatgctggtgcgctgcacccactaactcgtcatctagcgagcattgggaagggtatatctcccaatgctatcccttccccctccccccaccccacagcagtccccagagtgtgatgttccccttcctgtgtccatgtgatctcactgttcaattcccacctatgagtgagaatatgcg

SEQ ID NO: 28086 - DNA, 465 bp, Homo sapiens
gactctaaaaaggtgcttactaatactgttatttacagtacaactgctgagaaggaaatcagcttctatccttaggacttacttttcagtaaaataataattttttaaaactatgggaaatatacaaatatttctaatatttcacttaactagtgacttttatccttactccataaaaaagtatctgggccaggcacgctggctcacacctgtaatcccagcattttgggaagccgaggtaggtggatcatgaggtcaggagttcgagacgagcctggccaacatactgaaaccccgttactactaaaaatacaaaaattagccaggtgtggtggcatgtgcctatagtcctaggtacttgggaggctgaggcgggagaatcgcttgaacccgggaggtggaatgcagtgagccgagaccacaccatctgcactccagcctaggtgacagagtgagattccgtct

SEQ ID NO: 28087 - DNA, 391 bp, Homo sapiens
tgagttctagaaacaacgctgggagtgatccagaatgccttagtaaataaaatagatgaaggtttaaaagactccgtctatctttagagctattaaacaaaagagaaacattcaacatcttccctctaatagtcaataagaaagaagaatgtcacaaaagagttcgatcccctctaggctaatggaagggaaaccacctgagtcagagttggtctggagaggcaagcattacacccagtggtctctgatgtcatctcagctctgagccagtggcctcaggggtactgtgtcccaactggagaattaacaaggtgattactgaactgtaattgctggctaaatgtcttccaaagactatcataatctcagaaataagctgacacattacatg

SEQ ID NO: 28088 - DNA, 342 bp, Homo sapiens
gtttaataacttgaacttgaattgctgttacagagattatcaaaactaaatgcttcctgtttttgacatagagatgcatgatgcaagcaacgacaatgtatatttgtttgaacctgatgataagatctctggctgggcgtggtagttcatgcctataatcccagcactttgggaggcaacatggcaaaactctgtctctactaaaaatactaaatttagctgggcatggtggcatgtacctgtaatcccacctactcaagaggcggaggcaggaggatcgcttgaacctgggaggcagaggttgcagtgagcgccactgcactccagtctgggtggcagagt

SEQ ID NO: 28089 - DNA, 310 bp, Homo sapiens
caacctggaaataaaagtagaaataataacatgatctcagaaaagggtttatatatctaaggcaagataacataatctgctgcatcaacaacctaaataatgtaccatatttttcagtatttattatgggtaatacacgtatagagcctgcaacataattttgatgaaagtccttctattcccaaacttatagacatgctttaagtatgggggcaaaaataaaagttttttaaattcctttctagaaaattataaaatccacctgaagtcacaaaatctgtaactatacaagcccagcatgtattatcca

SEQ ID NO: 28090 - DNA, 412 bp, Homo sapiens
tacttgccattatttgaaataattcataagagctatataagctcttcctttactgcctggaatgtttcatatgacctactaaattttgcattactgtattattttagctagtgggaacatttagtataattactttggctattctttattagattatgagcctcccattacttctaaaagactatcttggatgctgtttgggttcagtaaataactatgtattactgcaaaggtatactgagatttctattttaagtggtgtctggctagcagccctggacacaaccttccaaaaatttccagtaaattgactatgaagacacacaaagagatatctgttcgtagtatggataatatagactgattgtcgcttactgccagaatttgagaggaattctggaattgttttcct

SEQ ID NO: 28091 - DNA, 657 bp, Homo sapiens
gcaccgcgtctacctataatgacattgcagcatctagcaaagttacgcatgtactatcctgtaaccgagcagttctgcttctgggaatttattcttcagatacacttgcataaatgatacatggtgtatgtgcaggctcattacttgcagcattgtctgtgataacaacgttagaagcaatgtagatggacaaaatagggtataaattaaggtgcatccatacaaggaggtaccctgtggctatacagaatggtaaaggagctctttagttactcaaatggaatgatcactggaataaattaaagataaagtccacctcaaagcacataaagtattctaacatttgtgtagaaaggtaggagaggggaggatgtacatacagatatttgtaaatacatacaatggaaagataaaacaagatactgactacaggaatgtctagttacttgaactcagaaatcaaaaattcagatagacatttcagaaatattttagctattggttgcttctgggggtgtgggaaactagggtcagggatggggagatagttttcagtatatacccttgtaagtctttggttaactttgaaaagctctttattgtggtgtcataaatacaccttttaaatttgaattattagatgtattactattaaaa

SEQ ID NO: 28092 - DNA, 438 bp, Homo sapiens
  misc_feature (1)..(1): n is a, c, g, or t
ngaagtaaagctaaaaactgaaaatattggcagcccctctgagtctccttggatggggttagatctgctcccagctcttgacctcccagtctcaggctggccagggagatacttaactatccttgggttccctgcaaaaacctgccctccttccctggttgtattctccagccccttgtgggaaagaaggattctagccactgtgcttctgagcaacactgtgtgtcctaggattcattcagttcaggaagttacaaatgaactttccaaagatgctgggcatctctgatttgctggtgactttcagagattcttcatacctattagtggaaatctcacttccattctagagatggcaaagctgagctgccaactttggtagcagagtccagtgcttccagtcctgctctggggcagatgtggcatgtttctaacatt

SEQ ID NO: 28093 - DNA, 261 bp, Homo sapiens
cctgaccgtcccaaattgcaagtaaacaatacgtcggcttagataaagcgcgagtctgaaactaccgaggccggcctgcgagctagcgcggagggcagccccgggccgccagctttgtagcggttcctgcttacaaaagggctcttcttggaaacggggctggtggggaccgtagagggggtggggatatttctagttcataagggaaaggcaaggggtgcttagatgaggattttaagtatgagaagtagtgtgtttggg

SEQ ID NO: 28094 - DNA, 2550 bp, Homo sapiens
cggacgcgtgggtccggacgcgtgggtcgacccacgcgtctatagtagaaggaattggacacttctccagatatttggcttcaaaggagtacctttacttacatgtgctttatggtaagtacattgaattttactttaaatgcattttactacaaagcacaattcatttgtaatgcatatccatcttggattcaatccaaggtgctttagctatcagtagtaccaaaggatctttttacaaggcttcctgtggtattgactctgagaataacacatagtgaagatctgtgggcttttaaaattgttcacagccaatttaagaagacccctcatgaagtctcagttttcagtacagtacatcattcctcctcactaggagcactttgatgtaaaccagaatagctttaaaaagacaaaaaggatcgtagatctgatttttaaatggttggttgctctgacagatctgaacactttgcttcatgactatttcgtcataaaggtatatgtttaaaatctgaatggcagtactagctctatacttttaatactgctttgtattttatatgtaaagtagtattgctgacattttaaaaaaatacaaaatacaaaagaaaccattagaaattaataactgtggctcttccagttgaaataggaattggagagaaaggattagaatattttaattaggggagtagattattgtccaaaggcttttatttagagaaacgggtaattaaaacagcagctttagaatagcttcttactgaatatgcaaaagaataattccttgttatttcctaattgatccaagtctcataaatttagcttttgtcataattccttaccgaaaacaactgaaattgagagtcataaatactgtgggttagaataaaaaccatttgccaaagcaacactctacttagaagcacatgtacatacatggacctcattcagaagtccatgttgtagcagttagaatttgagtatcagccatttcattgtagtaacaaaaattgaattgcattttgtgctcagttgtttattgtaattttatttttgttacattaatattagttaagatatggtcacttgaattttttgtatttaagaattttctgttttaatgcatgttatacttttatgtaggattcccaaccttccctctaaatgggatttaacccacatctgcgagatcagcgttatgctaagaggaaatcactgaggccatatctttttacaatctgaaaaaaaagtagtaaaaaggtagttaaaaaaaaaaaaaggccgggtggtggctcatacctgtaatcctagcactttgggaggccaaggcaggcagatcacttgaggtcaggggttcaaaaccagcctggccaagatggtgaaaccccatctctgctaaaaatacaaaaaaaaattagccgggcatggtggcacgtgcctgtaatcccagctacttgggagactgaggcaggagaattgcttgaacccgggaggcggagattgcagtgagccaagatcacgccgttgcactccagcctgagcaacagagcaagactccatctcaaaaaaacaaaactactttcattaattacccattatttattttagttacttaattttgagttcataaatggccaccctaatggaaagtttgggtatgatcttaggttttatggagatgttttcaatagagattatttttccctcaccctatttgtgaatatataaattaaagtaagacaatggagtaagtaagagggtagatccaaacacagtatgtctaaattctagcactctactggctgcttagaatacaccaaacctggaagacctttccaagagtaaaatcccagtctgccactatcaaaattgccacagtcacttttactacttgtgttcatagtagactcagcacttctttttcactggacctagtataactgagaaataaataactgtgtgcaaaatattggtatcattaaggacccagagctgcccattttctctttgttctaatagggaagcaattactgatagaaatgtgagattaaaaatagggtcctccctgctgctccaaacaaatgcctaaacacagtatgtatctcagtcctctgttcccagagattccaccctagcccaggaaagaactggcctgtgtaaagcaaaacccaagtcatccccctccagaaatttctctggcagccaagcctgaccctaagggttccactttgctttaaaagctaggagtggcctctagagccaggaacacattaatacaacagttcaacctcagcaccaagtcaggtacgaagcgcttgatacgtggaatttttctctatatcaagtttaaatttctggaaatagactttggttgctaatgacaattacagttataccatagtctgtaatttgagaaaaggtgaaatgtatttaatatatatttagttttaataaaaagataaaattattacagaaataattgagagagagaaaatctattataatttatttgaaaaataaaacattttatccagtaaaaaaaaa

SEQ ID NO: 28095 - DNA, 1859 bp, Homo sapiens
cggacgcgtgggtccggacgcgtgggtcgacccacgcgtgggtaattaaaacagcagctttagaatagcttcttactgaatatgcaaaagaataattccttgttatttcctaattgatccaagtctcataaatttagcttttgtcataattccttaccgaaaacaactgaaattgagagtcataaatactgtgggttagaataaaaaccatttgccaaagcaacactctacttagaagcacatgtacatacatggacctcattcagaagtccatgttgtagcagttagaatttgagtatcagccatttcattgtagtaacaaaaattgaattgcattttgtgctcagttgtttattgtaattttatttttgttacattaatattagttaagatatggtcacttgaattttttgtatttaagaattttctgttttaatgcatgttatacttttatgtaggattcccaaccttccctctaaatgggatttaacccacatctgcgagatcagcgttatgctaagaggaaatcactgaggccatatctttttacaatctgaaaaaaaagtagtaaaaaggtagttaaaaaaaaaaaaaggccgggtggtggctcatacctgtaatcctagcactttgggaggccaaggcaggcagatcacttgaggtcaggggttcaaaaccagcctggccaagatggtgaaaccccatctctgctaaaaatacaaaaaaaaattagccgggcatggtggcacgtgcctgtaatcccagctacttgggagactgaggcaggagaattgcttgaacccgggaggcggagattgcagtgagccaagatcacgccgttgcactccagcctgagcaacagagcaagactccatctcaaaaaaacaaaactactttcattaattacccattatttattttagttacttaattttgagttcataaatggccaccctaatggaaagtttgggtatgatcttaggttttatggagatgttttcaatagagattatttttccctcaccctatttgtgaatatataaattaaagtaagacaatggagtaagtaagagggtagatccaaacacagtatgtctaaattctagcactctactggctgcttagaatacaccaaacctggaagacctttccaagagtaaaatcccagtctgccactatcaaaattgccacagtcacttttactacttgtgttcatagtagactcagcacttctttttcactggacctagtataactgagaaataaataactgtgtgcaaaatattggtatcattaaggacccagagctgcccattttctctttgttctaatagggaagcaattactgatagaaatgtgagattaaaaatagggtcctccctgctgctccaaacaaatgcctaaacacagtatgtatctcagtcctctgttcccagagattccaccctagcccaggaaagaactggcctgtgtaaagcaaaacccaagtcatccccctccagaaatttctctggcagccaagcctgaccctaagggttccactttgctttaaaagctaggagtggcctctagagccaggaacacattaatacaacagttcaacctcagcaccaagtcaggtacgaagcgcttgatacgtggaatttttctctatatcaagtttaaatttctggaaatagactttggttgctaatgacaattacagttataccatagtctgtaatttgagaaaaggtgaaatgtatttaatatatatttagttttaataaaaagataaaattattacagaaataattgagagagagaaaatctattataatttatttgaaaaataaaacattttatccagtaaaaaaaaa

SEQ ID NO: 28096 - DNA, 3565 bp, Homo sapiens
agcggaggagacgcagtctccgtcgttgacgttagtcgcagtcttcgctgctaacgttttgttatgagttgctaaaatggtgaaatgctgctccgccattggatgtgcttctcgctgcttgccaaattcgaagttaaaaggactgacatttcacgtattccccacagatgaaaacatcaaaaggaaatgggtattagcaatgaaaagacttgatgtgaatgcagccggcatttgggagcctaaaaaaggagatgtgttgtgttcgaggcactttaagaagacagattttgacagaagtgctccaaatattaaactgaaacctggagtcataccttctatctttgattctccatatcacctacaggggaaaagagaaaaacttcattgtagaaaaaacttcaccctcaaaaccgttccagccactaactacaatcaccatcttgttggtgcttcctcatgtattgaagaattccaatcccagttcatttttgaacatagctacagtgtaatggacagtccaaagaaacttaagcataaattagatcatgtgatcggcgagctagaggatacaaaggaaagtctacggaatgttttagaccgagaaaaacgttttcagaaatcattgaggaagacaatcagggaattaaaggatgaatgtctgatcagccaagaaacagcaaatagactggacactttctgttgggactgttgtcaggagagcatagaacaggactatatttcatgaaataatttcatgttacgttccacctaaaattgtcattggtacaaatttttataaaatctcatttaccatcactaaataatatccatcatttaaagtgctgctttggattctctggagcattatgcattatagttgttatccaaagacttttttgaaaatatgcagaaatttgtggtaattatgtatttgtgtcttgtgacaattatgttttatagacctacactagtgccaggtcactattgtaagatgttaaaatctcaagaaaatttcacagagctaaagaaatgatgtcaaattagtcacattaagctatagtagaaggaattggacacttctccagatatttggcttcaaaggagtacctttacttacatgtgctttatggtaagtacattgaattttactttaaatgcattttactacaaagcacaattcatttgtaatgcatatccatcttggattcaatccaaggtgctttagctatcagtagtaccaaaggatctttttacaaggcttcctgtggtattgactctgagaataacacatagtgaagatctgtgggcttttaaaattgttcacagccaatttaagaagacccctcatgaagtctcagttttcagtacagtacatcattcctcctcactaggagcactttgatgtaaaccagaatagctttaaaaagacaaaaaggatcgtagatctgatttttaaatggttggttgctctgacagatctgaacactttgcttcatgactatttcgtcataaaggtatatgtttaaaatctgaatggcagtactagctctatacttttaatactgctttgtattttatatgtaaagtagtattgctgacattttaaaaaaatacaaaatacaaaagaaaccattagaaattaataactgtggctcttccagttgaaataggaattggagagaaaggattagaatattttaattaggggagtagattattgtccaaaggcttttatttagagaaacgggtaattaaaacagcagctttagaatagcttcttactgaatatgcaaaagaataattccttgttatttcctaattgatccaagtctcataaatttagcttttgtcataattccttaccgaaaacaactgaaattgagagtcataaatactgtgggttagaataaaaaccatttgccaaagcaacactctacttagaagcacatgtacatacatggacctcattcagaagtccatgttgtagcagttagaatttgagtatcagccatttcattgtagtaacaaaaattgaattgcattttgtgctcagttgtttattgtaattttatttttgttacattaatattagttaagatatggtcacttgaattttttgtatttaagaattttctgttttaatgcatgttatacttttatgtaggattcccaaccttccctctaaatgggatttaacccacatctgcgagatcagcgttatgctaagaggaaatcactgaggccatatctttttacaatctgaaaaaaaagtagtaaaaaggtagttaaaaaaaaaaaaaggccgggtggtggctcatacctgtaatcctagcactttgggaggccaaggcaggcagatcacttgaggtcaggggttcaaaaccagcctggccaagatggtgaaaccccatctctgctaaaaatacaaaaaaaaattagccgggcatggtggcacgtgcctgtaatcccagctacttgggagactgaggcaggagaattgcttgaacccgggaggcggagattgcagtgagccaagatcacgccgttgcactccagcctgagcaacagagcaagactccatctcaaaaaaacaaaactactttcattaattacccattatttattttagttacttaattttgagttcataaatggccaccctaatggaaagtttgggtatgatcttaggttttatggagatgttttcaatagagattatttttccctcaccctatttgtgaatatataaattaaagtaagacaatggagtaagtaagagggtagatccaaacacagtatgtctaaattctagcactctactggctgcttagaatacaccaaacctggaagacctttccaagagtaaaatcccagtctgccactatcaaaattgccacagtcacttttactacttgtgttcatagtagactcagcacttctttttcactggacctagtataactgagaaataaataactgtgtgcaaaatattggtatcattaaggacccagagctgcccattttctctttgttctaatagggaagcaattactgatagaaatgtgagattaaaaatagggtcctccctgctgctccaaacaaatgcctaaacacagtatgtatctcagtcctctgttcccagagattccaccctagcccaggaaagaactggcctgtgtaaagcaaaacccaagtcatccccctccagaaatttctctggcagccaagcctgaccctaagggttccactttgctttaaaagctaggagtggcctctagagccaggaacacattaatacaacagttcaacctcagcaccaagtcaggtacgaagcgcttgatacgtggaatttttctctatatcaagtttaaatttctggaaatagactttggttgctaatgacaattacagttataccatagtctgtaatttgagaaaaggtgaaatgtatttaatatatatttagttttaataaaaagataaaattattacagaaataattgagagagagaaaatctattataatttatttgaaaaataaaacattttatccagtaaaaaaaaa

SEQ ID NO: 28097 - DNA, 3743 bp, Homo sapiens
ctgctcttggacgccagggtgctcgctggcacctcgaagtgcttcttgcttcctccctttcccgtttacttgctgttctttcaaaatatgtactgacattcactattgccagtcaccagctaaaccgtgaggacaaaaagtaaggaaaaatagacacactccaccatgacctcatggaactaacaagactggtggaggaggaagacattaataagagcaatcactgcaataaatttttgttatgagttgctaaaatggtgaaatgctgctccgccattggatgtgcttctcgctgcttgccaaattcgaagttaaaaggactgacatttcacgtattccccacagatgaaaacatcaaaaggaaatgggtattagcaatgaaaagacttgatgtgaatgcagccggcatttgggagcctaaaaaaggagatgtgttgtgttcgaggcactttaagaagacagattttgacagaagtgctccaaatattaaactgaaacctggagtcataccttctatctttgattctccatatcacctacaggggaaaagagaaaaacttcattgtagaaaaaacttcaccctcaaaaccgttccagccactaactacaatcaccatcttgttggtgcttcctcatgtattgaagaattccaatcccagttcatttttgaacatagctacagtgtaatggacagtccaaagaaacttaagcataaattagatcatgtgatcggcgagctagaggatacaaaggaaagtctacggaatgttttagaccgagaaaaacgttttcagaaatcattgaggaagacaatcagggaattaaaggatgaatgtctgatcagccaagaaacagcaaatagactggacactttctgttgggactgttgtcaggagagcatagaacaggactatatttcatgaaataatttcatgttacgttccacctaaaattgtcattggtacaaatttttataaaatctcatttaccatcactaaataatatccatcatttaaagtgctgctttggattctctggagcattatgcattatagttgttatccaaagacttttttgaaaatatgcagaaatttgtggtaattatgtatttgtgtcttgtgacaattatgttttatagacctacactagtgccaggtcactattgtaagatgttaaaatctcaagaaaatttcacagagctaaagaaatgatgtcaaattagtcacattaagctatagtagaaggaattggacacttctccagatatttggcttcaaaggagtacctttacttacatgtgctttatggtaagtacattgaattttactttaaatgcattttactacaaagcacaattcatttgtaatgcatatccatcttggattcaatccaaggtgctttagctatcagtagtaccaaaggatctttttacaaggcttcctgtggtattgactctgagaataacacatagtgaagatctgtgggcttttaaaattgttcacagccaatttaagaagacccctcatgaagtctcagttttcagtacagtacatcattcctcctcactaggagcactttgatgtaaaccagaatagctttaaaaagacaaaaaggatcgtagatctgatttttaaatggttggttgctctgacagatctgaacactttgcttcatgactatttcgtcataaaggtatatgtttaaaatctgaatggcagtactagctctatacttttaatactgctttgtattttatatgtaaagtagtattgctgacattttaaaaaaatacaaaatacaaaagaaaccattagaaattaataactgtggctcttccagttgaaataggaattggagagaaaggattagaatattttaattaggggagtagattattgtccaaaggcttttatttagagaaacgggtaattaaaacagcagctttagaatagcttcttactgaatatgcaaaagaataattccttgttatttcctaattgatccaagtctcataaatttagcttttgtcataattccttaccgaaaacaactgaaattgagagtcataaatactgtgggttagaataaaaaccatttgccaaagcaacactctacttagaagcacatgtacatacatggacctcattcagaagtccatgttgtagcagttagaatttgagtatcagccatttcattgtagtaacaaaaattgaattgcattttgtgctcagttgtttattgtaattttatttttgttacattaatattagttaagatatggtcacttgaattttttgtatttaagaattttctgttttaatgcatgttatacttttatgtaggattcccaaccttccctctaaatgggatttaacccacatctgcgagatcagcgttatgctaagaggaaatcactgaggccatatctttttacaatctgaaaaaaaagtagtaaaaaggtagttaaaaaaaaaaaaaggccgggtggtggctcatacctgtaatcctagcactttgggaggccaaggcaggcagatcacttgaggtcaggggttcaaaaccagcctggccaagatggtgaaaccccatctctgctaaaaatacaaaaaaaaattagccgggcatggtggcacgtgcctgtaatcccagctacttgggagactgaggcaggagaattgcttgaacccgggaggcggagattgcagtgagccaagatcacgccgttgcactccagcctgagcaacagagcaagactccatctcaaaaaaacaaaactactttcattaattacccattatttattttagttacttaattttgagttcataaatggccaccctaatggaaagtttgggtatgatcttaggttttatggagatgttttcaatagagattatttttccctcaccctatttgtgaatatataaattaaagtaagacaatggagtaagtaagagggtagatccaaacacagtatgtctaaattctagcactctactggctgcttagaatacaccaaacctggaagacctttccaagagtaaaatcccagtctgccactatcaaaattgccacagtcacttttactacttgtgttcatagtagactcagcacttctttttcactggacctagtataactgagaaataaataactgtgtgcaaaatattggtatcattaaggacccagagctgcccattttctctttgttctaatagggaagcaattactgatagaaatgtgagattaaaaatagggtcctccctgctgctccaaacaaatgcctaaacacagtatgtatctcagtcctctgttcccagagattccaccctagcccaggaaagaactggcctgtgtaaagcaaaacccaagtcatccccctccagaaatttctctggcagccaagcctgaccctaagggttccactttgctttaaaagctaggagtggcctctagagccaggaacacattaatacaacagttcaacctcagcaccaagtcaggtacgaagcgcttgatacgtggaatttttctctatatcaagtttaaatttctggaaatagactttggttgctaatgacaattacagttataccatagtctgtaatttgagaaaaggtgaaatgtatttaatatatatttagttttaataaaaagataaaattattacagaaataattgagagagagaaaatctattataatttatttgaaaaataaaacattttatccagtaaaaaaaaa

SEQ ID NO: 28098 - DNA, 3540 bp, Homo sapiens
tgtcgaacccacgcgtcgcggacgcgtgggcttttgttatgagttgctaaaatggtgaaatgctgctccgccattggatgtgcttctcgctgcttgccaaattcgaagttaaaaggactgacatttcacgtattccccacagatgaaaacatcaaaaggaaatgggtattagcaatgaaaagacttgatgtgaatgcagccggcatttgggagcctaaaaaaggagatgtgttgtgttcgaggcactttaagaagacagattttgacagaagtgctccaaatattaaactgaaacctggagtcataccttctatctttgattctccatatcacctacaggggaaaagagaaaaacttcattgtagaaaaaacttcaccctcaaaaccgttccagccactaactacaatcaccatcttgttggtgcttcctcatgtattgaagaattccaatcccagttcatttttgaacatagctacagtgtaatggacagtccaaagaaacttaagcataaattagatcatgtgatcggcgagctagaggatacaaaggaaagtctacggaatgttttagaccgagaaaaacgttttcagaaatcattgaggaagacaatcagggaattaaaggatgaatgtctgatcagccaagaaacagcaaatagactggacactttctgttgggactgttgtcaggagagcatagaacaggactatatttcatgaaataatttcatgttacgttccacctaaaattgtcattggtacaaatttttataaaatctcatttaccatcactaaataatatccatcatttaaagtgctgctttggattctctggagcattatgcattatagttgttatccaaagacttttttgaaaatatgcagaaatttgtggtaattatgtatttgtgtcttgtgacaattatgttttatagacctacactagtgccaggtcactattgtaagatgttaaaatctcaagaaaatttcacagagctaaagaaatgatgtcaaattagtcacattaagctatagtagaaggaattggacacttctccagatatttggcttcaaaggagtacctttacttacatgtgctttatggtaagtacattgaattttactttaaatgcattttactacaaagcacaattcatttgtaatgcatatccatcttggattcaatccaaggtgctttagctatcagtagtaccaaaggatctttttacaaggcttcctgtggtattgactctgagaataacacatagtgaagatctgtgggcttttaaaattgttcacagccaatttaagaagacccctcatgaagtctcagttttcagtacagtacatcattcctcctcactaggagcactttgatgtaaaccagaatagctttaaaaagacaaaaaggatcgtagatctgatttttaaatggttggttgctctgacagatctgaacactttgcttcatgactatttcgtcataaaggtatatgtttaaaatctgaatggcagtactagctctatacttttaatactgctttgtattttatatgtaaagtagtattgctgacattttaaaaaaatacaaaatacaaaagaaaccattagaaattaataactgtggctcttccagttgaaataggaattggagagaaaggattagaatattttaattaggggagtagattattgtccaaaggcttttatttagagaaacgggtaattaaaacagcagctttagaatagcttcttactgaatatgcaaaagaataattccttgttatttcctaattgatccaagtctcataaatttagcttttgtcataattccttaccgaaaacaactgaaattgagagtcataaatactgtgggttagaataaaaaccatttgccaaagcaacactctacttagaagcacatgtacatacatggacctcattcagaagtccatgttgtagcagttagaatttgagtatcagccatttcattgtagtaacaaaaattgaattgcattttgtgctcagttgtttattgtaattttatttttgttacattaatattagttaagatatggtcacttgaattttttgtatttaagaattttctgttttaatgcatgttatacttttatgtaggattcccaaccttccctctaaatgggatttaacccacatctgcgagatcagcgttatgctaagaggaaatcactgaggccatatctttttacaatctgaaaaaaaagtagtaaaaaggtagttaaaaaaaaaaaaaggccgggtggtggctcatacctgtaatcctagcactttgggaggccaaggcaggcagatcacttgaggtcaggggttcaaaaccagcctggccaagatggtgaaaccccatctctgctaaaaatacaaaaaaaaattagccgggcatggtggcacgtgcctgtaatcccagctacttgggagactgaggcaggagaattgcttgaacccgggaggcggagattgcagtgagccaagatcacgccgttgcactccagcctgagcaacagagcaagactccatctcaaaaaaacaaaactactttcattaattacccattatttattttagttacttaattttgagttcataaatggccaccctaatggaaagtttgggtatgatcttaggttttatggagatgttttcaatagagattatttttccctcaccctatttgtgaatatataaattaaagtaagacaatggagtaagtaagagggtagatccaaacacagtatgtctaaattctagcactctactggctgcttagaatacaccaaacctggaagacctttccaagagtaaaatcccagtctgccactatcaaaattgccacagtcacttttactacttgtgttcatagtagactcagcacttctttttcactggacctagtataactgagaaataaataactgtgtgcaaaatattggtatcattaaggacccagagctgcccattttctctttgttctaatagggaagcaattactgatagaaatgtgagattaaaaatagggtcctccctgctgctccaaacaaatgcctaaacacagtatgtatctcagtcctctgttcccagagattccaccctagcccaggaaagaactggcctgtgtaaagcaaaacccaagtcatccccctccagaaatttctctggcagccaagcctgaccctaagggttccactttgctttaaaagctaggagtggcctctagagccaggaacacattaatacaacagttcaacctcagcaccaagtcaggtacgaagcgcttgatacgtggaatttttctctatatcaagtttaaatttctggaaatagactttggttgctaatgacaattacagttataccatagtctgtaatttgagaaaaggtgaaatgtatttaatatatatttagttttaataaaaagataaaattattacagaaataattgagagagagaaaatctattataatttatttgaaaaataaaacattttatccagtaaaaaaaaa

SEQ ID NO: 28099 - DNA, 3465 bp, Homo sapiens
agcggaggagacgcagtctccgtcgttgacgttagtcgcagtcttcgctgctaacgattccccacagatgaaaacatcaaaaggaaatgggtattagcaatgaaaagacttgatgtgaatgcagccggcatttgggagcctaaaaaaggagatgtgttgtgttcgaggcactttaagaagacagattttgacagaagtgctccaaatattaaactgaaacctggagtcataccttctatctttgattctccatatcacctacaggggaaaagagaaaaacttcattgtagaaaaaacttcaccctcaaaaccgttccagccactaactacaatcaccatcttgttggtgcttcctcatgtattgaagaattccaatcccagttcatttttgaacatagctacagtgtaatggacagtccaaagaaacttaagcataaattagatcatgtgatcggcgagctagaggatacaaaggaaagtctacggaatgttttagaccgagaaaaacgttttcagaaatcattgaggaagacaatcagggaattaaaggatgaatgtctgatcagccaagaaacagcaaatagactggacactttctgttgggactgttgtcaggagagcatagaacaggactatatttcatgaaataatttcatgttacgttccacctaaaattgtcattggtacaaatttttataaaatctcatttaccatcactaaataatatccatcatttaaagtgctgctttggattctctggagcattatgcattatagttgttatccaaagacttttttgaaaatatgcagaaatttgtggtaattatgtatttgtgtcttgtgacaattatgttttatagacctacactagtgccaggtcactattgtaagatgttaaaatctcaagaaaatttcacagagctaaagaaatgatgtcaaattagtcacattaagctatagtagaaggaattggacacttctccagatatttggcttcaaaggagtacctttacttacatgtgctttatggtaagtacattgaattttactttaaatgcattttactacaaagcacaattcatttgtaatgcatatccatcttggattcaatccaaggtgctttagctatcagtagtaccaaaggatctttttacaaggcttcctgtggtattgactctgagaataacacatagtgaagatctgtgggcttttaaaattgttcacagccaatttaagaagacccctcatgaagtctcagttttcagtacagtacatcattcctcctcactaggagcactttgatgtaaaccagaatagctttaaaaagacaaaaaggatcgtagatctgatttttaaatggttggttgctctgacagatctgaacactttgcttcatgactatttcgtcataaaggtatatgtttaaaatctgaatggcagtactagctctatacttttaatactgctttgtattttatatgtaaagtagtattgctgacattttaaaaaaatacaaaatacaaaagaaaccattagaaattaataactgtggctcttccagttgaaataggaattggagagaaaggattagaatattttaattaggggagtagattattgtccaaaggcttttatttagagaaacgggtaattaaaacagcagctttagaatagcttcttactgaatatgcaaaagaataattccttgttatttcctaattgatccaagtctcataaatttagcttttgtcataattccttaccgaaaacaactgaaattgagagtcataaatactgtgggttagaataaaaaccatttgccaaagcaacactctacttagaagcacatgtacatacatggacctcattcagaagtccatgttgtagcagttagaatttgagtatcagccatttcattgtagtaacaaaaattgaattgcattttgtgctcagttgtttattgtaattttatttttgttacattaatattagttaagatatggtcacttgaattttttgtatttaagaattttctgttttaatgcatgttatacttttatgtaggattcccaaccttccctctaaatgggatttaacccacatctgcgagatcagcgttatgctaagaggaaatcactgaggccatatctttttacaatctgaaaaaaaagtagtaaaaaggtagttaaaaaaaaaaaaaggccgggtggtggctcatacctgtaatcctagcactttgggaggccaaggcaggcagatcacttgaggtcaggggttcaaaaccagcctggccaagatggtgaaaccccatctctgctaaaaatacaaaaaaaaattagccgggcatggtggcacgtgcctgtaatcccagctacttgggagactgaggcaggagaattgcttgaacccgggaggcggagattgcagtgagccaagatcacgccgttgcactccagcctgagcaacagagcaagactccatctcaaaaaaacaaaactactttcattaattacccattatttattttagttacttaattttgagttcataaatggccaccctaatggaaagtttgggtatgatcttaggttttatggagatgttttcaatagagattatttttccctcaccctatttgtgaatatataaattaaagtaagacaatggagtaagtaagagggtagatccaaacacagtatgtctaaattctagcactctactggctgcttagaatacaccaaacctggaagacctttccaagagtaaaatcccagtctgccactatcaaaattgccacagtcacttttactacttgtgttcatagtagactcagcacttctttttcactggacctagtataactgagaaataaataactgtgtgcaaaatattggtatcattaaggacccagagctgcccattttctctttgttctaatagggaagcaattactgatagaaatgtgagattaaaaatagggtcctccctgctgctccaaacaaatgcctaaacacagtatgtatctcagtcctctgttcccagagattccaccctagcccaggaaagaactggcctgtgtaaagcaaaacccaagtcatccccctccagaaatttctctggcagccaagcctgaccctaagggttccactttgctttaaaagctaggagtggcctctagagccaggaacacattaatacaacagttcaacctcagcaccaagtcaggtacgaagcgcttgatacgtggaatttttctctatatcaagtttaaatttctggaaatagactttggttgctaatgacaattacagttataccatagtctgtaatttgagaaaaggtgaaatgtatttaatatatatttagttttaataaaaagataaaattattacagaaataattgagagagagaaaatctattataatttatttgaaaaataaaacattttatccagtaaaaaaaaa

SEQ ID NO: 28100 - DNA, 3562 bp, Homo sapiens
cagagaccactgtgcaagcctaatcacttcccaagaagggttttgctttaaagttttgttatgagttgctaaaatggtgaaatgctgctccgccattggatgtgcttctcgctgcttgccaaattcgaagttaaaaggactgacatttcacgtattccccacagatgaaaacatcaaaaggaaatgggtattagcaatgaaaagacttgatgtgaatgcagccggcatttgggagcctaaaaaaggagatgtgttgtgttcgaggcactttaagaagacagattttgacagaagtgctccaaatattaaactgaaacctggagtcataccttctatctttgattctccatatcacctacaggggaaaagagaaaaacttcattgtagaaaaaacttcaccctcaaaaccgttccagccactaactacaatcaccatcttgttggtgcttcctcatgtattgaagaattccaatcccagttcatttttgaacatagctacagtgtaatggacagtccaaagaaacttaagcataaattagatcatgtgatcggcgagctagaggatacaaaggaaagtctacggaatgttttagaccgagaaaaacgttttcagaaatcattgaggaagacaatcagggaattaaaggatgaatgtctgatcagccaagaaacagcaaatagactggacactttctgttgggactgttgtcaggagagcatagaacaggactatatttcatgaaataatttcatgttacgttccacctaaaattgtcattggtacaaatttttataaaatctcatttaccatcactaaataatatccatcatttaaagtgctgctttggattctctggagcattatgcattatagttgttatccaaagacttttttgaaaatatgcagaaatttgtggtaattatgtatttgtgtcttgtgacaattatgttttatagacctacactagtgccaggtcactattgtaagatgttaaaatctcaagaaaatttcacagagctaaagaaatgatgtcaaattagtcacattaagctatagtagaaggaattggacacttctccagatatttggcttcaaaggagtacctttacttacatgtgctttatggtaagtacattgaattttactttaaatgcattttactacaaagcacaattcatttgtaatgcatatccatcttggattcaatccaaggtgctttagctatcagtagtaccaaaggatctttttacaaggcttcctgtggtattgactctgagaataacacatagtgaagatctgtgggcttttaaaattgttcacagccaatttaagaagacccctcatgaagtctcagttttcagtacagtacatcattcctcctcactaggagcactttgatgtaaaccagaatagctttaaaaagacaaaaaggatcgtagatctgatttttaaatggttggttgctctgacagatctgaacactttgcttcatgactatttcgtcataaaggtatatgtttaaaatctgaatggcagtactagctctatacttttaatactgctttgtattttatatgtaaagtagtattgctgacattttaaaaaaatacaaaatacaaaagaaaccattagaaattaataactgtggctcttccagttgaaataggaattggagagaaaggattagaatattttaattaggggagtagattattgtccaaaggcttttatttagagaaacgggtaattaaaacagcagctttagaatagcttcttactgaatatgcaaaagaataattccttgttatttcctaattgatccaagtctcataaatttagcttttgtcataattccttaccgaaaacaactgaaattgagagtcataaatactgtgggttagaataaaaaccatttgccaaagcaacactctacttagaagcacatgtacatacatggacctcattcagaagtccatgttgtagcagttagaatttgagtatcagccatttcattgtagtaacaaaaattgaattgcattttgtgctcagttgtttattgtaattttatttttgttacattaatattagttaagatatggtcacttgaattttttgtatttaagaattttctgttttaatgcatgttatacttttatgtaggattcccaaccttccctctaaatgggatttaacccacatctgcgagatcagcgttatgctaagaggaaatcactgaggccatatctttttacaatctgaaaaaaaagtagtaaaaaggtagttaaaaaaaaaaaaaggccgggtggtggctcatacctgtaatcctagcactttgggaggccaaggcaggcagatcacttgaggtcaggggttcaaaaccagcctggccaagatggtgaaaccccatctctgctaaaaatacaaaaaaaaattagccgggcatggtggcacgtgcctgtaatcccagctacttgggagactgaggcaggagaattgcttgaacccgggaggcggagattgcagtgagccaagatcacgccgttgcactccagcctgagcaacagagcaagactccatctcaaaaaaacaaaactactttcattaattacccattatttattttagttacttaattttgagttcataaatggccaccctaatggaaagtttgggtatgatcttaggttttatggagatgttttcaatagagattatttttccctcaccctatttgtgaatatataaattaaagtaagacaatggagtaagtaagagggtagatccaaacacagtatgtctaaattctagcactctactggctgcttagaatacaccaaacctggaagacctttccaagagtaaaatcccagtctgccactatcaaaattgccacagtcacttttactacttgtgttcatagtagactcagcacttctttttcactggacctagtataactgagaaataaataactgtgtgcaaaatattggtatcattaaggacccagagctgcccattttctctttgttctaatagggaagcaattactgatagaaatgtgagattaaaaatagggtcctccctgctgctccaaacaaatgcctaaacacagtatgtatctcagtcctctgttcccagagattccaccctagcccaggaaagaactggcctgtgtaaagcaaaacccaagtcatccccctccagaaatttctctggcagccaagcctgaccctaagggttccactttgctttaaaagctaggagtggcctctagagccaggaacacattaatacaacagttcaacctcagcaccaagtcaggtacgaagcgcttgatacgtggaatttttctctatatcaagtttaaatttctggaaatagactttggttgctaatgacaattacagttataccatagtctgtaatttgagaaaaggtgaaatgtatttaatatatatttagttttaataaaaagataaaattattacagaaataattgagagagagaaaatctattataatttatttgaaaaataaaacattttatccagtaaaaaaaaa

SEQ ID NO: 28101 - DNA, 526 bp, Homo sapiens
tcctctctaaatccccaacaccgagcctgagaacctgctgcagtactcttttcctgtcacaccttatcaaatgcaatagccatccaataaagtaacccagttaaaaacttaatttaaatttgtttgataggtaaaaattaaacttagcagcaccacattgaatgaacaaaagctgtagagtcattgcaagtgtcatgctattcatagagataagtgcttcccatccataatattctgcagtctttgtgtatgcctggccttagtaaaaggagggatgcccttagcaccctaaatattgcttctacccccatcttcttcctgtgttccttaaacctctatcaccaacttaaaaatgttctccaggcattgtaaatgaagaaacagcttagacctagttataagcttttatccaactacatatctgtctgatttaataacttggtgtttatgtttttaggaacatagctacagtgtaatggacagtccaaagaaacttaagcataaattagatcatgtgatcggcgag

SEQ ID NO: 28102 - DNA, 157 bp, Homo sapiens
gtcagggctaaagaaaataagtcacgaacacctacgtatatgcttgtgaataagaaaaatgaaaaagcactgaacgaaaccgaacctcccactataaactttatccaattatttgattaatgccatcttctcagatgctagaagttgatgatggtta

SEQ ID NO: 28103 - DNA, 333 bp, Homo sapiens
gtttgtttgtttgttttttccagagggcagttgaaactgttaaagcaaagcgggctcccaagtgtctaagtttaacttttcttccctttgttgaatggatttcactgttatatgttttggtgcagtttataaatacagcttcagcagtcactatggtcaattttcttaaaacacttcatgatgggttaaacattattgcctttggaagctttaaggcgtgagtaacattatgcttatttgttttgtatatttacactatatataccataccgcaaaagtctttttgacatttatttatacagaggagaggacttttttcaagagttggtgagc

SEQ ID NO: 28104 - DNA, 1528 bp, Homo sapiens
aggctaccacgcccagctaatttttatatttttagtagagacggggtttcaccatggtagccagaatggtctctatctcttgaccttgtgatccgcccgcctcagcctcccaaagtgctgggattacaggcgtgagccactgcgcccggcttcctctggtaatcttacacctttacagaattaatctaaactggtggctcataaatgacattaaaaacaaaaaaaaaatctggatgcagtggctcattcctatagtcccagcactttgggaggccaaggcgggaggatcatctgagcccaggagtttggggctgtagtgaactatgatcatacaacttcattctagcctgggtgacaaagtgacaccctgtctctaaacaaaaatcaagaaacaaaaaacttgtatttccctgcagctttgggaagccagaacacaatattgcagtgaatctgaattttctgtgacaaataaattattaaattggcacatatgatcatcaccagtcatgtctcatcaaaagcctttattatgatgcttgtacattttgaagaatttagaattaatgagaagttaaccctttagtcattgtaacacaatcatattttaatcagctttttcttttgctaccaagagtttcaaaaaataaatgcagtatttgatttcaggctgctaaatgggctcatttagcattcattccttgatgtagacattaaaaaaaaaactgaatagcattctttccaggataactaataaagcagacatgctaagcctataaatacatcagcactgcagcacacgtttaaggttgccacggacaaggatcacacaatagagaacactgtagtaacatttcggtctgctcacaagacccagaacattgatcagtttttgttgttggtttattatttttctggttaaaaaattgtgaaaagtttgttttagctagatgatattttaatagctgcgagtgctttggaactataaagatgtcactacttaacacatataccttatgttttgttttgttttgttttacactcagtataaatcaggagaagttagccaaccatctagcatttagaatcctcttttttattgtcttctaaggatatggatgttcccataacagcaacaaaacagcaacaaaaacatttcataaatatcacttgatagactgtaagcacctgcttaactttgtgtcccaaatatttagtgtgtatatatatatatatatatacacacacacacacatatatattcaacaaataaagcaaaatataacatgcatttcacattttgtctttccctgttacgattttaatagcagaactgtatgacaagtttaggtgatcctagcatatgttaaattcaaattaatgtaaaacagattaacaacaacaaagaaactgtctatttgagtgaagtcatgctttctattataataacttggcttcggttatccatcaaatgcacacttatactgttatctgattgtttataataaagaatactgtacttataaaaatt

SEQ ID NO: 28105 - DNA, 1481 bp, Homo sapiens
gggggcggggtaggcggggaggccgcgccggggtcaggggggccagcgcccaccgggtacgagcgcgctggtgaggcaggcccggccgcgcccgcgcccccggcgcacggtcctcccgggagccggtttcggggacggcggcggggagtgggcgctggccagggacgagggttgaggaggtcgcggctctcatgctgggtgggagtcgggccttctgcctgggggttgcgtcagtgtccgaccccgcgatgagtggtcgggacaatttgcaactagagggtggtcctcatgggtaccctgtggggtgtcgcgcgaggtgaagggccaggccatttccgtcgggtcagcgatttccgccttcgccccgctctcgcctggcctggtcagggcctgttttggtacttgttgcgccgattggagtcatctgcgacttgtttgccctcctctgaactcctgaaagccagggctccgtctaggtctcctcctagtcttattctcccagctttcgttgttaagacaaattccttacgttcctggccctttacagaccggccctacagaacccacacccccagctccgactttcttctccagattgggtacttcccagggagtaaagggaatctgtagcttttgtggtttgtcctgctgggaaaatttgggggtaagtggtgggccttctctggacgaccacccacaaatctgtgtgcccaaacggagacaggacccagggtctggacatcaggcaaggggtactctgcagtaaacgtggacattggccgtttcgtgggtttgttttcactctgccaagtccttgaggcgtacacttttgtgtcactcatttatcttgaaagaaaaggttaacagcccaacagagtagttcgctttggtatctggagtggtaatcagagtgccagaactggagagaacattgccgtgtacagatgtttgccttttaccagggcactgaaggcataaaacccttagttaatgcttaactgagtgaaccatgaaagtcatgtgactccaaaggtcgactctagaaatgcggcagtccatgtagcactgtgatgtagaaattctatgatatatgggtcagtgttcacaggcagggagagggggagtcttcaacatctttgaattaaaaagcatctggggcaaaaacaaataaatacacacatatcagtgaactgctttaagttcagttagagaaggtgagattaaagaccagaagaaactcgagggagactgctgtataagtcccagttatctttccaaacagacaggttcatcacagcagtgaaggctagtcttcatctcccttcttgtgggattttctacattaatgtgcagatctgcccttggagaatggggcgtgcatgattgggctgtggtttgctggagtttcatcttactgaagttgcagacacggtgggtttctgtgacaatggtttacactgaaagtagcaaagtcaaggcat

SEQ ID NO: 28106 - DNA, 188 bp, Homo sapiens
cccaggcatctcttagttgccacaggactcctggcagaagttccagcaggtccctcttgactagaccccagctcataagaaggactcaaaccaaatcgcactgccttttgccaaaacggactcaaaccaaatcagctatgcttttcatttacggtgtgccttttcatttaaagctgtgcctttcattt

SEQ ID NO: 28107 - DNA, 593 bp, Homo sapiens
gagatccatctcaagtgctgccctctcctggaagtctacctcttgtagtgcagtcacattttactgaaatgtataattctgggaatttcacatgctgagaaatttaaataaaagtttcttgctttatgtgcaaaatttgaaataatccaaacccctctctattagaaaacacataacttcctattgccatagaacatacagctttaaaaagaaacactagctatcttttgtcagttttttgtgacccaccagcattctgaagtacaggatatctgtcagtgccattgcttgaaaacattccccagaagcattcactttagaatggaagttagatgttgtaaactcgggaagaaggccaaatgatgaccatgacacaacttgctacaaaatattaaagctgatgctgggggtgagggggcagaatttaaaagcacacttaaaatagttgaattgtgaaaaggcataaagaaagcgtggtgattaagtgtgggctgaggagccagatggctctagttcaaatcctgaatctaacacctattggatgactttgcccaaataattcaatctctcatgtttcctcatttaaaaaaaaa

SEQ ID NO: 28108 - DNA, 617 bp, Homo sapiens
aagtatattgatttaaccaaatacattaaattaagtggatggatgaaagttaccaatatcataaggaaatagccagacaaatccagaatataggtcattctacaaaacaactttgttggactcgaaaaagtcaatgtcatgtgggaaaaaaaggtacggggatgttatgcttcgaatgtgtcccccaaatttcatgtgttggaaacctaattcccaaattcatctgttgattgcatttggaggtagggtgtttgaggggtaattgggattagataaggttatcaggttgggatccccatgatgggactggtggctttatatgaagaggaagagagacctgagctatacgctcttgttctctatgtgatgccttccaccatgttgtgacacagcaggaaggccctcaccagatgccagtgccagtcccttcaactttccagcctgcagaactataacaaataatgtgttttcataaattactcattctcagatagtctgttatagtaatagaaaacagactaagggtattaatctagaatctaaacagacattcaaatgcaatgtgtgaatcttagttggatcctgaattagacaaaacaaaaacagctaaaaaaaaa

SEQ ID NO: 28109 - DNA, 661 bp, Homo sapiens
  misc_feature (1)..(1): n is a, c, g, or t
ntgtaattttatgagatgctgcttttttaaaattaatttattattattatacttaaagttttagggtacatgtgcacaatgtgcaggttagttacatatgtatatctccttctatttgttcttttgccctttgtgtagtccgttttgtagattgccttaatgtctccaaacactaattgtgtcctattttgtaatgaaatccatattttacaaaattctgtgactagttgagggataagaaatgttgtttaataatagaaaaactttgaaccaaattggctcatttagctattaaatttctgacatccatcctgggtttacaacagtttcagatcaaaggtcaagcagacaacttgagatccttgcacccacacaacagcaactttgctgcatttctacacacatgtttaaagagttttgcttcatgttttgttatttagttttaaacaacatagaagcacctattattctgtgtttttactcttccaaacaattatacttcaggtacaaaaacaaagagaactaaaacaggtgacagatgtattaactaactttatttaggtaatcatttcacaatatataagttcatcaaagtatctcgttatacaccttaaatatatacaattttaattttcgattatatttcaatgaagctggaaag

SEQ ID NO: 28110 - DNA, 439 bp, Homo sapiens
cattgaaatgcaagcattcttgaatcaggtatcttttaacaaataaaatatttatcaggacatacattttatgattttatgttccattttatccaaatcttaccaggttttgactcattttgtcttaatcatgagtttgaataatttgtaactacttcttctgtccttgccccttgccccactcttactgcctactcccactctacacccccatcacattggttaatcagaagttgcctggccagatgtggtgcctcacacctgtattcctagcactttggcagctcaggcaggtagatcgcttgagcctaggagttagagtccagcctgggcaacatggcgaaaccctgtccctaccaaaaaaattacaaaaattagccaggcctggtgttatgtgcctgtagtcccaactacttgggaggctgaggtgggagaatat

SEQ ID NO: 28111 - DNA, 107 bp, Homo sapiens
gttcaataaataagagacattttccatagtattcatattttgaacatgatgaacaagatttagccaaaaaatatgtgcatattcttatgactcagggacatcacaca

SEQ ID NO: 28112 - DNA, 1851 bp, Homo sapiens
gaaaagccgccggtatttctccacctggctctcctctacctccaggcaggcgcacccgaggtccccctcccaccccaccttctgccctcccgcacacttggaccagtgctgttgacccggaagcggacatttctgcagctattctaagcacacgtcggcggagggagcgggacgtggccagcggtcagcggcgaaggaggcaggccctgcgcggggatcacggaagccctgtgattcaccatgaagttccagtacaaggaggtccatccctttgagtatcggaaaaaggaaggagaaaagatccggaagaaatatccggacagggtccccttgattgtagagaaggctccaaaagcaagggtgcctgatctggacaggaggaagtacctagtgccctccgaccttaccgatggccagttctaccttttaatccggaagagaatccacctgagacctgaggacgccttattcttctttgtcaacaacactatccctcccactagtgctaccatgggccaactatatgaggacagtcatgaggaagatgattttctgtatgtggcctacagtaatgagagtgtctatgggaaatgagtggttggaagcccagcagatggaagcacctggacttaggggtaggggaggggtgtgtgtgtgacttggggaaagagagggcggctcccaccgtgaggagacagaaggtgaagacatatagaaactttacaccgcacacaccgtcaacgcattttcacatgctcaactgatattttttgttgcttccttggcccagggagaaagcatgtcaggacagagctgttggattggctttgatagaggaatggggatgatgtaattttatggcattcctgagatttaatttttgtgcagtttcatagaaaggtcggtcaggaggtggacaagttggggtcagagatgatggcagtccagcagcaactccctgtgctcccttctctttgggcagagattctgtttttgacagttgcacaagacaggtagggaaaggggacttgtggtagtgggccatacctggggacgaaaagagacccactgtaattgatgcatcgtggcccccgatcttccgtatcccacacttcttttctcccatcccagttgcaatctcactcacaaacatcacagtaccaccccaggggcggcagtagacaccaacccagaaatttagacagggatctcttatctttggaaaataggggttaggcatgagggtggttatgattaagaagataattttgttgttaaatagcattaaactggaattgacagagtgagttgagcatctctgtctaacctgctctttctctctggtgctcctcatctcacccctaccttggaatttaataagcttcaggcatttccaattgcagactaaaaccacttctaccatctcctctagtattttccatgtatcaggacagagatgtcttatgtagggaaggggcaggtatgaagtgaggtagattatctatacctctcactcattcaggattctcgctcccatgctgctgtcccttcattctcacactcacaggaatgctatgtgatggccagctgcttcccttcttggttatccactgcagctgctagttagaaaggtttgcagggatgacttttagtaaatcatggggattttattgatttattatcacttataggattttgtggggtgggagtggggagcaggaattgcactcagacatgacatttcaattcatctctgcaaatgaaaagggttcttcctcttgggggaaatctgtgtgtcagttctgtcagctgcaagttcttgtgtaatgaagtcaatgctgtcaggccaag

SEQ ID NO: 28113 - DNA, 236 bp, Homo sapiens
gatcttgacccctgtaagtcagcatggggcagtagtactattactgggcgtcactcttacgttgtgcggctggcatgcacttacctgcatcctgtgacagtaaatgaaatgtaagctccctggaaggggcctgggcaatgaggcgccagaagcataaacttctttggctttgtggatttgctgcacaaaacgataaaagaatgatgcccatcacaacctgtttttaatgatgaaaa

SEQ ID NO: 28114 - DNA, 494 bp, Homo sapiens
  misc_feature (489)..(492): n is a, c, g, or t
tttctatttaaaaaatttacatttaacatgagcaaactctagaaatcagcctctgagatggcccacaaggatccctgcatcctggtatcccaagcccttgtgtgatctactccgcttgagggcgggctgggggtattgaggcttttctaatgaacagaatacagaaggcgtgatagatgggatgtcacttttgtggcttctgtcttgggtgctcgctctctctctctctctggatttctcactcttggggaagccagattctttgtctccaggcagccctgtggagagccccacattaacttggaaatggatcttctgacgctgccaacatccatgtaaggaaacttgaaggtgcctcagctccagcccacagcttgatggcagctcatgagagaccctcagccagaggcccccagctaagccactctggatttctgacccacagaaactgtaagataataaatgtgtgttgttttcagccactaaaannnnaa

SEQ ID NO: 28115 - DNA, 332 bp, Homo sapiens
ccatattttccctcccttcacatccaggaaagaggttggtaacagagtacagtctatggaaagaggcctcctgctgggtggacaaatgctggagaccaaagtagccaccccatccctttcattctccatcccctcactctgcttcacttttctgcatctcctcaccgccaccccaacatttcatgatggatttgtttattgccttctcaaccactgaacaggaactccaagggggcagagactttgtttggttcactaatgcatcgttagtttctggaactgtggctagtattaatacatagcaggtgctcaataaaattatgtattgaatg

SEQ ID NO: 28116 - DNA, 1541 bp, Homo sapiens
  misc_feature (28)..(28): n is a, c, g, or t
gggcagtggggttgaggaccctacaganccctcttcagccccgtggtgatgactttcccctgaggaagccctgtagcgtgcctggaggaaggggctctccaaccccagccccacctagccaccatgaacacttcagccccacctgctgtcagccccaacatcaccgtcctggcaccaggaaagggtccctggcaagtggccttcattgggatcaccacgggcctcctgtcgctagccacagtgacaggcaacctgctggtactcatctctttcaaggtcaacacggagctcaagacagtcaataactacttcctgctgagcctggcctgtgctgacctcatcatcggtaccttctccatgaacctctataccacgtacctgctcatgggccactgggctctgggcacgctggcttgtgacctctggctggccctggactatgtggccagcaatgcctccgtcatgaatctgctgctcatcagctttgaccgctacttctccgtgactcggcccctgagctaccgtgccaagcgcacaccccgccgggcagctctgatgatcggcctggcctggctggtttcctttgtgctctgggccccagccatcctcttctggcagtacctggtaggggagcggacagtgctagctgggcagtgctacatccagttcctctcccagcccatcatcacctttggcacagccatggctgccttctacctccctgtcacagtcatgtgcacgctctactggcgcatctaccgggagacagagaaccgagcacgggagctggcagcccttcagggctccgagacgccaggcaaagggggtggcagcagcagcagctcagagaggtctcagccaggggctgagggctcaccagagactcctccaggccgctgctgtcgctgctgccgggcccccaggctgctgcaggcctacagctggaaggaagaagaggaagaggacgaaggctccatggagtccctcacatcctcagagggagaggagcctggctccgaagtggtgatcaagatgccaatggtggaccccgaggcacaggcccccaccaagcagcccccacggagctccccaaatacagtcaagaggccgactaagaaagggcgtgatcgagctggcaagggccagaagccccgtggaaaggagcagctggccaagcggaagaccttctcgctggtcaaggagaagaaggcggctcggaccctgagtgccatcctcctggccttcatcctcacctggacaccgtacaacatcatggtgctggtgtccaccttctgcaaggactgtgttcccgagaccctgtgggagctgggctactggctgtgctacgtcaacagcaccatcaaccccatgtgctacgcactctgcaacaaagccttccgggacacctttcgcctgctgctgctttgccgctgggacaagagacgctggcgcaagatccccaagcgccctggctccgtgcaccgcactccctcccgccaatgctgatagtcccctctcctgcatccctccaccccagtccc

SEQ ID NO: 28117 - DNA, 380 bp, Homo sapiens
gcaggagagtcgggggaccaggtttgggaatacacttgcatgtacagagcctggggcctggacgccacggcctctcatcttaggacctaatgggacccccgaaaggagccaagtggggccctcggcctcttccttcgttccaggcccatgattttccctacacttctccctggcccaggctccagccacaggcacctctcctgcccccgcccaccctcctgaccgcagctcccaggccctggagacctccaggctttcctgccctgggcagccccacctcacagccagagtcaatgccttcatgggaagggctcccagccacacccagagtggcccaaagctgttgaagtcagcatcctttgtcccatcaggaccctcct

SEQ ID NO: 28118 - DNA, 495 bp, Homo sapiens
gtcactcatccaggctggagtgcagtggtgcaatcacagctcactgcagtctcaacctcttggactctagtgatcctctcaccccaccctcccaaatagttgggaccacaggtgcacaccaccacacccagctaatgaattttttttttttccatagagatgaggtctcaccatgctacccaggctgatctcaggttccagggctcaagtgatccttctgtcttggcctcctaaagtactgggattgcaggtgtgagccaccatacccagccccattttatgttcttttataaaatgtctgtttaaaggtttgctcactttaaaactgggggccaggtgtggtggctcaagtctgcaatcccaatactttgggaggttgaggcaggtgaatcacttgagcccaggagttcaagaccagctgggcaacatggcgaaaccttgtctttacaaaaaatacaaaaattagccaaatgtggtggcatctgtcccagctac

SEQ ID NO: 28119 - DNA, 384 bp, Homo sapiens
agggtaatttaattataaattaataaaatcaagttgttacagtttgaggcacacagaatgaaatgcacaaatctttaagtatataccttggtgaatttttacatatgtatatccactcttctataactaccatataaacagctgtttggatttttatttatttatttttatttatttatttttttagacggagctcgctctgtcgccctgactgaagtgcagtagcgcaacctcggcttactgcaagctccgccaccacggcccagcttaattttatgtatttttagtaggagacgggggtttcaccgtattagccggggtgggtctccaatcttctggacctcgtggatccgcccgcctcagcctcccaaagtgctgggatta

SEQ ID NO: 28120 - DNA, 632 bp, Homo sapiens
cattctctccacaaagtagcctttgagcccaccagccacagaatgtgatataaagatcacccctgcttactccagaatgaacagcctgagacacatatcccttcagtagttggtcttgtgaatgcagtgtcctagtgcaaatgcccatcatctgttgaccccatccttgcccctgcctgccccatgctgtggatatctgggccccctcatcacccatcctgggccccctgaccagtgaggatgccccctcccatctagggtactctgcgtctaaggatgaattccagtgtaattttctctcttctgtaggtttatttatggaagattggacctgttcatacatctgtgggggcagccctccatctcccagctatataaagtctctaaccacagtgttgcattgtggggttaccatgtggtctgacacttccttgcatgaactaccctcactccagccctggacagtccagggcctagcaggcagtgtgtggggcctaccaggtcctggcatccaagctgtgtccaataaagttcttagatgtgactggaaaaaaaaattggattaaaaaaaagcttcagaagttacagagccaactacagagaagcataataaatgaaagagtgtcttctag

SEQ ID NO: 28121 - DNA, 362 bp, Homo sapiens
tggtttggtggttgtcatcagcacacttcagggacttgagattttccccagaacatgccccacgtactccaaaaccagcacaaaccagcccgctccctacctcctgttctgccggaggtgtcggccgctgcctgtcaacagtgttgatctggtctcccaggtgaggacagcaacccagtgggctctggaagaaaatgctagaactcaatgtgtcttgtcttttagaaatttctctgtttggccgggcgtggtggctcacgcctgtaatcccagcactttgggaggccaaggcagggggatcacctgaagtcaggttttcgccatggtcaggctggtctcgaactcctgtcgacgcggccgca

SEQ ID NO: 28122 - DNA, 570 bp, Homo sapiens
aattcggcacgaggattttttttttttgttgttattgttgtttataatagagctgttttaatttgtaagacattaatttgaaagccctttaagactgtttaaaagcttgactgaaaagccataagcagagagttttatttcaacaccagtagaaaagttagaaaattaggcagagaaatgaaatagagggatagagagagctaggaaggctctacacattaattctgtaattacaggggatttttagagagtctgaataatgatcaatcaagccttgagtctttcttaatgtaatttgcccatcagtttaaaaatgtgcatgagaacaggccataatacgtagtcagctagagtcccacaaacccttggcatgccttaatgtttgagaattccattctatttctcattaatctcttgaaagcaaagataattttataaatccttttggaccagtgttttagatggtagtggctgtggcagtgacttttaattagccatcctgaacccatcatttaaaatatttattttgctttcagaaattttgaaataagtaagggaaaaaaccaaatt

SEQ ID NO: 28123 - DNA, 953 bp, Homo sapiens
ctcttttactgttctacacagagaaagggaatgacgtgggctcagtgtacaagaagtaccctcaaggaaggggcttgagaaggactagctcttctattgacttacccagaaaggatacagtttgctcaagccaagagtgggtggcaaaatatgggctcaaaaaattgaagctggagatttccagatgcatgggtcccaactgcactcatcaaaagtcaggacagaggtcagcatccgccaaacactgcagcatcttccccagcgttgagatccatggagtggtgagacacatccagtggacgcccagggagatggaggtgtacatcaggcacttggagaaggtgttaaggcgctatgtccagaggctgcagtggctgctgtccgggagccgccgactgtttggcaccgttttggagagcaaagtatgcatattgctggacacgtcagggtccatgggcccctacctgcagcaggtgaagacagagctggttttgctgatttgggaacagctgcggaagtgctgtgacagttttaacctgctcagctttgcagagagccttcagtcatggcaggacacgctggtggagaccacagatgcagcgtgtcatgaggctatgcaatggggtgacccacctgcaagctcagggcagcacctccatcttgcaagcattgctgaaagctttcagtttccatgatctggaaggattgtacctcctgaccgacggaaagccagacacaagctgcagccttgtcctaaatgaagtccaaaaactcagggagaaaagagatgtgaaagtgcacaccatttccttgaactgctcagacagagcggcggttgagttcctgagaaagctggcttccttcaccggcggacgctatcactgccctgtgggtgaggacacactctccaaaattcacagcctgctgaccaaaggcttcatcaatgaaaaggt

SEQ ID NO: 28124 - DNA, 3242 bp, Homo sapiens
  misc_feature (3242)..(3242): n is a, c, g, or t
agcaaaactaaaaggtagatatctggaatgaatgtatatgttgtaattgaggcagatatttgccttaattggaaggatctaactgctttacaaatattaaacaagtgcttgggcatgattgggagaggaggcagcttagctggaagctgtgcccatcttactgtcactggagaataggatgtcagagctgggcaggactggtacccatcatttgcagtttgcatgtggggaaaccaaagccctaagaaacaacagttcctggcccaaaaaatccatagaaagaggtaactagtggcagatttggggcgccaacctgattttatggattttgagttagattctctaccctctatcaatactaaaaatagattaggagggtttttttttctgtttatcatgttgaatttcattgacttaattagtctttaaatttgaaaacatgttttagggagtttagttctagaaatttctcttagattgaagtgacagaatctgaaagaaaagaatatgattgagctatttgttttcctgaacacctcaccttttatgatgcaataagttactctgagtttcttggcagagtttttgacagctgttgctttcaatggattccattcctgtattccttatgggaggttgtttttaaaatagactactgcgattgaaatgaactcaatatgtagttaagttatagttttcttcaatgtatttttagttacttgggtcacaaatgttcaatttcagcatattttagggtgagtaatcaaaaatgtgaatttgcctttgatttcctaccactgtctgagctatcataaagcattctctttagttgtgatttgattctatagtctgtttctaaatgacatttgtctgtttcttaaatgatctcacagccatggtaataatagatgtgtactcagaagatcaataaggtaatattggaattcatgtgttttttgcaattaaggcaggcatttgccaatgtcttcttttaagcagtagttggaaacatctcaattacagtgtaacaccttagagctaaaaacatttgttcaacacaaactagaatcacaccttctcactagatatcaccaagggaatgtggttttaaaaataaaaagaaaacaatataacgtatcatggcaaccagagcttcccatattattgacaagtagggatcattaggttctggtttgaacattctgaatgtgaacaaaatgaaatagtagttaagaggtgttttcccactgtgtttaaagagaacactagtaattctggtttttctttctaactgctttactgtttcaagggtattcttttaaaactctgatttcaaaggatcagttgaatttatactttagttatgggtgttttgttactttttttttttttgtatcatgactcagtatggttcaatttcctagtaagaagtggggatttgtgtttttggagtcctcagctcacatgtcttgttcctccttcagcacaagctaggggagatcctaccaacactgataggtcagtcattgatggcaatttgaatgtgggtattactctgtgagccaccctgcttcgcttgtttgtaaggagaaatgcatctggttatgtgaatttcccgagagcagcagacatggagggccagactttaaaagcaacgcaagcagattcgaagagctgttgccctcttctaaaaaaggcttttgggaggctgtgttacatgcatgccctaaagcagtcagtctgttagtatgagcaagacatctgaagtacacagttgcttttaggcttgtatagttattttctacacatgccaacacacatgatgataaaggaaccttttctaggaggcattgcagggtttcaatacacaggacatgttctagttacagaagccttgctctgctgtcaacaattgggaaatgctcattttttcatgttttgtgaatactctggtcttgctgtaagctaatgtcatggctgtgggatattagagaagtgggtttatgactctgaagaccagcagacaccagactttaaaagtgcttaaattggaatttggaaactacagtaaagaaaccttcagataccagttccatcctgaagccctctgttgaacaacagggccagatcctaaagctctttcagggagctcttctctggggctggaacagttgattatgcaacaccattgtgtggagattggatcaactgagttgtgttatttttgttttaagtcaccttgtgcgagaacctcaaccgcacctatcttgggaaccgggtatacccttttctttagcactgctatcctttttgtcttcagcacaaataagatgttcaagtgagccagaagcaagaagagccattttagtcttcatagctattggctaagagagataatgagctgatggtctattttaaccttgaaagtaaaaatgtatattttttcactacaagtacattgaacagtaaaaagtgtaacagcaaagtatatatttgatgccttctgtcttttcatgataatgtgctaacaagttgtgttaatattttactcagccagagtctcattcatttgctaagcattgggaacattatgtatattgaccttaaacataggtgtcctatatttggattgtgacttgtagactcaagctaaccttactgcctctttttcacacttgttgaaaggtctgtgaagaacatagttaaagatctccaactttggaaaatatacatgatgtgaaactggggtgctatgttaaaaataaatgtatgataactaaaaaaaaaaaaaaaaaaaaaaaaaaaaaaaaaaaaagaaaaaaaaaaaaaagaaaaaagaaagagagaaggaaagaaaaaaaaggaaaaagaaaaaaaagggggggggggggaaacaaaacacagagacgaacaacagaagacaccacaacacgataatgacaagtcgcgcactacgagtgtgaataatagcaacgcagccggcgcgcagacataagagaagcagagaaaacacgctcaggcctgatagggcgagacccaattgggcgggtatcaagcaaacaccacacgcagaatcgtgcgcagcgaaaaaaaatcgggaggctgttcacacccccagtcgcggcggcagtgggatgttatataatcgcgaggttcaatgaaagatgaggtcgcggacatgccggagcagcagcagccactagtacgacgaacgaaccatgagcagatccgatacacgacan

SEQ ID NO: 28125 - DNA, 2780 bp, Homo sapiens
agcaaaactaaaaggtagatatctggaatgaatgtatatgttgtaattgaggcagatatttgccttaattggaaggatctaactgctttacaaatattaaacaagtgcttgggcatgattgggagaggaggcagcttagctggaagctgtgcccatcttactgtcactggagaataggatgtcagagctgggcaggactggtacccatcatttgcagtttgcatgtggggaaaccaaagccctaagaaacaacagttcctggcccaaaaaatccatagaaagaggtaactagtggcagatttggggcgccaacctgattttatggattttgagttagattctctaccctctatcaatactaaaaatagattaggagggtttttttttctgtttatcatgttgaatttcattgacttaattagtctttaaatttgaaaacatgttttagggagtttagttctagaaatttctcttagattgaagtgacagaatctgaaagaaaagaatatgattgagctatttgttttcctgaacacctcaccttttatgatgcaataagttactctgagtttcttggcagagtttttgacagctgttgctttcaatggattccattcctgtattccttatgggaggttgtttttaaaatagactactgcgattgaaatgaactcaatatgtagttaagttatagttttcttcaatgtatttttagttacttgggtcacaaatgttcaatttcagcatattttagggtgagtaatcaaaaatgtgaatttgcctttgatttcctaccactgtctgagctatcataaagcattctctttagttgtgatttgattctatagtctgtttctaaatgacatttgtctgtttcttaaatgatctcacagccatggtaataatagatgtgtactcagaagatcaataaggtaatattggaattcatgtgttttttgcaattaaggcaggcatttgccaatgtcttcttttaagcagtagttggaaacatctcaattacagtgtaacaccttagagctaaaaacatttgttcaacacaaactagaatcacaccttctcactagatatcaccaagggaatgtggttttaaaaataaaaagaaaacaatataacgtatcatggcaaccagagcttcccatattattgacaagtagggatcattaggttctggtttgaacattctgaatgtgaacaaaatgaaatagtagttaagaggtgttttcccactgtgtttaaagagaacactagtaattctggtttttctttctaactgctttactgtttcaagggtattcttttaaaactctgatttcaaaggatcagttgaatttatactttagttatgggtgttttgttactttttttttttttgtatcatgactcagtatggttcaatttcctagtaagaagtggggatttgtgtttttggagtcctcagctcacatgtcttgttcctccttcagcacaagctaggggagatcctaccaacactgataggtcagtcattgatggcaatttgaatgtgggtattactctgtgagccaccctgcttcgcttgtttgtaaggagaaatgcatctggttatgtgaatttcccgagagcagcagacatggagggccagactttaaaagcaacgcaagcagattcgaagagctgttgccctcttctaaaaaaggcttttgggaggctgtgttacatgcatgccctaaagcagtcagtctgttagtatgagcaagacatctgaagtacacagttgcttttaggcttgtatagttattttctacacatgccaacacacatgatgataaaggaaccttttctaggaggcattgcagggtttcaatacacaggacatgttctagttacagaagccttgctctgctgtcaacaattgggaaatgctcattttttcatgttttgtgaatactctggtcttgctgtaagctaatgtcatggctgtgggatattagagaagtgggtttatgactctgaagaccagcagacaccagactttaaaagtgcttaaattggaatttggaaactacagtaaagaaaccttcagataccagttccatcctgaagccctctgttgaacaacagggccagatcctaaagctctttcagggagctcttctctggggctggaacagttgattatgcaacaccattgtgtggagattggatcaactgagttgtgttatttttgttttaagtcaccttgtgcgagaacctcaaccgcacctatcttgggaaccgggtatacccttttctttagcactgctatcctttttgtcttcagcacaaataagatgttcaagtgagccagaagcaagaagagccattttagtcttcatagctattggctaagagagataatgagctgatggtctattttaaccttgaaagtaaaaatgtatattttttcactacaagtacattgaacagtaaaaagtgtaacagcaaagtatatatttgatgccttctgtcttttcatgataatgtgctaacaagttgtgttaatattttactcagccagagtctcattcatttgctaagcattgggaacattatgtatattgaccttaaacataggtgtcctatatttggattgtgacttgtagactcaagctaaccttactgcctctttttcacacttgttgaaaggtctgtgaagaacatagttaaagatctccaactttggaaaatatacatgatgtgaaactggggtgctatgttaaaaataaatgtatgataactaa

SEQ ID NO: 28126 - DNA, 2770 bp, Homo sapiens
agcaaaactaaaaggtagatatctggaatgaatgtatatgttgtaattgaggcagatatttgccttaattggaaggatctaactgctttacaaatattaaacaagtgcttgggcatgattgggagaggaggcagcttagctggaagctgtgcccatcttactgtcactggagaataggatgtcagagctgggcaggactggtacccatcatttgcagtttgcatgtggggaaaccaaagccctaagaaacaacagttcctggcccaaaaaatccatagaaagaggtaactagtggcagatttggggcgccaacctgattttatggattttgagttagattctctaccctctatcaatactaaaaatagattaggagggtttttttttctgtttatcatgttgaatttcattgacttaattagtctttaaatttgaaaacatgttttagggagtttagttctagaaatttctcttagattgaagtgacagaatctgaaagaaaagaatatgattgagctatttgttttcctgaacacctcaccttttatgatgcaataagttactctgagtttcttggcagagtttttgacagctgttgctttcaatggattccattcctgtattccttatgggaggttgtttttaaaatagactactgcgattgaaatgaactcaatatgtagttaagttatagttttcttcaatgtatttttagttacttgggtcacaaatgttcaatttcagcatattttagggtgagtaatcaaaaatgtgaatttgcctttgatttcctaccactgtctgagctatcataaagcattctctttagttgtgatttgattctatagtctgtttctaaatgacatttgtctgtttcttaaatgatctcacagccatggtaataatagatgtgtactcagaagatcaataaggtaatattggaattcatgtgttttttgcaattaaggcaggcatttgccaatgtcttcttttaagcagtagttggaaacatctcaattacagtgtaacaccttagagctaaaaacatttgttcaacacaaactagaatcacaccttctcactagatatcaccaagggaatgtggttttaaaaataaaaagaaaacaatataacgtatcatggcaaccagagcttcccatattattgacaagtagggatcattaggttctggtttgaacattctgaatgtgaacaaaatgaaatagtagttaagaggtgttttcccactgtgtttaaagagaacactagtaattctggtttttctttctaactgctttactgtttcaagggtattcttttaaaactctgatttcaaaggatcagttgaatttatactttagttatgggtgttttgttactttttttttttttgtatcatgactcagtatggttcaatttcctagtaagaagtggggatttgtgtttttggagtcctcagctcacatgtcttgttcctccttcagcacaagctaggggagatcctaccaacactgataggtcagtcattgatggcaatttgaatgtgggtattactctgtgagccaccctgcttcgcttgtttgtaaggagaaatgcatctggttatgtgaatttcccgagagcagcagacatggagggccagactttaaaagcaacgcaagcagattcgaagagctgttgccctcttctaaaaaaggcttttgggaggctgtgttacatgcatgccctaaagcagtcagtctgttagtatgagcaagacatctgaagtacacagttgcttttaggcttgtatagttattttctacacatgccaacacacatgatgataaaggaaccttttctaggaggcattgcagggtttcaatacacaggacatgttctagttacagaagccttgctctgctgtcaacaattgggaaatgctcattttttcatgttttgtgaatactctggtcttgctgtaagctaatgtcatggctgtgggatattagagaagtgggtttatgactctgaagaccagcagacaccagactttaaaagtgcttaaattggaatttggaaactacagtaaagaaaccttcagataccagttccatcctgaagccctctgttgaacaacagggccagatcctaaagctctttcagggagctcttctctggggctggaacagttgattatgcaacaccattgtgtggagattggatcaactgagttgtgttatttttgttttaagtcaccttgtgcgagaacctcaaccgcacctatcttgggaaccgggtatacccttttctttagcactgctatcctttttgtcttcagcacaaataagatgttcaagtgagccagaagcaagaagagccattttagtcttcatagctattggctaagagagataatgagctgatggtctattttaaccttgaaagtaaaaatgtatattttttcactacaagtacattgaacagtaaaaagtgtaacagcaaagtatatatttgatgccttctgtcttttcatgataatgtgctaacaagttgtgttaatattttactcagccagagtctcattcatttgctaagcattgggaacattatgcaccccagcattagccaaggttgtcaaattgtgggttagaggatagttggcttcaggcctctttcctgttaaatagtaagtctgggaaataggggggtgagggaagtagccccagttccagttgttggcagaatattagagaatgaagcatcggttaattaaccccccaagccctga

SEQ ID NO: 28127 - DNA, 340 bp, Homo sapiens
gtctactactactaaattagcaaccgctcgacgtgtaacagcaaagtatatatttgatgccttctgtcttttcatgataatgtgctaacaagttgtgttaatattttactcagccagagtctcattcatttgctaagcattgggaacattatgtatattgaccttaaacataggtgtcctatatttggattgtgacttgtagactcaagctaaccttactgcctctttttcacacttgttgaaaggtctgtgaagaacatagttaaagatctccaactttggaaaatatacatgatgtgaaactggggtgctatgttaaaaataaatgtatgataactaa

SEQ ID NO: 28128 - DNA, 1019 bp, Homo sapiens
cacctccttgttctagtccaccgctgttgacctagttcccgtccttatctccagtccttatctctagcctcgctgttctcccagcctcccgctcagcgctttgttcttgctctgctcagaagcctttagggaacacatgaacccacaggagagcagtggctcttagctaatcccagcctcttggatggtagtcaccacctgttcctgctgactcttggtgaagcactgaatggggaatcagatctgtctacactgcacagatcatctgacgtcatctcctaatgtcttggtgaagcaggtattacaacactgccctgtctgcttacaggattgctgagaacatctgataaggatgatgggcatgggagcttcccatgacctctgcagaggcacaccgttctgggcctgtgccccgctggcttttctgcagccctttccttcctgccctggcctgattctccctgttcttcaggctccctaagctgcaggcttttctccttcatcatttccttgtaatggtgatatgatgtcagtatgattatcctcatttttgtagatgaggaaactgaggccagacaggtcatataacttgcccaaggtcacacagccaagatgaaatggagctgggatttccccgctcctgtgcactcctctaccacagtgctgtgcctgctgtagttggtgtcaggcctgtgggtgcaaactggtacaacaaacgtctgccctctaggaactcttggtctggtcagcagatagagtggatactcggaccaagtcatcctagcagcacattgagtgcaggggacccagagtgaggagctctgcagcctgacgagatctcagcctgcccaggagaagcagagtctctccccctttccccctgccagtctctgggcagtagagatctgtgcagtttctggtcccaggcatggtggtgttcagctcacttcttatcactccatcttcagggtgagtcagactccgggtgactgccctacccgctaagtgcccttggaaca

SEQ ID NO: 28129 - DNA, 516 bp, Homo sapiens
gtaggtctctgatagatttgttgctaatctaaggaaattattttcttagttggagggttttgttgtttgtttatttgtttaaatggtgaactacatacaaaaaggatactgcttcatgaccatgttggttttataccaataatgtaaagtcagcttaactttagaaaatcaatcattgtaacttcacataagtggtataaacttaacataagcataaaatgttatcattttcatatattgttgcatttggcttactaaagcttcattaagagtttttaagtattgaagatttttgcatcataagtgagactgggcagaataggatggtttccttttctttcgctgcaattatctagattgaaaaagtctgataataccaaggtttggcgagccttatacaatgagctaatatgatactatatacattttgtttgtttctacttcattttctgtcctgacagatcagtgtgttcttcattctgttttctttgggtttattttgttatttttctaact

SEQ ID NO: 28130 - DNA, 387 bp, Homo sapiens
tgcttttagaaccgagctgttcagggtcccagatcctctaatgtaatgccagctgaacccagacagtgacttccacctccatgaatgcaggtgattgcatcctttgaaagcctgtttgcatagcagacaatgaagctgagcagagaaaaacaagatgagagacagatggagtaggagacctgagaaagatgggcttgagtccatgaattctggtgttccctaggccacatttgcccccatccttcccagacttctcctatggagaatgcagcaagaaaataccatcttgaagcagagagcagcgctcatcaggcatcagtccttctggagccttgatcttggacctcccagctccaaaataataagtaataaattgttattgcttat

SEQ ID NO: 28131 - DNA, 970 bp, Homo sapiens
attttaaagattagtttcggtccccatcaatcaattatttattaacccatcaataaaaatttaaatgctctgtgaggtacaatagctattaaaagagacagaggcactttctgtgtccagaggggcttttagtctgctctggaaagcaagatgcgtgcagatgagtgacgcagtgcatcgtgtggatgcaaagggagggactcacatgggaaccagaggagctacgaagggaggcagtggggactggtgggtcgagacctggaaataacacatgaataggcaacaaaggtttcctttcctcttccatgcacttcagtccttgaaaaacgtcttaccacggaattccacagcgtaccaagcgattccacagcttgatggcacactctcctttctcagcattcttgaaaatggcgtgtgagccaagccatcttactgagaaattaccttaaaccatttgatgaaccaaaaatattttgtaatacccatctccgacattaggtaggcaaatcacacagaaacaccgaggtcttctgagtcatatttatctgaaaaatcacagcttgggtgcatgtgaagccagaggagcactcctggggcctgcggtgccatcactcagctcccctgggcttcacatggccatggagcacccagcaagtgtaggctctgagccttcagggaggggcggcatcagccagcaccatcgtctcctgggtcttgtgcctcttccttggttgcggtgttgtcagggccagaattgggcaattccgggtgacatccaggtgtggctgctgacacggagcacaggtgaggttcactgaggtaagtgggccatggccttgggcttctagttcagagcacaccatccactcagcatgtgaacccagctccaaagcgtatgtgtgcatgtgtgtacctgtgcacattgcgcatgtctctgtgtatgcatgtgctttgatgcatgttgatgtac

SEQ ID NO: 28132 - DNA, 411 bp, Homo sapiens
gggcatcgagacaaaagccgagttccctggggacttaccagaacattccagccccacccccgacctgagctcccccaaagagaacccttccccactggaggcatggccccttcaggggagcagtgagaagctttgccagctgcaagtcccctggatcagctcacacctcagaacatcttgtccccagtgagctggcaggggcgccggcccagggcggggggcgctgctgtatctaaccgggtcgattgtgcataaccgtctaggccggttcgtggaatgttcgtggggccccctgcccctccctcagcctccccccgcatccccccaagaaaggaaaattatttttcgtattgtaaactttaaacatgaaaaagctgtttttaatttagcagaaactggcttgaatcttca

SEQ ID NO: 28133 - DNA, 3567 bp, Homo sapiens
agcggactcgaacgcgcgacggcggggggaagatggcggagtccggcggtagcagcggtggtgctggtggcggcggcgctttcggcgcgggcccgggccccgagcgcccgaacagcacggccgacaagaacggggccctcaagtgcaccttctcggcacccagccacagcaccagcctcctgcagggcctggccaccctccgcgctcagggccagctcctcgatgttgtgctgactattaacagagaggcctttcctgcacacaaggtcgtcctggctgcctgcagcgactacttcagggccatgttcaccggcggcatgcgggaggcaagccaggacgtcatcgagctgaagggcgtgtcggcccgtggcctgcggcacatcatcgacttcgcctacagcgccgaggtgacactggacctggactgcgtgcaggacgtgctgggcgcggccgtgttcttgcagatgctgcccgtggtggagctgtgcgaggagttcctgaaggcggccatgagcgtggagacctgcctcaacatcggccagatggccaccaccttcagcctggcctcgctgcgagagtcggtggatgccttcaccttccggcacttcctgcagatcgccgaggaggaggatttcctgcgcctgccactggagcgcctggtcttcttcctgcagagcaaccggctgcagagctgtgccgagatcgacctgttccgcgcggccgtccgctggctgcagcatgacccggcccggcggccgcgcgccagccacgtgctctgccacattcgcttcccgctcatgcagtcgtccgagctggtggacagcgtgcagacgctggacatcatggtggaggacgtgctgtgccgccagtatctgctggaggccttcaactaccaggtgctgcccttccggcagcacgagatgcagtctccgcgcaccgccgtgcgctcggatgtgccctcgctcgtcaccttcggcggcacgccctacaccgacagcgaccgctcggtcagcagcaaggtctaccagctgcctgagccgggagcccgccacttccgcgagctcacggagatggaggtaggctgcagccacacgtgcgtggccgtgctggacaattttgtgtacgtggccggggggcagcacctgcagtaccgcagcggcgagggcgcagtggacgcctgctaccgctacgacccccacctgaatcgctggctgcgcctgcaggccatgcaggaaagccgcatccagttccagctgaacgtgctgtgcggcatggtgtacgccacgggcggccgcaaccgagccggcagcctggcctccgtggagcggtactgcccccggcgcaatgagtggggctacgcctgctcgctgaagcgccgtacctggggccatgctggggccgcctcagggggccgcctctacatctcgggtggctacgggatctcagtggaggacaagaaggccctgcactgctacgaccccgtggccgaccagtgggagttcaaggcgcccatgagcgaaccccgcgtgctacacgccatggtgggtgccggcggccgcatctatgccctcgggggccgcatggaccacgtggaccgctgcttcgacgtgctggctgtggagtactatgtgccggagacggaccagtggaccagcgtgagccccatgcgggccggccagtcagaggccggctgctgcctgctggagaggaagatctacatcgtcgggggctacaactggcgtctcaacaacgtcacgggcatcgtacaggtgtacaacacggacaccgacgagtgggagcgggacctgcacttcccggagtccttcgcaggcatagcctgcgcccccgtcctgctgccccgggccgggaccaggaggtagcccccaagacccccgggaccctggcctgaccgcatgttgtctccaagtggggcttggcgaatgcacgtctgcctgagaaccccagtgccccccttcgcccgggctgcccttgaggggcctgctgcgttgataagcccccctcccaggggtccctccctccctccttcccaaagcagatcctggctgcgagtccatccgagggagcctgccggcaaagcgtctgacatgtggtggcagcaaattcgtccccggggtggtttcctcgcctggcccccgagtccccacgggctggcgggtggaatcccaggtctccagggggtccctgtgcagctccatctcacttctctactgcctcccagccccacggtttcaggcattcagatgtgagctcatcaacattgaacccaaagtcggtggtatatgactcaccctccttccaagtctcctgcgcgcgtgtttttaaaataaactcacccgaaacgtccgtaacacacggacctccaggagcagtgagaggtggcttagaagcccctggtttggggtgggtggaggaggagggcacgtgtctgcctcccctggggtgccctccttcccccatcccaagctgctgaggggaggccctggtcatgcctcagttcctgccttcatctgctttccggaggaaaaaccatatcaactcctagaaacgctccttaggggcttgggaccttccatttggcactgagcatcttgtggggccttaactggctgagacatcccggccctctacatttgccctgttggccaggcagtccccttcccgcaattggagggcgacgctaacttcagaatcccatagtggcgcttgccgcaggtctggtggggtgtcttttttctcctccctcctttccacccctccgcgccctgccactccctggcctgccctgtttttgggtcaacattgctacggagccagcagtgaggcctttcccttcaagggctctgtggtatctctggccacatttgttctaatgtctgaacctctaaatcttttctttttgattggttttactgtttttaagaagccagcactgctgtctcatagatgggatttgtactcttggggcaacttaaagtgtctctctcgctgctaacagacgattgatgtcttgtctctgtgacccactcaccatgtaaagaattaacctcctatcttagcagacatcgtctcctaatatttccctttatttaataaaaatgttatggtgaagagatggagccggcccagcactgagcttgtgcggcttgggtctgattggtcacagattcctcgtgtgtcctccgcgtgtctgggggctcctctcccccgcctcaaccttttccagcctttcagaggagtcggcagtgggctgggctttggctcaggggcgcagaggcagcaggaagcgtggccaggactttcaccctggcgttttttgttgttggtttttttgtttttttgagacggagcctcgctctgtcacccaggctggagtgcagtggcgtgatctcggctcactgcaacctctgcctcctgggttcaagcaattcacctgcctcagcagcctccccccgcatccccccaagaaaggaaaattatttttcgtattgtaaactttaaacatgaaaaagctgtttttaatttagcagaaactggcttgaatcttca

SEQ ID NO: 28134 - DNA, 3335 bp, Homo sapiens
agcggactcgaacgcgcgacggcggggggaagatggcggagtccggcggtagcagcggtggtgctggtggcggcggcgctttcggcgcgggcccgggccccgagcgcccgaacagcacggccgacaagaacggggccctcaagtgcaccttctcggcacccagccacagcaccagcctcctgcagggcctggccaccctccgcgctcagggccagctcctcgatgttgtgctgactattaacagagaggcctttcctgcacacaaggtcgtcctggctgcctgcagcgactacttcagggccatgttcaccggcggcatgcgggaggcaagccaggacgtcatcgagctgaagggcgtgtcggcccgtggcctgcggcacatcatcgacttcgcctacagcgccgaggtgacactggacctggactgcgtgcaggacgtgctgggcgcggccgtgttcttgcagatgctgcccgtggtggagctgtgcgaggagttcctgaaggcggccatgagcgtggagacctgcctcaacatcggccagatggccaccaccttcagcctggcctcgctgcgagagtcggtggatgccttcaccttccggcacttcctgcagatcgccgaggaggaggatttcctgcgcctgccactggagcgcctggtcttcttcctgcagagcaaccggctgcagagctgtgccgagatcgacctgttccgcgcggccgtccgctggctgcagcatgacccggcccggcggccgcgcgccagccacgtgctctgccacattcgcttcccgctcatgcagtcgtccgagctggtggacagcgtgcagacgctggacatcatggtggaggacgtgctgtgccgccagtatctgctggaggccttcaactaccaggtgctgcccttccggcagcacgagatgcagtctccgcgcaccgccgtgcgctcggatgtgccctcgctcgtcaccttcggcggcacgccctacaccgacagcgaccgctcggtcagcagcaaggtctaccagctgcctgagccgggagcccgccacttccgcgagctcacggagatggaggtaggctgcagccacacgtgcgtggccgtgctggacaattttgtgtacgtggccggggggcagcacctgcagtaccgcagcggcgagggcgcagtggacgcctgctaccgctacgacccccacctgaatcgctggctgcgcctgcaggccatgcaggaaagccgcatccagttccagctgaacgtgctgtgcggcatggtgtacgccacgggcggccgcaaccgagccggcagcctggcctccgtggagcggtactgcccccggcgcaatgagtggggctacgcctgctcgctgaagcgccgtacctggggccatgctggggccgcctcagggggccgcctctacatctcgggtggctacgggatctcagtggaggacaagaaggccctgcactgctacgaccccgtggccgaccagtgggagttcaaggcgcccatgagcgaaccccgcgtgctacacgccatggtgggtgccggcggccgcatctatgccctcgggggccgcatggaccacgtggaccgctgcttcgacgtgctggctgtggagtactatgtgccggagacggaccagtggaccagcgtgagccccatgcgggccggccagtcagaggccggctgctgcctgctggagaggaagatctacatcgtcgggggctacaactggcgtctcaacaacgtcacgggcatcgtacaggtgtacaacacggacaccgacgagtgggagcgggacctgcacttcccggagtccttcgcaggcatagcctgcgcccccgtcctgctgccccgggccgggaccaggaggtagcccccaagacccccgggaccctggcctgaccgcatgttgtctccaagtggggcttggcgaatgcacgtctgcctgagaaccccagtgccccccttcgcccgggctgcccttgaggggcctgctgcgttgataagcccccctcccaggggtccctccctccctccttcccaaagcagatcctggctgcgagtccatccgagggagcctgccggcaaagcgtctgacatgtggtggcagcaaattcgtccccggggtggtttcctcgcctggcccccgagtccccacgggctggcgggtggaatcccaggtctccagggggtccctgtgcagctccatctcacttctctactgcctcccagccccacggtttcaggcattcagatgtgagctcatcaacattgaacccaaagtcggtggtatatgactcaccctccttccaagtctcctgcgcgcgtgtttttaaaataaactcacccgaaacgtccgtaacacacggacctccaggagcagtgagaggtggcttagaagcccctggtttggggtgggtggaggaggagggcacgtgtctgcctcccctggggtgccctccttcccccatcccaagctgctgaggggaggccctggtcatgcctcagttcctgccttcatctgctttccggaggaaaaaccatatcaactcctagaaacgctccttaggggcttgggaccttccatttggcactgagcatcttgtggggccttaactggctgagacatcccggccctctacatttgccctgttggccaggcagtccccttcccgcaattggagggcgacgctaacttcagaatcccatagtggcgcttgccgcaggtctggtggggtgtcttttttctcctccctcctttccacccctccgcgccctgccactccctggcctgccctgtttttgggtcaacattgctacggagccagcagtgaggcctttcccttcaagggctctgtggtatctctggccacatttgttctaatgtctgaacctctaaatcttttctttttgattggttttactgtttttaagaagccagcactgctgtctcatagatgggatttgtactcttggggcaacttaaagtgtctctctcgctgctaacagacgattgatgtcttgtctctgtgacccactcaccatgtaaagaattaacctcctatcttagcagacatcgtctcctaatatttccctttatttaataaaaatgttatggtgaagagatggagccggcccagcactgagcttgtgcggcttgggtctgattggtcacagattcctcgtgtgtcctccgcgtgtctgggggctcctctcccccgcagcctccccccgcatccccccaagaaaggaaaattatttttcgtattgtaaactttaaacatgaaaaagctgtttttaatttagcagaaactggcttgaatcttca

SEQ ID NO: 28135 - DNA, 4627 bp, Homo sapiens
cgcgtcgtttggagctgcgacgccaaacatggcgtgttcctagaagccgctttcggcatcagtaggcggcggcgtggggtctggcagcgtggggagagggaccaaccgacgccacttcgtgttgggaagtgggagcgggagggccgggcaattcccgaccgaaccaaacggtttccatggatctcaatagtgccagcactgttgttcttcaggtgttaacacaggccaccagtcaggatactgctgtgttaaaaccagctgaggagcagttgaagcagtgggagacacagccaggtttctattcagtgttgctgaatattttcaccaaccacactttggatataaatgtaaggtggcttgctgtactgtattttaaacatggaattgatcgctactggagacgtgtagcacctcatgctctctcagaggaggagaaaactactctgcgtgcagggctcatcaccaacttcaatgaaccaataaaccagattgcaactcagattgcagtgctcattgcaaaagttgctagattggattgtcccagacagtggcctgaactaattcccactcttatagagtctgttaaagtccaggatgatcttcgacagcacagagcattacttaccttctatcatgttaccaagacactggcatctaaacgacttgctgctgatagaaaactattttatgatttagcttctggaatttataattttgcctgctctctgtggaatcaccacacagacacattcctgcaagaagtttcttctggcaatgaagctgcaattttgagttcactagaacgaacactgctatcattgaaagtgctgcgtaagttaactgttaatggatttgtggaacctcataagaatatggaggtgatgggttttttacatggaatatttgaacgtctaaaacagtttctggaatgcagtagaagtataggtacagataatgtgtgtagagatagactggaaaagaccatcattctttttactaaagtgcttttggacttcttggatcagcatcctttttcatttactcctctaattcagagatcactggaattttctgtaagctatgtttttacagaagttggtgaaggcgttacatttgaacgattcattgtccaatgtatgaatcttattaagatgattgtcaaaaattatgcttataagccatccaaaaattttgaagatagcagccctgaaactcttgaagcccataagattaagatggcattcttcacatatcctactttgacagagatatgtagaagattagtctctcattatttcctattaactgaagaagaactgacaatgtgggaagaagacccagaaggctttacagtggaagaaacaggaggagattcttggaaatatagtttgaggccatgcactgaagtattatttatagatatattccatgaatataatcagactcttactcctgtacttctagaaatgatgcaaacacttcaaggacccacaaatgtggaagatatgaatgcactgttaatcaaagatgctgtgtataatgctgttggattagctgcttatgagctctttgacagtgttgattttgatcagtggtttaaaaaccagcttcttccagaattacaagtcattcacaataggtataagccattgcgacgcagggtgatttggctcatcggtcagtggatttctgtgaaattcaagtctgacttaagacccatgctttatgaagcaatctgtaacttgcttcaagatcaagatttagtggtccgtattgaaacagctacaactttgaagttaactgttgatgattttgaatttagaacagatcagtttctaccgtatttggaaaccatgttcacactactttttcagttactgcagcaagttacagaatgtgacacaaagatgcatgttttgcatgtcctttcttgtgtgatcgaaagagtcaacatgcagatacgaccatatgtgggatgtttggtacaatatttgcccctcctttggaagcagagtgaagaacacaatatgttgagatgtgctattttgacaacacttattcatcttgttcagggattaggagcagacagcaagaacctgtaccctttcctgctcccagttattcaactgagtacagatgtttcacagcctccacatgtttatcttctggaagatggtttagaattatggttagtaactttggaaaacagtccatgtattacaccagagttgcttcgtatatttcagaatatgtcaccacttcttgaactaagttcagaaaatcttagaacttgctttaagatcatcaatggttatatctttttatcatcaacagaatttttacagacatacgcagtaggtctatgccagtccttttgtgaacttttaaaggaaattactacagaaggtcaagttcaggtgctcaaggttgtggaaaatgcccttaaagtgaacccaatactaggtccacaaatgtttcaaccgattttaccctatgttttcaagggtattatagaaggggagaggtatcctgtagtgatgtccacgtatcttggagttatgggtcgagttctactacaaaacactagttttttttcttcactacttaatgagatggcccataaatttaatcaggagatggaccagcttttgggaaatatgattgaaatgtgggttgatcgaatggacaacattacccagcctgaaagaagaaaactttcagctttggctttgctctctcttctgccatctgataatagtgttatccaagataaattctgtgggattataaacatttcagtagaaggcctgcatgatgtcatgacggaagatcctgaaacaggaacttataaagactgtatgttgatgtctcatcttgaggaaccaaaagtaacagaagatgaagaaccacccacagaacaagataagaggaaaaagatgctggccctgaaggaccctgttcatacagtgtcactgcagcagttcatctacgagaagctcaaggcacagcaggagatgctaggagaacaaggtttccagtccctcatggaaacagtggatacggagattgtcacccagctacaggagtttttgcaaggattctaagagcacatgacatgtggctgcctcccctttcagaaacaagctgagtaacccagcctgccgtttgtatgtgagagcctgctgagatgaagaaatcacttcatgaaaataagcaaagaccacacattttttactacaaaatgtaaaggataaatgtaaatcctgcataactaaaatcacaaacctattcctcaaaagaatttaattttatatttatgagggggcccttcactaaaaagtacatgtaaaagtacatttgatgacaatagctgcttagtttcctgttaagagaagaaactttatcttttaattatgtgctcttaatatttgaagatgagagttaatacctgagatgtttttctgcaaccaaaattcattaaatttggctgccttatcctttttttaagctaatgaaactacaggtttgaaaaatgacaaagctgttcagatgatgctattaaagaaatgtgtgtactaagcaaaaatatataaatagtgacaaatacacattaccaagcttatcttgcaagggagttattttcatctaacatagaaagtgtgttttatcagacaaatgcttttattttcattctaataatttgatacagaaattagtaaaggcatttttttctttttttttccagtaaatacattgggtctataaatgtgcatttgtaagggccacaaaagtgaacgtgtggtactgtagtaccacgtgggagacctctggttatggtttagtcctagttcctttgttactcctgtgagcaccgagaagaactgggcgactcccagtcccacctgtgctgtgacagtcccacgtggctatgacagactgtttagtacttacccttctcaggttcctcagtgcaggggtgcatcagggcctcaataataggggtatacctgggaggatccagcagtaatccccagggtactaggattactagtactctgatggaactagtcttccttccttattcctcgaacatgcagtacataaaaaggggaaaaggagaaaaaaaaagccttactttgttttacttgccatttattgtaaggaaactttaaagcattttttaggaaatactcaaaagcaaggttggaaaatgttttatctttctatagaaagttgggtacagtatgtaactgcgggaaacccactgcccctttgtaagctgtggaacccaaactgtatggggatatttgatgttttcagaaagaggaagaaaatatggtccaaattaaattttccaaagatactcaccttggactgatttgtctgactacttttcttgctccccccaaaaaatgagttcttaaaaattgcccagtgacttatagagaattttcttttatactctagctttgattctgtgctagtaggtatcagtattgcaggtggcaaatcctagttacccttttaatttatcttcatttaaagacaaaaagctcctttcaagtgatatttctttatcagtattactcagtcctgaagactgatccaagaagaatttctttttgtt

SEQ ID NO: 28136 - DNA, 1201 bp, Homo sapiens
gggggtggaggtcagcagtgccacagaacaaactggagttaagaaatgtcgttcttcagatttaaaaagaaaacctttactgaatcagctgagtgttaataatacgaatttccttttcttgccaattctgatctgaacagaaaatccaagaacagggatatgtgtggattacagttttctctgccttgcctacgactgtttctgccttgcatccaagggtccttaagccgttgtcttcattgattcatcttcaggcaaattctaatccttgggaatgtaactgcaaacttttgggccttcgagactggctagcatcttcagccattactctaaacatctattgtcagaatcccccatccatgcgtggcagagcattacgttatattaacattacaaattgtgttacatcttcaataaatgtatccagagcttgggctgttgtaaaatctcctcatattcatcacaagactactgcgctaatgatggcctggcataaagtaaccacaaatggcagtcctctggaaaatactgagactgagaacattactttctgggaacgaattcctacttcacctgctggtagattttttcaagagaatgcctttggtaatccattagagactacagcagtgttacctgtgcaaatacaacttactacttctgttaccttgaacttggaaaaaaacagtgctctaccgaatgatgctgcttcaatgtcagggaaaacatctctaatttgtacacaagaagttgagaagttgaatgaggcttttgacattttgctagcttttttcatcttagcttgtgttttaatcatttttttgatctacaaagttgttcagtttaaacaaaaactaaaggcatcagaaaactcaagggaaaatagacttgaatactacagcttttatcagtcagcaaggtataatgtaactgcctcaatttgtaacacttccccaaattctctagaaagtcctggcttggagcagattcgacttcataaacaaattgttcctgaaaatgaggcacaggtcattctttttgaacattctgctttataactcaactaaatattgtctataagaaacttcagtgccatggacatgatttaaactgaaacctccttatataattatatactttagttggaaatataatgaattatatgaggttagcattattaaaatatgtttttaataaaaaa

SEQ ID NO: 28137 - DNA, 879 bp, Homo sapiens
gggggtggaggtcagcagtgccacagaacaaactggagttaagaaatgtcgttcttcagatttaaaaagaaaacctttactgaatcagctgagtgttaataatacgaatttccttttcttgtgttatccaagataaattctgtgggattataaacatttcagtagaaggcctgcatgatgtcatgacggaagatcctgaaacaggaacttataaagactgtatgttgatgtctcatcttgaggaaccaaaagtaacagaagatgaagaaccacccacagaacaagataagaggaaaaagatgctggccctgaaggaccctgttcatacagtgtcactgcagcagttcatctacgagaagctcaaggcacagcaggagatgctaggagaacaaggtttccagtccctcatggaaacagtggatacggagattgtcacccagctacaggagtttttgcaaggattctaagagcacatgacatgtggctgcctcccctttcagaaacaagctgagtaacccagcctgccgtttgtatgtgagagcctgctgagatgaagaaatcacttcatgaaaataagcaaagaccacacattttttactacaaaatgtaaaggataaatgtaaatcctgcataactaaaatcacaaacctattcctcaaaagaatttaattttatatttatgagggggcccttcactaaaaagtacatgtaaaagtacatttgatgacaatagctgcttagtttcctgttaagagaagaacttacttatatgtgcctaattgaaagaggataccgcgagtcttggccctcttatgggcccccttacacgaccacgcgagcacggctcgtctccacgtgcaatgtggccccctccggggc

SEQ ID NO: 28138 - DNA, 539 bp, Homo sapiens
atatcgtcgacccacgcgtccggaaaaggagaaaaaaaaagccttactttgttttacttgccatttattgtaaggaaactttaaagcattttttaggaaatactcaaaagcaaggttggaaaatgttttatctttctatagaaagttgggtacagtatgtaactgcgggaaacccactgcccctttgtaagctgtggaacccaaactgtatggggatatttgatgttttcagaaagaggaagaaaatatggtccaaattaaattttccaaagatactcaccttggactgatttgtctgactacttttcttgctccccccaaaaaatgagttcttaaaaattgcccagtgacttatagagaattttcttttatactctagctttgattctgtgctagtaggtatcagtattgcaggtggcaaatcctagttacccttttaatttatcttcatttaaagacaaaaagctcctttcaagtgatatttctttatcagtattactcagtcctgaagactgatccaagaagaatttctttttgtt

SEQ ID NO: 28139 - DNA, 749 bp, Homo sapiens
gggggtggaggtcagcagtgccacagaacaaactggagttaagaaatgtcgttcttcagatttaaaaagaaaacctttactgaatcagctgagtgttaataatacgaatttccttttcttgccaattctgatctgaacagaaaatccaagaacagggatatgtgtggattacagttttctctgccttgcctacgactgtttctggttgttacctgttatcttttattattactccacaaagaaatacttggatgttcgtctgtttgtcagctctgcactgggagacaaattaactgccgtaacttaggcctttcgagtattcctaagaattttcctgaaagtacagtttttctgtatctgactgggaataatatatcttatataaatgaaagtgaattaacaggacttcattctcttgtagcattgtatttggataattctaacattctgtatgtatatccaaaagcctttgttcaattgaggcatctatattttctatttctaaataataatttcatcaaacgcttagatcctggaatatttaagggacttttaaatcttcgtaatttatatttacagtataatcaggtatcttttgttccgagaggagtatttaatgatctagtttcagttcagtacttaaatctacaaaggaatcgcctcactgtccttgggagtggtacctttgttggtatggttgctcttcggatacttgatttatcaaacaataacattttgaggatatcaga

SEQ ID NO: 28140 - DNA, 320 bp, Homo sapiens
gtgagaccctgtctctgcaaaaagtaaaaaaaggaaaaaaaaattagaccagagtggtggcgcatacctgtagtcccaactcttcaggaatctgaggcaggaggattgtttgagcccaggaggttgaggctgccgtgtgccatgatgatgccactgcgttctagcctggattacaaagcaaaacccgtctcttaaaaaaaaaaaaaaaaaaattaaagattcccaacattaagtcagacagataagaaactgtttataagaaactaagaactatattcatattaaattatgacgtttaatctgagttttttttctttttt

SEQ ID NO: 28141 - DNA, 3746 bp, Homo sapiens
cgcgtcgtttggagctgcgacgccaaacatggcgtgttcctagaagccgctttcggcatcagtaggcggcggcgtggggtctggcagcgtggggagagggaccaaccgacgccacttcgtgttgggaagtgggagcgggagggccgggcaattcccgaccgaaccaaacggtttccatggatctcaatagtgccagcactgttgttcttcaggtgttaacacaggccaccagtcaggatactgctgtgttaaaaccagctgaggagcagttgaagcagtgggagacacagccaggtttctattcagtgttgctgaatattttcaccaaccacactttggatataaatgtaaggtggcttgctgtactgtattttaaacatggaattgatcgctactggagacgtgtagcacctcatgctctctcagaggaggagaaaactactctgcgtgcagggctcatcaccaacttcaatgaaccaataaaccagattgcaactcagattgcagtgctcattgcaaaagttgctagattggattgtcccagacagtggcctgaactaattcccactcttatagagtctgttaaagtccaggatgatcttcgacagcacagagcattacttaccttctatcatgttaccaagacactggcatctaaacgacttgctgctgatagaaaactattttatgatttagcttctggaatttataattttgcctgctctctgtggaatcaccacacagacacattcctgcaagaagtttcttctggcaatgaagctgcaattttgagttcactagaacgaacactgctatcattgaaagtgctgcgtaagttaactgttaatggatttgtggaacctcataagaatatggaggtgatgggttttttacatggaatatttgaacgtctaaaacagtttctggaatgcagtagaagtataggtacagataatgtgtgtagagatagactggaaaagaccatcattctttttactaaagtgcttttggacttcttggatcagcatcctttttcatttactcctctaattcagagatcactggaattttctgtaagctatgtttttacagaagttggtgaaggcgttacatttgaacgattcattgtccaatgtatgaatcttattaagatgattgtcaaaaattatgcttataagccatccaaaaattttgaagatagcagccctgaaactcttgaagcccataagattaagatggcattcttcacatatcctactttgacagagatatgtagaagattagtctctcattatttcctattaactgaagaagaactgacaatgtgggaagaagacccagaaggctttacagtggaagaaacaggaggagattcttggaaatatagtttgaggccatgcactgaagtattatttatagatatattccatgaatataatcagactcttactcctgtacttctagaaatgatgcaaacacttcaaggacccacaaatgtggaagatatgaatgcactgttaatcaaagatgctgtgtataatgctgttggattagctgcttatgagctctttgacagtgttgattttgatcagtggtttaaaaaccagcttcttccagaattacaagtcattcacaataggtataagccattgcgacgcagggtgatttggctcatcggtcagtggatttctgtgaaattcaagtctgacttaagacccatgctttatgaagcaatctgtaacttgcttcaagatcaagatttagtggtccgtattgaaacagctacaactttgaagttaactgttgatgattttgaatttagaacagatcagtttctaccgtatttggaaaccatgttcacactactttttcagttactgcagcaagttacagaatgtgacacaaagatgcatgttttgcatgtcctttcttgtgtgatcgaaagagtcaacatgcagatacgaccatatgtgggatgtttggtacaatatttgcccctcctttggaagcagagtgaagaacacaatatgttgagatgtgctattttgacaacacttattcatcttgttcagggattaggagcagacagcaagaacctgtaccctttcctgctcccagttattcaactgagtacagatgtttcacagcctccacatgtttatcttctggaagatggtttagaattatggttagtaactttggaaaacagtccatgtattacaccagagttgcttcgtatatttcagaatatgtcaccacttcttgaactaagttcagaaaatcttagaacttgctttaagatcatcaatggttatatctttttatcatcaacagaatttttacagacatacgcagtaggtctatgccagtccttttgtgaacttttaaaggaaattactacagaaggtcaagttcaggtgctcaaggttgtggaaaatgcccttaaagtgaacccaatactaggtccacaaatgtttcaaccgattttaccctatgttttcaagggtattatagaaggggagaggtatcctgtagtgatgtccacgtatcttggagttatgggtcgagttctactacaaaacactagttttttttcttcactacttaatgagatggcccataaatttaatcaggagatggaccagcttttgggaaatatgattgaaatgtgggttgatcgaatggacaacattacccagcctgaaagaagaaaactttcagctttggctttgctctctcttctgccatctgataatagtgttatccaagataaattctgtgggattataaacatttcagtagaaggcctgcatgatgtcatgacggaagatcctgaaacaggaacttataaagactgtatgttgatgtctcatcttgaggaaccaaaagtaacagaagatgaagaaccacccacagaacaagataagaggaaaaagatgctggccctgaaggaccctgttcatacagtgtcactgcagcagttcatctacgagaagctcaaggcacagcaggagatgctaggagaacaaggtttccagtccctcatggaaacagtggatacggagattgtcacccagctacaggagtttttgcaaggattctaagagcacatgacatgtggctgcctcccctttcagaaacaagctgagtaacccagcctgccgtttgtatgtgagagcctgctgagatgaagaaatcacttcatgaaaataagcaaagaccacacattttttactacaaaatgtaaaggataaatgtaaatcctgcataactaaaatcacaaacctattcctcaaaagaatttaattttatatttatgagggggcccttcactaaaaagtacatgtaaaagtacatttgatgacaatagctgcttagtttcctgttaagagaagaaactttatcttttaattatgtgctcttaatatttgaagatgagagttaatacctgagatgtttttctgcaaccaaaattcattaaatttggctgccttatcctttttttaagctaatgaaactacaggtttgaaaaatgacaaagctgttcagatgatgctattaaagaaatgtgtgtactaagcaaaaatatataaatagtgacaaatacacattaccaagcttatcttgcaagggagttattttcatctaacatagaaagtgtgttttatcagacaaatgcttttattttcattctaataatttgatacagaaattagtaaaggcatttttttctttttttttccagt

SEQ ID NO: 28142 - DNA, 4556 bp, Homo sapiens
cgcgtcgtttggagctgcgacgccaaacatggcgtgttcctagaagccgctttcggcatcagtaggcggcggcgtggggtctggcagcgtggggagagggaccaaccgacgccacttcgtgttgggaagtgggagcgggagggccgggcaattcccgaccgaaccaaacggtttccatggatctcaatagtgccagcactgttgttcttcaggtgttaacacaggccaccagtcaggatactgctgtgttaaaaccagctgaggagcagttgaagcagtgggagacacagccaggtttctattcagtgttgctgaatattttcaccaaccacactttggatataaatgtaaggtggcttgctgtactgtattttaaacatggaattgatcgctactggagacgtgtagcacctcatgctctctcagaggaggagaaaactactctgcgtgcagggctcatcaccaacttcaatgaaccaataaaccagattgcaactcagattgcagtgctcattgcaaaagttgctagattggattgtcccagacagtggcctgaactaattcccactcttatagagtctgttaaagtccaggatgatcttcgacagcacagagcattacttaccttctatcatgttaccaagacactggcatctaaacgacttgctgctgatagaaaactattttatgatttagcttctggaatttataattttgcctgctctctgtggaatcaccacacagacacattcctgcaagaagtttcttctggcaatgaagctgcaattttgagttcactagaacgaacactgctatcattgaaagtgctgcgtaagttaactgttaatggatttgtggaacctcataagaatatggaggtgatgggttttttacatggaatatttgaacgtctaaaacagtttctggaatgcacttttggacttcttggatcagcatcctttttcatttactcctctaattcagagatcactggaattttctgtaagctatgtttttacagaagttggtgaaggcgttacatttgaacgattcattgtccaatgtatgaatcttattaagatgattgtcaaaaattatgcttataagccatccaaaaattttgaagatagcagccctgaaactcttgaagcccataagattaagatggcattcttcacatatcctactttgacagagatatgtagaagattagtctctcattatttcctattaactgaagaagaactgacaatgtgggaagaagacccagaaggctttacagtggaagaaacaggaggagattcttggaaatatagtttgaggccatgcactgaagtattatttatagatatattccatgaatataatcagactcttactcctgtacttctagaaatgatgcaaacacttcaaggacccacaaatgtggaagatatgaatgcactgttaatcaaagatgctgtgtataatgctgttggattagctgcttatgagctctttgacagtgttgattttgatcagtggtttaaaaaccagcttcttccagaattacaagtcattcacaataggtataagccattgcgacgcagggtgatttggctcatcggtcagtggatttctgtgaaattcaagtctgacttaagacccatgctttatgaagcaatctgtaacttgcttcaagatcaagatttagtggtccgtattgaaacagctacaactttgaagttaactgttgatgattttgaatttagaacagatcagtttctaccgtatttggaaaccatgttcacactactttttcagttactgcagcaagttacagaatgtgacacaaagatgcatgttttgcatgtcctttcttgtgtgatcgaaagagtcaacatgcagatacgaccatatgtgggatgtttggtacaatatttgcccctcctttggaagcagagtgaagaacacaatatgttgagatgtgctattttgacaacacttattcatcttgttcagggattaggagcagacagcaagaacctgtaccctttcctgctcccagttattcaactgagtacagatgtttcacagcctccacatgtttatcttctggaagatggtttagaattatggttagtaactttggaaaacagtccatgtattacaccagagttgcttcgtatatttcagaatatgtcaccacttcttgaactaagttcagaaaatcttagaacttgctttaagatcatcaatggttatatctttttatcatcaacagaatttttacagacatacgcagtaggtctatgccagtccttttgtgaacttttaaaggaaattactacagaaggtcaagttcaggtgctcaaggttgtggaaaatgcccttaaagtgaacccaatactaggtccacaaatgtttcaaccgattttaccctatgttttcaagggtattatagaaggggagaggtatcctgtagtgatgtccacgtatcttggagttatgggtcgagttctactacaaaacactagttttttttcttcactacttaatgagatggcccataaatttaatcaggagatggaccagcttttgggaaatatgattgaaatgtgggttgatcgaatggacaacattacccagcctgaaagaagaaaactttcagctttggctttgctctctcttctgccatctgataatagtgttatccaagataaattctgtgggattataaacatttcagtagaaggcctgcatgatgtcatgacggaagatcctgaaacaggaacttataaagactgtatgttgatgtctcatcttgaggaaccaaaagtaacagaagatgaagaaccacccacagaacaagataagaggaaaaagatgctggccctgaaggaccctgttcatacagtgtcactgcagcagttcatctacgagaagctcaaggcacagcaggagatgctaggagaacaaggtttccagtccctcatggaaacagtggatacggagattgtcacccagctacaggagtttttgcaaggattctaagagcacatgacatgtggctgcctcccctttcagaaacaagctgagtaacccagcctgccgtttgtatgtgagagcctgctgagatgaagaaatcacttcatgaaaataagcaaagaccacacattttttactacaaaatgtaaaggataaatgtaaatcctgcataactaaaatcacaaacctattcctcaaaagaatttaattttatatttatgagggggcccttcactaaaaagtacatgtaaaagtacatttgatgacaatagctgcttagtttcctgttaagagaagaaactttatcttttaattatgtgctcttaatatttgaagatgagagttaatacctgagatgtttttctgcaaccaaaattcattaaatttggctgccttatcctttttttaagctaatgaaactacaggtttgaaaaatgacaaagctgttcagatgatgctattaaagaaatgtgtgtactaagcaaaaatatataaatagtgacaaatacacattaccaagcttatcttgcaagggagttattttcatctaacatagaaagtgtgttttatcagacaaatgcttttattttcattctaataatttgatacagaaattagtaaaggcatttttttctttttttttccagtaaatacattgggtctataaatgtgcatttgtaagggccacaaaagtgaacgtgtggtactgtagtaccacgtgggagacctctggttatggtttagtcctagttcctttgttactcctgtgagcaccgagaagaactgggcgactcccagtcccacctgtgctgtgacagtcccacgtggctatgacagactgtttagtacttacccttctcaggttcctcagtgcaggggtgcatcagggcctcaataataggggtatacctgggaggatccagcagtaatccccagggtactaggattactagtactctgatggaactagtcttccttccttattcctcgaacatgcagtacataaaaaggggaaaaggagaaaaaaaaagccttactttgttttacttgccatttattgtaaggaaactttaaagcattttttaggaaatactcaaaagcaaggttggaaaatgttttatctttctatagaaagttgggtacagtatgtaactgcgggaaacccactgcccctttgtaagctgtggaacccaaactgtatggggatatttgatgttttcagaaagaggaagaaaatatggtccaaattaaattttccaaagatactcaccttggactgatttgtctgactacttttcttgctccccccaaaaaatgagttcttaaaaattgcccagtgacttatagagaattttcttttatactctagctttgattctgtgctagtaggtatcagtattgcaggtggcaaatcctagttacccttttaatttatcttcatttaaagacaaaaagctcctttcaagtgatatttctttatcagtattactcagtcctgaagactgatccaagaagaatttctttttgtt

SEQ ID NO: 28143 - DNA, 4569 bp, Homo sapiens
cgcgtcgtttggagctgcgacgccaaacatggcgtgttcctagaagccgctttcggcatcagtaggcggcggcgtggggtctggcagcgtggggagagggaccaaccgacgccacttcgtgttgggaagtgggagcgggagggccgggcaattcccgaccgaaccaaacggtttccatggatctcaatagtgccagcactgttgttcttcaggtgttaacacaggccaccagtcaggatactgctgtgttaaaaccagctgaggagcagttgaagcagtgggagacacagccaggtttctattcagtgttgctgaatattttcaccaaccacactttggatataaatgtaaggtggcttgctgtactgtattttaaacatggaattgatcgctactggagacgtgtagcacctcatgctctctcagaggaggagaaaactactctgcgtgcagggctcatcaccaacttcaatgaaccaataaaccagattgcaactcagattgcagtgctcattgcaaaagttgctagattggattgtcccagacagtggcctgaactaattcccactcttatagagtctgttaaagtccaggatgatcttcgacagcacagagcattacttaccttctatcatgttaccaagacactggcatctaaacgacttgctgctgatagaaaactattttatgatttagcttctggaatttataattttgcctgctctctgtggaatcaccacacagacacattcctgcaagaagtttcttctggcaatgaagctgcaattttgagttcactagaacgaacactgctatcattgaaagtgctgcgtaagttaactgttaatggatttgtggaacctcataagaatatggaggtgatgggttttttacatggaatatttgaacgtctaaaacagtttctggaatgcagtagaagtataggtacagataatgtgtgtagagatagactggaaaagaccatcattctttttactaaagtgcttttggacttcttggatcagcatcctttttcatttactcctctaattcagagatcactggaattttctgtaagctatgtttttacagaagttggtgaaggcgttacatttgaacgattcattgtccaatgtatgaatcttattaagatgattgtcaaaaattatgcttataagccatccaaaaattttgaagatagcagccctgaaactcttgaagcccataagattaagatggcattcttcacatatcctactttgacagagatatgtagaagattagtctctcattatttcctattaactgaagaagaactgacaatgtgggaagaagacccagaaggctttacagtggaagaaacaggaggagattcttggaaatatagtttgaggccatgcactgaagtattatttatagatatattccatgaatataatcagactcttactcctgtacttctagaaatgatgcaaacacttcaaggacccacaaatgtggaagatatgaatgcactgttaatcaaagatgctgtgtataatgctgttggattagctgcttatgagctctttgacagtgttgattttgatcagtggtttaaaaaccagcttcttccagaattacaagtcattcacaataggtataagccattgcgacgcagggtgatttggctcatcggtcagtggatttctgtgaaattcaagtctgacttaagacccatgctttatgaagcaatctgtaacttgcttcaagatcaagatttagtggtccgtattgaaacagctacaactttgaagttaactgttgatgattttgaatttagaacagatcagtttctaccgtatttggaaaccatgttcacactactttttcagttactgcagcaagttacagaatgtgacacaaagatgcatgttttgcatgtcctttcttgtgtgatcgaaagagtcaacatgcagatacgaccatatgtgggatgtttggtacaatatttgcccctcctttggaagcagagtgaagaacacaatatgttgagatgtgctattttgacaacacttattcatcttgttcagggattaggagcagacagcaagaacctgtaccctttcctgctcccagttattcaactgagtacagatgtttcacagcctccacatgtttatcttctggaagatggtttagaattatggttagtaactttggaaaacagtccatgtattacaccagagttgcttcgtatatttcagaatatgtcaccacttcttgaactaagttcagaaaatcttagaacttgctttaagatcatcaatggttatatctttttatcatcaacagaatttttacagacatacgcagtaggtctatgccagtccttttgtgaacttttaaaggaaattactacagaaggtcaagttcaggtgctcaaggttgtggaaaatgcccttaaagtgaacccaatactaggtccacaaatgtttcaaccgattttaccctatgttttcaagggtattatagaaggggagaggtatcctgtagtgatgtccacgtatcttggagttatgggtcgagttctactacaaaacactagttttttttcttcactacttaatgagatggcccataaatttaatcaggagatggaccagcttttgggaaatatgattgaaatgtgggttgatcgaatggacaacattacccagcctgaaagaagaaaactttcagctttggctttgctctctcttctgccatctgataatagtgttatccaagataaattctgtgggattataaacatttcagtagaaggcctgcatgatgtcatgacggaagatcctgaaacaggaacttataaagactgtatgttgatgtctcatcttgaggaaccaaaagtaacagaagatgaagaaccacccacagaacaagataagaggaaaaagatgctggccctgaaggaccctgttcatacagtgtcactgcagcagttcatctacgagaagctcaaggcacagcaggagatgctaggagaacaaggtttccagtccctcatggaaacagtggatacggagattgtcacccagctacaggagtttttgcaaggattctaagagcacatgacatgtggctgcctcccctttcagaaacaagctgagtaacccagcctgccgtttgtatgtgagagcctgctgagatgaagaaatcacttcatgaaaataagcaaagaccacacattttttactacaaaatgtaaaggataaatgtaaatcctgcataactaaaatcacaaacctattcctcaaaagaatttaattttatatttatgagggggcccttcactaaaaagtacatgtaaaagtacatttgatgacaatagctgcttagtttcctgttaagagaagaaactttatcttttaattatgtgctcttaatatttgaagatgagagttaatacctgagatgtttttctgcaaccaaaattcattaaatttggctgccttatcctttttttaagctaatgaaactacaggtttgaaaaatgacaaagctgttcagatgatgctattaaagaaatgtgtgtactaagcaaaaatatataaatagtgacaaatacacattaccaagcttatcttgcaagggagttattttcatctaacatagaaagtgtgttttatcagacaaatgcttttattttcattctaataatttgatacagaaattagtaaaggcatttttttctttttttttccagtaaatacattgggtctataaatgtgcatttgtaagggccacaaaagtgaacgtgtggtactgtagtaccacgtgggagacctctggttatggtttagtcctagttcctttgttactcctgtgagcaccgagaagaactgggcgactcccagtcccacctgtgctgtgacagtcccacgtggctatgacagactgtttagtacttacccttctcaggttcctcagtgcaggggtgcatcagggcctcaataataggggtatacctgggaggatccagcagtaatccccagggtactaggattactagtactctgatggaactagtcttccttccttattcctcgaacatgcagtacataaaaaggggaaaaggagattttaggaaatactcaaaagcaaggttggaaaatgttttatctttctatagaaagttgggtacagtatgtaactgcgggaaacccactgcccctttgtaagctgtggaacccaaactgtatggggatatttgatgttttcagaaagaggaagaaaatatggtccaaattaaattttccaaagatactcaccttggactgatttgtctgactacttttcttgctccccccaaaaaatgagttcttaaaaattgcccagtgacttatagagaattttcttttatactctagctttgattctgtgctagtaggtatcagtattgcaggtggcaaatcctagttacccttttaatttatcttcatttaaagacaaaaagctcctttcaagtgatatttctttatcagtattactcagtcctgaagactgatccaagaagaatttctttttgtt

SEQ ID NO: 28144 - DNA, 1990 bp, Homo sapiens
gggggtggaggtcagcagtgccacagaacaaactggagttaagaaatgtcgttcttcagatttaaaaagaaaacctttactgaatcagctgagtgttaataatacgaatttccttttcttgtgttatccaagataaattctgtgggattataaacatttcagtagaaggcctgcatgatgtcatgacggaagatcctgaaacaggaacttataaagactgtatgttgatgtctcatcttgaggaaccaaaagtaacagaagatgaagaaccacccacagaacaagataagaggaaaaagatgctggccctgaaggaccctgttcatacagtgtcactgcagcagttcatctacgagaagctcaaggcacagcaggagatgctaggagaacaaggtttccagtccctcatggaaacagtggatacggagattgtcacccagctacaggagtttttgcaaggattctaagagcacatgacatgtggctgcctcccctttcagaaacaagctgagtaacccagcctgccgtttgtatgtgagagcctgctgagatgaagaaatcacttcatgaaaataagcaaagaccacacattttttactacaaaatgtaaaggataaatgtaaatcctgcataactaaaatcacaaacctattcctcaaaagaatttaattttatatttatgagggggcccttcactaaaaagtacatgtaaaagtacatttgatgacaatagctgcttagtttcctgttaagagaagaaactttatcttttaattatgtgctcttaatatttgaagatgagagttaatacctgagatgtttttctgcaaccaaaattcattaaatttggctgccttatcctttttttaagctaatgaaactacaggtttgaaaaatgacaaagctgttcagatgatgctattaaagaaatgtgtgtactaagcaaaaatatataaatagtgacaaatacacattaccaagcttatcttgcaagggagttattttcatctaacatagaaagtgtgttttatcagacaaatgcttttattttcattctaataatttgatacagaaattagtaaaggcatttttttctttttttttccagtaaatacattgggtctataaatgtgcatttgtaagggccacaaaagtgaacgtgtggtactgtagtaccacgtgggagacctctggttatggtttagtcctagttcctttgttactcctgtgagcaccgagaagaactgggcgactcccagtcccacctgtgctgtgacagtcccacgtggctatgacagactgtttagtacttacccttctcaggttcctcagtgcaggggtgcatcagggcctcaataataggggtatacctgggaggatccagcagtaatccccagggtactaggattactagtactctgatggaactagtcttccttccttattcctcgaacatgcagtacataaaaaggggaaaaggagaaaaaaaaagccttactttgttttacttgccatttattgtaaggaaactttaaagcattttttaggaaatactcaaaagcaaggttggaaaatgttttatctttctatagaaagttgggtacagtatgtaactgcgggaaacccactgcccctttgtaagctgtggaacccaaactgtatggggatatttgatgttttcagaaagaggaagaaaatatggtccaaattaaattttccaaagatactcaccttggactgatttgtctgactacttttcttgctccccccaaaaaatgagttcttaaaaattgcccagtgacttatagagaattttcttttatactctagctttgattctgtgctagtaggtatcagtattgcaggtggcaaatcctagttacccttttaatttatcttcatttaaagacaaaaagctcctttcaagtgatatttctttatcagtattactcagtcctgaagactgatccaagaagaatttctttttgtt

SEQ ID NO: 28145 - DNA, 1948 bp, Homo sapiens
gtagagtgaaatgattagatttaccctttagaaatttccctctttctggaaggaacaataaaaccggagccagaattagtgttatccaagataaattctgtgggattataaacatttcagtagaaggcctgcatgatgtcatgacggaagatcctgaaacaggaacttataaagactgtatgttgatgtctcatcttgaggaaccaaaagtaacagaagatgaagaaccacccacagaacaagataagaggaaaaagatgctggccctgaaggaccctgttcatacagtgtcactgcagcagttcatctacgagaagctcaaggcacagcaggagatgctaggagaacaaggtttccagtccctcatggaaacagtggatacggagattgtcacccagctacaggagtttttgcaaggattctaagagcacatgacatgtggctgcctcccctttcagaaacaagctgagtaacccagcctgccgtttgtatgtgagagcctgctgagatgaagaaatcacttcatgaaaataagcaaagaccacacattttttactacaaaatgtaaaggataaatgtaaatcctgcataactaaaatcacaaacctattcctcaaaagaatttaattttatatttatgagggggcccttcactaaaaagtacatgtaaaagtacatttgatgacaatagctgcttagtttcctgttaagagaagaaactttatcttttaattatgtgctcttaatatttgaagatgagagttaatacctgagatgtttttctgcaaccaaaattcattaaatttggctgccttatcctttttttaagctaatgaaactacaggtttgaaaaatgacaaagctgttcagatgatgctattaaagaaatgtgtgtactaagcaaaaatatataaatagtgacaaatacacattaccaagcttatcttgcaagggagttattttcatctaacatagaaagtgtgttttatcagacaaatgcttttattttcattctaataatttgatacagaaattagtaaaggcatttttttctttttttttccagtaaatacattgggtctataaatgtgcatttgtaagggccacaaaagtgaacgtgtggtactgtagtaccacgtgggagacctctggttatggtttagtcctagttcctttgttactcctgtgagcaccgagaagaactgggcgactcccagtcccacctgtgctgtgacagtcccacgtggctatgacagactgtttagtacttacccttctcaggttcctcagtgcaggggtgcatcagggcctcaataataggggtatacctgggaggatccagcagtaatccccagggtactaggattactagtactctgatggaactagtcttccttccttattcctcgaacatgcagtacataaaaaggggaaaaggagaaaaaaaaagccttactttgttttacttgccatttattgtaaggaaactttaaagcattttttaggaaatactcaaaagcaaggttggaaaatgttttatctttctatagaaagttgggtacagtatgtaactgcgggaaacccactgcccctttgtaagctgtggaacccaaactgtatggggatatttgatgttttcagaaagaggaagaaaatatggtccaaattaaattttccaaagatactcaccttggactgatttgtctgactacttttcttgctccccccaaaaaatgagttcttaaaaattgcccagtgacttatagagaattttcttttatactctagctttgattctgtgctagtaggtatcagtattgcaggtggcaaatcctagttacccttttaatttatcttcatttaaagacaaaaagctcctttcaagtgatatttctttatcagtattactcagtcctgaagactgatccaagaagaatttctttttgtt

SEQ ID NO: 28146 - DNA, 1223 bp, Homo sapiens
cgcgtcgtttggagctgcgacgccaaacatggcgtgttcctagaagccgctttcggcatcagtaggcggcggcgtggggtctggcagcgtggggagagggaccaaccgacgccacttcgtgttgggaagtgggagcgggagggccgggcaattcccgaccgaaccaaacggtttccatggatctcaatagtgccagcactgttgttcttcaggtgttaacacaggccaccagtcaggatactgctgtgttaaaaccagctgaggagcagttgaagcagtgggagacacagccaggtttctattcagtgttgctgaatattttcaccaaccacactttggatataaatgtaaggtggcttgctgtactgtattttaaacatggaattgatcgctactggagacgtgtagcacctcatgctctctcagaggaggagaaaactactctgcgtgcagggctcatcaccaacttcaatgaaccaataaaccagattgcaactcagattgcagtgctcattgcaaaagttgctagattggattgtcccagacagtggcctgaactaattcccactcttatagagtctgttaaagtccaggatgatcttcgacagcacagagcattacttaccttctatcatgttaccaagacactggcatctaaacgacttgctgctgatagaaaactattttatgatttagcttctggaatttataattttgcctgctctctgtggaatcaccacacagacacattcctgcaagaagtttcttctggcaatgaagctgcaattttgagttcactagaacgaacactgctatcattgaaagtgctgcgtaagttaactgttaatggatttgtggaacctcataagaatatggaggtgatgggttttttacatggaatatttgaacgtctaaaacagtttctggaatgcacttttggacttcttggatcagcatcctttttcatttactcctctaattcagagatcactggaattttctgtaagctatgtttttacagaagttggtgaaggcgttacatttgaacgattcattgtccaatgtatgaatcttattaagatgattgtcaaaaattatgcttataagccatccaaaaattttgaaggtaattcctttattggcagtttaaaagaattattttaatcttaagtgtgatataattgctataattacaaactttttaaaaaatgtcattttagtct

SEQ ID NO: 28147 - DNA, 598 bp, Homo sapiens
gggggtggaggtcagcagtgccacagaacaaactggagttaagaaatgtcgttcttcagatttaaaaagaaaacctttactgaatcagctgagtgttaataatacgaatttccttttcttgccaattctgatctgaacagaaaatccaagaacagggatatgtgtggattacagttttctctgccttgcctacgactgtttctgccttgcatccaagggtccttaagccgttgtcttcattgattcatcttcaggcaaattctaatccttgggaatgtaactgcaaacttttgggccttcgagactggctagcatcttcagccattactctaaacatctattgtcagaatcccccatccatgcgtggcagagcattacgttatattaacattacaaattgtgttacatcttcaataaatgtatccagagcttgggctgttgtaaaatctcctcatattcatcacaagactactgcgctaatgatggcctggcataaagtaaccacaaatggcagtcctctggaaaatactgagactgagaacattactttctgggaacgaattcctagtgcttagagtcctccccagtgccagagtcc

SEQ ID NO: 28148 - DNA, 196 bp, Homo sapiens
tgctgcgtaagttaactgttaatggatttgtggaacctcataagaatatggaggtgatggtaagtgatcgaagaaatttgctgtgactttgggaaagtggtattttcctgaatgtttgaaagagtgctctttttatttggcattcaattagaagagtttttattaagtgaccatctagttttttaccattctgact

SEQ ID NO: 28149 - DNA, 936 bp, Homo sapiens
atggagagtgtgagtaatcattgtacctagtgaaacatgattactgtattgaaatgaaatgattctcagaattctagtgatattggatcaggtgatagcagataccctggaaatgacaactactttgagcttttttccataaagaatttttatcgaaaatgagaatgcttatggatatagtaagcacttaatagacgactgtgagatacacaactgtgatctgtagcatatagtaacaaaatctgtgtaaggcctgtgttcccaaggatttgctcttaatgttatgtttaaaagagttcacaaaaatattatactgatgttattaaaatctttgttttctaaaccaagatgttgaaaatgtcattattacatatttttaattgcagcagtggaagaaacaggaggagattcttggaaatatagtttgagggtaagtattaattgcaagaaaaattgataggggaaagcttaatctttctaaagctcttagtagagaatgacactctattaaagattccagacatttgctgggcatggtggctcacactttaatcctagcactttgggaagccaaggtgggaggatcgcttgaggccagaaattcaagaccggcctggtaaacatagtgagaccctgtctctgcaaaaagtaaaaaaaggaaaaaaaaattagaccagagtggtggcgcatacctgtagtcccaactcttcaggaatctgaggcaggaggattgtttgagcccaggaggttgaggctgccgtgtgccatgatgatgccactgcgttctagcctggattacaaagcaaaacccgtctcttaaaaaaaaaaaaaaaaaaattaaagattcccaacattaagtcagacagataagaaactgtttataagaaactaagaactatattcatattaaattatgacgtttaatctgagtttttt

SEQ ID NO: 28150 - DNA, 180 bp, Homo sapiens
agtaggttagaaaatgtatgaatataccatctcccaacatctagagggatgtgtttcctcataatacaattcctcagtgtggcagaaaaaaacatgtttattaacgggccaaaatatctttagtctctctgtaaaaataggaagccaaaagtatataaacttgaattatttatgttcagt

SEQ ID NO: 28151 - DNA, 519 bp, Homo sapiens
tcccaggcactttgtcctgcatccagacctcaagcagtcagataaagctgattctttatttttgcacttcttttaaagctcaggctcagagagagagtccccagctcacaagagtcagaagcaggatataaactctgatctactcactccagagctgcccgcaagaaggacacctgtctctacccatctcgggaatgtgccatgaccacagcagatggctggactacgtttaggagacaggatgctggagaaaggaagtgtcaagcagtgggcagcacccttcagacctcccctgacaccaaccaccaccaccccaatactgagggctccatggacaaaggccagctcgttcttgggcccaaacaccagttgcagctcctggatcctgggaaacgtgggagagcaccagtgactgctccctgggctccactgctgttccattcccaagggcatcctccatcatcctggtgtccaattcctaggcagacaggccctccccttgctgaggacctccaaagc

SEQ ID NO: 28152 - DNA, 3663 bp, Homo sapiens
acccggaaacgccttgcggggcagtgtgggagggagaagtccagggcggacaggctgggcgcacccgtgctcgcgcaccccaagatggctgagaggcaggaagagcagagagggagcccgcccttgagggcggaaggcaaggccgacgcggaggttaagctcattctgtaccattggacgcattccttcagctctcaaaaggtgcgcttggtaattgctgaaaaggcattgaagtgcgaggaacatgatgtaagtctgcccttgagtgagcacaatgagccttggtttatgcgtttgaactcaactggagaagtgcctgtccttatccacggggaaaacataatttgtgaggccactcagatcattgattatcttgaacagactttcctggatgaaagaacacccaggttaatgcctgataaagaaagcatgtattacccacgggtacaacattaccgagagctgcttgactccttgccaatggatgcctatacacatggctgcattttacatcctgagttaactgtggactccatgatcccggcttatgcaactacaaggattcgtagccaaattggaaacacagagtctgagctgaagaaacttgctgaagaaaacccagatttacaagaagcatacattgcaaaacagaaacgacttaaatcaaagctgcttgatcatgacaatgtcaagtatttgaagaaaattcttgatgagttggagaaagtcttggatcaggttgaaactgaattgcaaagaagaaatgaagaaaccccagaagagggccagcaaccttggctctgcggtgaatccttcaccctggcagacgtctcactcgctgtcacattgcatcgactgaagttcctggggtttgcaaggagaaactggggaaacggaaagcgaccaaacttggaaacctattacgagcgtgtcttgaagagaaaaacatttaacaaggttttaggacatgtcaacaatatattaatctctgcagtgctgccaacagcattccgggtggccaagaaaagggccccaaaagttcttggcacgacccttgtggttggtttgcttgcaggagtgggatattttgcttttatgcttttcagaaagaggcttggcagcatgatattagcatttagacccagaccaaattatttctaggtttgttgggatcttgtcgtggcagctcatccaagcatttagctagaccctgtgattgcccgtggctctctgagtctgtcttattgagtagttagcagtattttttcctaaaattcagaagtcatctttgttacacaacacaggggttcaggtagcaataggacacaaaattgctttattctacaactgccagctccaggcagaaataggaaggcaaagagataagagaaggaaaaatgagagaatgaagtctgtatagggtagagcaatagaaagtaagcttcgggtgcctccaacgttcatggctgcctgtctcattggtaaacctcacatttagttacttgtggctactgcccacacatacacttctgtaattgagaactcttaggagaggactagggaatcactggggatagtgggctggagagaaccccaggctttatatgtatactttgacctcagtgttaattttaaatgcttatgaatcacacacattgctttagtaagattaagtgcttatatactagaaatttgatgctcattggaacacatctgcctagcatttctgtaaaagtcttaagtgatattaagatgattccttaccatttcagatggtccgcaatttgaattaccaagtggtaatggttccttactgttttagatggtgcctgtgagataccattcctctggatggtcatgtccagtcagtgggaggtagaaagggtggcatctgtagccctcttcatacacataagtggcatttaggtgaatgtcccagctaatcactagcatgtctgggtattggctgggtagtgggtattttgatgatctgggagcaccaaatatgttcattcttcgtttggggaggctggtctgtaaacacaaaaattgttgtccagatctttcatctgtttatgatcatcaacaaagacttgttagaaaggtctagtcttagcacttggcagttaatctagggaagatgaattaaatgggtagatagtgatgcatacctgtattcactgatgtatgtttaagggatttgggggggatacctcagttcatgtggaagggacagtctcggtgtgtcccatgaataaccttggaactgcaacaaatggtttgtgctcagaaaaagtctttcatggtgacaggaagacagtttccctggagctggccatgaaggccttagaagccatttctggtgtctggtgggtagcaggcatagagatgatgtgccgaggtcccagtgaacaacagtagccaaagaatgtactaactttatcattaataggaaagtcatacctaggaaacaatgactttttgatggcaaaatgattttttaattctattttgatgctgtaattccatttcatgacctagttgtattagaaaaccttgatgaactatatgttcccgatttacaaaaaaattaataaaacctccagagtaaactcagtcaaacaataattgagtagcagcttttataacatttaaaatttgcacatgagtgtgttgtcatatggagtgtctgaatctgttgctgggacataccaatccatgtattcattagagccatagaagttattattcattagttcatagtgtttgagttctttatgtcactctgttagaaacaagaactgagtcgtgaagaaataagaattggatttttataaaaacctctgaaggatatttacctatgaaaaagttgttaagaataaaaattagaagtccatggttaacttttccttcaatttatattattcctgaatcatagggaatctttctagaatgtgtttataatttccttgtacagtttctttggaaatacgttaaagatagtggcaatttcatatatttcatggatacttgagtttgtgcttttaaggtgtttgtttagggatacaatgaccactagatgtcgctgtttatccagtagactaagattgagtgttctttttgttcagcaactcttctaaaatgtttcaagcaaagatagtaatgacctcagtttctgaaataagggcatcttcatcagattattcttctgttttaaaaaaaagcttgaggcaaatgtgagtgatttccagtgctttgaaagggattacagtatcacacaatgtcaagctagagttaaacacagtattagctaaataggcacttatgtgtattttctttttcatgattatcggtgactggtcagtgtactcatcaatttccaaaatttgtataaatatcacaattagaaaaatgcctgaggtactaaagttatgttggctttttgtgtcttaacacacataaatactattgttattgcagcagatgccttttgaatccattttccataattgcggatagtcataaattgcttgctcaatttttagtaattattgctgttgacaccagcgttgtagatttttggtgttgttgaatgcagtagagagaccaagacactattctgtaagatcaataaaagtaattggaaaataaatatgaacccta

SEQ ID NO: 28153 - DNA, 3898 bp, Homo sapiens
acccggaaacgccttgcggggcagtgtgggagggagaagtccagggcggacaggctgggcgcacccgtgctcgcgcaccccaagatggctgagaggcaggaagagcagagagggagcccgcccttgagggcggaaggcaaggccgacgcggaggttaagctcattctgtaccattggacgcattccttcagctctcaaaaggtgcgcttggtaattgctgaaaaggcattgaagtgcgaggaacatgatgtaagtctgcccttgagtgagcacaatgagccttggtttatgcgtttgaactcaactggagaagtgcctgtccttatccacggggaaaacataatttgtgaggccactcagatcattgattatcttgaacagactttcctggatgaaagaacacccaggttaatgcctgataaagaaagcatgtattacccacgggtacaacattaccgagagctgcttgactccttgccaatggatgcctatacacatggctgcattttacatcctgagttaactgtggactccatgatcccggcttatgcaactacaaggattcgtagccaaattggaaacacagagtctgagctgaagaaacttgctgaagaaaacccagatttacaagaagcatacattgcaaaacagaaacgacttaaatcaaagctgcttgatcatgacaatgtcaagtatttgaagaaaattcttgatgagttggagaaagtcttggatcaggttgaaactgaattgcaaagaagaaatgaagaaaccccagaagagggccagcaaccttggctctgcggtgaatccttcaccctggcagacgtctcactcgctgtcacattgcatcgactgaagttcctggggtttgcaaggagaaactggggaaacggaaagcgaccaaacttggaaacctattacgagcgtgtcttgaagagaaaaacatttaacaaggttttaggacatgtcaacaatatattaatctctgcagtgctgccaacagcattccgggtggccaagaaaagggccccaaaagttcttggcacgacccttgtggttggtttgcttgcaggagtgggatattttgcttttatgcttttcagaaagaggcttggcagcatgatattagcatttagacccagaccaaattatttctaggtttgttgggatcttgtcgtggcagctcatccaagcatttagctagaccctgtgattgcccgtggctctctgagtctgtcttattgagtagttagcagtattttttcctaaaattcagaagtcatctttgttacacaacacaggggttcaggtagcaataggacacaaaattgctttattctacaactgccagctccaggcagaaataggaaggcaaagagataagagaaggaaaaatgagagaatgaagtctgtatagggtagagcaatagaaagtaagcttcgggtgcctccaacgttcatggctgcctgtctcattggtaaacctcacatttagttacttgtggctactgcccacacatacacttctgtaattgagaactcttaggagaggactagggaatcactggggatagtgggctggagagaaccccaggctttatatgtatactttgacctcagtgttaattttaaatgcttatgaatcacacacattgctttagtaagattaagtgcttatatactagaaatttgatgctcattggaacacatctgcctagcatttctgtaaaagtcttaagtgatattaagatgattccttaccatttcagatggtccgcaatttgaattaccaagtggtaatggttccttactgttttagatggtgcctgtgagataccattcctctggatggtcatgtccagtcagtgggaggtagaaagggtggcatctgtagccctcttcatacacataagtggcatttaggtgaatgtcccagctaatcactagcatgtctgggtattggctgggtagtgggtattttgatgatctgggagcaccaaatatgttcattcttcgtttggggaggctggtctgtaaacacaaaaattgttgtccagatctttcatctgtttatgatcatcaacaaagacttgttagaaaggtctagtcttagcacttggcagttaatctagggaagatgaattaaatgggtagatagtgatgcatacctgtattcactgatgtatgtttaagggatttgggggggatacctcagttcatgtggaagggacagtctcggtgtgtcccatgaataaccttggaactgcaacaaatggtttgtgctcagaaaaagtctttcatggtgacaggaagacagtttccctggagctggccatgaaggccttagaagccatttctggtgtctggtgggtagcaggcatagagatgatgtgccgaggtcccagtgaacaacagtagccaaagaatgtactaactttatcattaataggaaagtcatacctaggaaacaatgactttttgatggcaaaatgattttttaattctattttgatgctgtaattccatttcatgacctagttgtattagaaaaccttgatgaactatatgttcccgatttacaaaaaaattaataaaacctccagagtaaactcagtcaaacaataattgagtagcagcttttataacatttaaaatttgcacatgagtgtgttgtcatatggagtgtctgaatctgttgctgggacataccaatccatgtattcattagagccatagaagttattattcattagttcatagtgtttgagttctttatgtcactctgttagaaacaagaactgagtcgtgaagaaataagaattggatttttataaaaacctctgaaggatatttacctatgaaaaagttgttaagaataaaaattagaagtccatggttaacttttccttcaatttatattattcctgaatcatagggaatctttctagaatgtgtttataatttccttgtacagtttctttggaaatacgttaaagatagtggcaatttcatatatttcatggatacttgagtttgtgcttttaaggtgtttgtttagggatacaatgaccactagatgtcgctgtttatccagtagactaagattgagtgttctttttgttcagcaactcttctaaaatgtttcaagcaaagatagtaatgacctcagtttctgaaataagggcatcttcatcagattattcttctgttttaaaaaaaagcttgaggcaaatgtgagtgatttccagtgctttgaaagggattacagtatcacacaatgtcaagctagagttaaacacagtattagctaaataggcacttatgtgtattttctttttcatgattatcggtgactggtcagtgtactcatcaatttccaaaatttgtataaatatcacaattagaaaaatgcctgaggtactaaagttatgttggctttttgtgtcttaacacacataaatactattgttattgcagcagatgccttttgaatccattttccataattgcggatagtcataaattgcttgctcaatttttagtaattattgctgttgacaccagcgttgtagatttttggtgttgttgaatgcagtagagagaccaagacactattctgtaagatcaataaaagtaattggaaaataaatatgaaccctaaaacaaagtactcactttgtaatcttttttggaaaacagatatatttttttcatttaaaatcaaagcatcatgtggtagttaaaagggtaaaataagcagaggttaggtattcaagatacttagctataggatgccatattttcgttataacaaaattgctgactcttgcttcatttaaatatgcacggttaaaatgaatagcggcctaaagaataacactgatctctcaaaaaa

SEQ ID NO: 28154 - DNA, 3518 bp, Homo sapiens
acccggaaacgccttgcggggcagtgtgggagggagaagtccagggcggacaggctgggcgcacccgtgctcgcgcaccccaagatggctgagaggcaggaagagcagagagggagcccgcccttgagggcggaaggcaaggccgacgcggaggttaagctcattctgtaccattggacgcattccttcagctctcaaaaggtgcgcttggtaattgctgaaaaggcattgaagtgcgaggaacatgataaagaacacccaggttaatgcctgataaagaaagcatgtattacccacgggtacaacattaccgagagctgcttgactccttgccaatggatgcctatacacatggctgcattttacatcctgagttaactgtggactccatgatcccggcttatgcaactacaaggattcgtagccaaattggaaacacagagtctgagctgaagaaacttgctgaagaaaacccagatttacaagaagcatacattgcaaaacagaaacgacttaaatcaaagctgcttgatcatgacaatgtcaagtatttgaagaaaattcttgatgagttggagaaagtcttggatcaggttgaaactgaattgcaaagaagaaatgaagaaaccccagaagagggccagcaaccttggctctgcggtgaatccttcaccctggcagacgtctcactcgctgtcacattgcatcgactgaagttcctggggtttgcaaggagaaactggggaaacggaaagcgaccaaacttggaaacctattacgagcgtgtcttgaagagaaaaacatttaacaaggttttaggacatgtcaacaatatattaatctctgcagtgctgccaacagcattccgggtggccaagaaaagggccccaaaagttcttggcacgacccttgtggttggtttgcttgcaggagtgggatattttgcttttatgcttttcagaaagaggcttggcagcatgatattagcatttagacccagaccaaattatttctaggtttgttgggatcttgtcgtggcagctcatccaagcatttagctagaccctgtgattgcccgtggctctctgagtctgtcttattgagtagttagcagtattttttcctaaaattcagaagtcatctttgttacacaacacaggggttcaggtagcaataggacacaaaattgctttattctacaactgccagctccaggcagaaataggaaggcaaagagataagagaaggaaaaatgagagaatgaagtctgtatagggtagagcaatagaaagtaagcttcgggtgcctccaacgttcatggctgcctgtctcattggtaaacctcacatttagttacttgtggctactgcccacacatacacttctgtaattgagaactcttaggagaggactagggaatcactggggatagtgggctggagagaaccccaggctttatatgtatactttgacctcagtgttaattttaaatgcttatgaatcacacacattgctttagtaagattaagtgcttatatactagaaatttgatgctcattggaacacatctgcctagcatttctgtaaaagtcttaagtgatattaagatgattccttaccatttcagatggtccgcaatttgaattaccaagtggtaatggttccttactgttttagatggtgcctgtgagataccattcctctggatggtcatgtccagtcagtgggaggtagaaagggtggcatctgtagccctcttcatacacataagtggcatttaggtgaatgtcccagctaatcactagcatgtctgggtattggctgggtagtgggtattttgatgatctgggagcaccaaatatgttcattcttcgtttggggaggctggtctgtaaacacaaaaattgttgtccagatctttcatctgtttatgatcatcaacaaagacttgttagaaaggtctagtcttagcacttggcagttaatctagggaagatgaattaaatgggtagatagtgatgcatacctgtattcactgatgtatgtttaagggatttgggggggatacctcagttcatgtggaagggacagtctcggtgtgtcccatgaataaccttggaactgcaacaaatggtttgtgctcagaaaaagtctttcatggtgacaggaagacagtttccctggagctggccatgaaggccttagaagccatttctggtgtctggtgggtagcaggcatagagatgatgtgccgaggtcccagtgaacaacagtagccaaagaatgtactaactttatcattaataggaaagtcatacctaggaaacaatgactttttgatggcaaaatgattttttaattctattttgatgctgtaattccatttcatgacctagttgtattagaaaaccttgatgaactatatgttcccgatttacaaaaaaattaataaaacctccagagtaaactcagtcaaacaataattgagtagcagcttttataacatttaaaatttgcacatgagtgtgttgtcatatggagtgtctgaatctgttgctgggacataccaatccatgtattcattagagccatagaagttattattcattagttcatagtgtttgagttctttatgtcactctgttagaaacaagaactgagtcgtgaagaaataagaattggatttttataaaaacctctgaaggatatttacctatgaaaaagttgttaagaataaaaattagaagtccatggttaacttttccttcaatttatattattcctgaatcatagggaatctttctagaatgtgtttataatttccttgtacagtttctttggaaatacgttaaagatagtggcaatttcatatatttcatggatacttgagtttgtgcttttaaggtgtttgtttagggatacaatgaccactagatgtcgctgtttatccagtagactaagattgagtgttctttttgttcagcaactcttctaaaatgtttcaagcaaagatagtaatgacctcagtttctgaaataagggcatcttcatcagattattcttctgttttaaaaaaaagcttgaggcaaatgtgagtgatttccagtgctttgaaagggattacagtatcacacaatgtcaagctagagttaaacacagtattagctaaataggcacttatgtgtattttctttttcatgattatcggtgactggtcagtgtactcatcaatttccaaaatttgtataaatatcacaattagaaaaatgcctgaggtactaaagttatgttggctttttgtgtcttaacacacataaatactattgttattgcagcagatgccttttgaatccattttccataattgcggatagtcataaattgcttgctcaatttttagtaattattgctgttgacaccagcgttgtagatttttggtgttgttgaatgcagtagagagaccaagacactattctgtaagatcaataaaagtaattggaaaataaatatgaacccta

SEQ ID NO: 28155 - DNA, 3533 bp, Homo sapiens
acccggaaacgccttgcggggcagtgtgggagggagaagtccagggcggacaggctgggcgcacccgtgctcgcgcaccccaagatggctgagaggcattgaagtgcgaggaacatgatgtaagtctgcccttgagtgagcacaatgagccttggtttatgcgtttgaactcaactggagaagtgcctgtccttatccacggggaaaacataatttgtgaggccactcagatcattgattatcttgaacagactttcctggatgaaagaacacccaggttaatgcctgataaagaaagcatgtattacccacgggtacaacattaccgagagctgcttgactccttgccaatggatgcctatacacatggctgcattttacatcctgagttaactgtggactccatgatcccggcttatgcaactacaaggattcgtagccaaattggaaacacagagtctgagctgaagaaacttgctgaagaaaacccagatttacaagaagcatacattgcaaaacagaaacgacttaaatcaaagctgcttgatcatgacaatgtcaagtatttgaagaaaattcttgatgagttggagaaagtcttggatcaggttgaaactgaattgcaaagaagaaatgaagaaaccccagaagagggccagcaaccttggctctgcggtgaatccttcaccctggcagacgtctcactcgctgtcacattgcatcgactgaagttcctggggtttgcaaggagaaactggggaaacggaaagcgaccaaacttggaaacctattacgagcgtgtcttgaagagaaaaacatttaacaaggttttaggacatgtcaacaatatattaatctctgcagtgctgccaacagcattccgggtggccaagaaaagggccccaaaagttcttggcacgacccttgtggttggtttgcttgcaggagtgggatattttgcttttatgcttttcagaaagaggcttggcagcatgatattagcatttagacccagaccaaattatttctaggtttgttgggatcttgtcgtggcagctcatccaagcatttagctagaccctgtgattgcccgtggctctctgagtctgtcttattgagtagttagcagtattttttcctaaaattcagaagtcatctttgttacacaacacaggggttcaggtagcaataggacacaaaattgctttattctacaactgccagctccaggcagaaataggaaggcaaagagataagagaaggaaaaatgagagaatgaagtctgtatagggtagagcaatagaaagtaagcttcgggtgcctccaacgttcatggctgcctgtctcattggtaaacctcacatttagttacttgtggctactgcccacacatacacttctgtaattgagaactcttaggagaggactagggaatcactggggatagtgggctggagagaaccccaggctttatatgtatactttgacctcagtgttaattttaaatgcttatgaatcacacacattgctttagtaagattaagtgcttatatactagaaatttgatgctcattggaacacatctgcctagcatttctgtaaaagtcttaagtgatattaagatgattccttaccatttcagatggtccgcaatttgaattaccaagtggtaatggttccttactgttttagatggtgcctgtgagataccattcctctggatggtcatgtccagtcagtgggaggtagaaagggtggcatctgtagccctcttcatacacataagtggcatttaggtgaatgtcccagctaatcactagcatgtctgggtattggctgggtagtgggtattttgatgatctgggagcaccaaatatgttcattcttcgtttggggaggctggtctgtaaacacaaaaattgttgtccagatctttcatctgtttatgatcatcaacaaagacttgttagaaaggtctagtcttagcacttggcagttaatctagggaagatgaattaaatgggtagatagtgatgcatacctgtattcactgatgtatgtttaagggatttgggggggatacctcagttcatgtggaagggacagtctcggtgtgtcccatgaataaccttggaactgcaacaaatggtttgtgctcagaaaaagtctttcatggtgacaggaagacagtttccctggagctggccatgaaggccttagaagccatttctggtgtctggtgggtagcaggcatagagatgatgtgccgaggtcccagtgaacaacagtagccaaagaatgtactaactttatcattaataggaaagtcatacctaggaaacaatgactttttgatggcaaaatgattttttaattctattttgatgctgtaattccatttcatgacctagttgtattagaaaaccttgatgaactatatgttcccgatttacaaaaaaattaataaaacctccagagtaaactcagtcaaacaataattgagtagcagcttttataacatttaaaatttgcacatgagtgtgttgtcatatggagtgtctgaatctgttgctgggacataccaatccatgtattcattagagccatagaagttattattcattagttcatagtgtttgagttctttatgtcactctgttagaaacaagaactgagtcgtgaagaaataagaattggatttttataaaaacctctgaaggatatttacctatgaaaaagttgttaagaataaaaattagaagtccatggttaacttttccttcaatttatattattcctgaatcatagggaatctttctagaatgtgtttataatttccttgtacagtttctttggaaatacgttaaagatagtggcaatttcatatatttcatggatacttgagtttgtgcttttaaggtgtttgtttagggatacaatgaccactagatgtcgctgtttatccagtagactaagattgagtgttctttttgttcagcaactcttctaaaatgtttcaagcaaagatagtaatgacctcagtttctgaaataagggcatcttcatcagattattcttctgttttaaaaaaaagcttgaggcaaatgtgagtgatttccagtgctttgaaagggattacagtatcacacaatgtcaagctagagttaaacacagtattagctaaataggcacttatgtgtattttctttttcatgattatcggtgactggtcagtgtactcatcaatttccaaaatttgtataaatatcacaattagaaaaatgcctgaggtactaaagttatgttggctttttgtgtcttaacacacataaatactattgttattgcagcagatgccttttgaatccattttccataattgcggatagtcataaattgcttgctcaatttttagtaattattgctgttgacaccagcgttgtagatttttggtgttgttgaatgcagtagagagaccaagacactattctgtaagatcaataaaagtaattggaaaataaatatgaacccta

SEQ ID NO: 28156 - DNA, 3387 bp, Homo sapiens
aggtgtagcctccgaccacctcgaagccgtgcgaccaggagcccgagtactcgccctggcccttgggccccgtgcagatgccatgcccgtgcgccttgccctcctcccagccgccgcaaaagaacacccaggttaatgcctgataaagaaagcatgtattacccacgggtacaacattaccgagagctgcttgactccttgccaatggatgcctatacacatggctgcattttacatcctgagttaactgtggactccatgatcccggcttatgcaactacaaggattcgtagccaaattggaaacacagagtctgagctgaagaaacttgctgaagaaaacccagatttacaagaagcatacattgcaaaacagaaacgacttaaatcaaagctgcttgatcatgacaatgtcaagtatttgaagaaaattcttgatgagttggagaaagtcttggatcaggttgaaactgaattgcaaagaagaaatgaagaaaccccagaagagggccagcaaccttggctctgcggtgaatccttcaccctggcagacgtctcactcgctgtcacattgcatcgactgaagttcctggggtttgcaaggagaaactggggaaacggaaagcgaccaaacttggaaacctattacgagcgtgtcttgaagagaaaaacatttaacaaggttttaggacatgtcaacaatatattaatctctgcagtgctgccaacagcattccgggtggccaagaaaagggccccaaaagttcttggcacgacccttgtggttggtttgcttgcaggagtgggatattttgcttttatgcttttcagaaagaggcttggcagcatgatattagcatttagacccagaccaaattatttctaggtttgttgggatcttgtcgtggcagctcatccaagcatttagctagaccctgtgattgcccgtggctctctgagtctgtcttattgagtagttagcagtattttttcctaaaattcagaagtcatctttgttacacaacacaggggttcaggtagcaataggacacaaaattgctttattctacaactgccagctccaggcagaaataggaaggcaaagagataagagaaggaaaaatgagagaatgaagtctgtatagggtagagcaatagaaagtaagcttcgggtgcctccaacgttcatggctgcctgtctcattggtaaacctcacatttagttacttgtggctactgcccacacatacacttctgtaattgagaactcttaggagaggactagggaatcactggggatagtgggctggagagaaccccaggctttatatgtatactttgacctcagtgttaattttaaatgcttatgaatcacacacattgctttagtaagattaagtgcttatatactagaaatttgatgctcattggaacacatctgcctagcatttctgtaaaagtcttaagtgatattaagatgattccttaccatttcagatggtccgcaatttgaattaccaagtggtaatggttccttactgttttagatggtgcctgtgagataccattcctctggatggtcatgtccagtcagtgggaggtagaaagggtggcatctgtagccctcttcatacacataagtggcatttaggtgaatgtcccagctaatcactagcatgtctgggtattggctgggtagtgggtattttgatgatctgggagcaccaaatatgttcattcttcgtttggggaggctggtctgtaaacacaaaaattgttgtccagatctttcatctgtttatgatcatcaacaaagacttgttagaaaggtctagtcttagcacttggcagttaatctagggaagatgaattaaatgggtagatagtgatgcatacctgtattcactgatgtatgtttaagggatttgggggggatacctcagttcatgtggaagggacagtctcggtgtgtcccatgaataaccttggaactgcaacaaatggtttgtgctcagaaaaagtctttcatggtgacaggaagacagtttccctggagctggccatgaaggccttagaagccatttctggtgtctggtgggtagcaggcatagagatgatgtgccgaggtcccagtgaacaacagtagccaaagaatgtactaactttatcattaataggaaagtcatacctaggaaacaatgactttttgatggcaaaatgattttttaattctattttgatgctgtaattccatttcatgacctagttgtattagaaaaccttgatgaactatatgttcccgatttacaaaaaaattaataaaacctccagagtaaactcagtcaaacaataattgagtagcagcttttataacatttaaaatttgcacatgagtgtgttgtcatatggagtgtctgaatctgttgctgggacataccaatccatgtattcattagagccatagaagttattattcattagttcatagtgtttgagttctttatgtcactctgttagaaacaagaactgagtcgtgaagaaataagaattggatttttataaaaacctctgaaggatatttacctatgaaaaagttgttaagaataaaaattagaagtccatggttaacttttccttcaatttatattattcctgaatcatagggaatctttctagaatgtgtttataatttccttgtacagtttctttggaaatacgttaaagatagtggcaatttcatatatttcatggatacttgagtttgtgcttttaaggtgtttgtttagggatacaatgaccactagatgtcgctgtttatccagtagactaagattgagtgttctttttgttcagcaactcttctaaaatgtttcaagcaaagatagtaatgacctcagtttctgaaataagggcatcttcatcagattattcttctgttttaaaaaaaagcttgaggcaaatgtgagtgatttccagtgctttgaaagggattacagtatcacacaatgtcaagctagagttaaacacagtattagctaaataggcacttatgtgtattttctttttcatgattatcggtgactggtcagtgtactcatcaatttccaaaatttgtataaatatcacaattagaaaaatgcctgaggtactaaagttatgttggctttttgtgtcttaacacacataaatactattgttattgcagcagatgccttttgaatccattttccataattgcggatagtcataaattgcttgctcaatttttagtaattattgctgttgacaccagcgttgtagatttttggtgttgttgaatgcagtagagagaccaagacactattctgtaagatcaataaaagtaattggaaaataaatatgaacccta

SEQ ID NO: 28157 - DNA, 3625 bp, Homo sapiens
aacccccaaaggaattgggcttggaagaagggcaagggaaagaagccagaagaaggggaagccccgcccctttgaagggaaaaggggcaaagggcgaccccggagggttaaagttaattctgttaccaatttggaacgcatttcctttcagctctcaaaaagggtgcgcttggtaattgctgaaaaggcattgaagtgcgaggaacatgatgtaagtctgcccttgagtgagcacaatgagccttggtttatgcgtttgaactcaactggagaagtgcctgtccttatccacggggaaaacataatttgtgaggccactcagatcattgattatcttgaacagactttcctggatgaaagaacacccaggttaatgcctgataaagaaagcatgtattacccacgggtacaacattaccgagagctgcttgactccttgccaatggatgcctatacacatggctgcattttacatcctgagttaactgtggactccatgatcccggcttatgcaactacaaggattcgtagccaaattggaaacacagagtctgagctgaagaaacttgctgaagaaaacccagatttacaagaagcatacattgcaaaacagaaacgacttaaatcaaagctgcttgatcatgacaatgtcaagtatttgaagaaaattcttgatgagttggagaaagtcttggatcaggttgaaactgaattgcaaagaagaaatgaagaaaccccagaagagggccagcaaccttggctctgcggtgaatccttcaccctggcagacgtctcactcgctgtcacattgcatcgactgaagttcctggggtttgcaaggagaaactggggaaacggaaagcgaccaaacttggaaacctattacgagcgtgtcttgaagagaaaaacatttaacaaggttttaggacatgtcaacaatatattaatctctgcagtgctgccaacagcattccgggtggccaagaaaagggccccaaaagttcttggcacgacccttgtggttggtttgcttgcaggagtgggatattttgcttttatgcttttcagaaagaggcttggcagcatgatattagcatttagacccagaccaaattatttctaggtttgttgggatcttgtcgtggcagctcatccaagcatttagctagaccctgtgattgcccgtggctctctgagtctgtcttattgagtagttagcagtattttttcctaaaattcagaagtcatctttgttacacaacacaggggttcaggtagcaataggacacaaaattgctttattctacaactgccagctccaggcagaaataggaaggcaaagagataagagaaggaaaaatgagagaatgaagtctgtatagggtagagcaatagaaagtaagcttcgggtgcctccaacgttcatggctgcctgtctcattggtaaacctcacatttagttacttgtggctactgcccacacatacacttctgtaattgagaactcttaggagaggactagggaatcactggggatagtgggctggagagaaccccaggctttatatgtatactttgacctcagtgttaattttaaatgcttatgaatcacacacattgctttagtaagattaagtgcttatatactagaaatttgatgctcattggaacacatctgcctagcatttctgtaaaagtcttaagtgatattaagatgattccttaccatttcagatggtccgcaatttgaattaccaagtggtaatggttccttactgttttagatggtgcctgtgagataccattcctctggatggtcatgtccagtcagtgggaggtagaaagggtggcatctgtagccctcttcatacacataagtggcatttaggtgaatgtcccagctaatcactagcatgtctgggtattggctgggtagtgggtattttgatgatctgggagcaccaaatatgttcattcttcgtttggggaggctggtctgtaaacacaaaaattgttgtccagatctttcatctgtttatgatcatcaacaaagacttgttagaaaggtctagtcttagcacttggcagttaatctagggaagatgaattaaatgggtagatagtgatgcatacctgtattcactgatgtatgtttaagggatttgggggggatacctcagttcatgtggaagggacagtctcggtgtgtcccatgaataaccttggaactgcaacaaatggtttgtgctcagaaaaagtctttcatggtgacaggaagacagtttccctggagctggccatgaaggccttagaagccatttctggtgtctggtgggtagcaggcatagagatgatgtgccgaggtcccagtgaacaacagtagccaaagaatgtactaactttatcattaataggaaagtcatacctaggaaacaatgactttttgatggcaaaatgattttttaattctattttgatgctgtaattccatttcatgacctagttgtattagaaaaccttgatgaactatatgttcccgatttacaaaaaaattaataaaacctccagagtaaactcagtcaaacaataattgagtagcagcttttataacatttaaaatttgcacatgagtgtgttgtcatatggagtgtctgaatctgttgctgggacataccaatccatgtattcattagagccatagaagttattattcattagttcatagtgtttgagttctttatgtcactctgttagaaacaagaactgagtcgtgaagaaataagaattggatttttataaaaacctctgaaggatatttacctatgaaaaagttgttaagaataaaaattagaagtccatggttaacttttccttcaatttatattattcctgaatcatagggaatctttctagaatgtgtttataatttccttgtacagtttctttggaaatacgttaaagatagtggcaatttcatatatttcatggatacttgagtttgtgcttttaaggtgtttgtttagggatacaatgaccactagatgtcgctgtttatccagtagactaagattgagtgttctttttgttcagcaactcttctaaaatgtttcaagcaaagatagtaatgacctcagtttctgaaataagggcatcttcatcagattattcttctgttttaaaaaaaagcttgaggcaaatgtgagtgatttccagtgctttgaaagggattacagtatcacacaatgtcaagctagagttaaacacagtattagctaaataggcacttatgtgtattttctttttcatgattatcggtgactggtcagtgtactcatcaatttccaaaatttgtataaatatcacaattagaaaaatgcctgaggtactaaagttatgttggctttttgtgtcttaacacacataaatactattgttattgcagcagatgccttttgaatccattttccataattgcggatagtcataaattgcttgctcaatttttagtaattattgctgttgacaccagcgttgtagatttttggtgttgttgaatgcagtagagagaccaagacactattctgtaagatcaataaaagtaattggaaaataaatatgaacccta

SEQ ID NO: 28158 - DNA, 3371 bp, Homo sapiens
ggctggtacggtctgggagttaaggatcgcctgggccagcgccgcgcgcgagaggacagcccaggttcccgagcggaccttcagctgctcccgcccgcccacaaagaacacccaggttaatgcctgataaagaaagcatgtattacccacgggtacaacattaccgagagctgcttgactccttgccaatggatgcctatacacatggctgcattttacatcctgagttaactgtggactccatgatcccggcttatgcaactacaaggattcgtagccaaattggaaacacagagtctgagctgaagaaacttgctgaagaaaacccagatttacaagaagcatacattgcaaaacagaaacgacttaaatcaaagctgcttgatcatgacaatgtcaagtatttgaagaaaattcttgatgagttggagaaagtcttggatcaggttgaaactgaattgcaaagaagaaatgaagaaaccccagaagagggccagcaaccttggctctgcggtgaatccttcaccctggcagacgtctcactcgctgtcacattgcatcgactgaagttcctggggtttgcaaggagaaactggggaaacggaaagcgaccaaacttggaaacctattacgagcgtgtcttgaagagaaaaacatttaacaaggttttaggacatgtcaacaatatattaatctctgcagtgctgccaacagcattccgggtggccaagaaaagggccccaaaagttcttggcacgacccttgtggttggtttgcttgcaggagtgggatattttgcttttatgcttttcagaaagaggcttggcagcatgatattagcatttagacccagaccaaattatttctaggtttgttgggatcttgtcgtggcagctcatccaagcatttagctagaccctgtgattgcccgtggctctctgagtctgtcttattgagtagttagcagtattttttcctaaaattcagaagtcatctttgttacacaacacaggggttcaggtagcaataggacacaaaattgctttattctacaactgccagctccaggcagaaataggaaggcaaagagataagagaaggaaaaatgagagaatgaagtctgtatagggtagagcaatagaaagtaagcttcgggtgcctccaacgttcatggctgcctgtctcattggtaaacctcacatttagttacttgtggctactgcccacacatacacttctgtaattgagaactcttaggagaggactagggaatcactggggatagtgggctggagagaaccccaggctttatatgtatactttgacctcagtgttaattttaaatgcttatgaatcacacacattgctttagtaagattaagtgcttatatactagaaatttgatgctcattggaacacatctgcctagcatttctgtaaaagtcttaagtgatattaagatgattccttaccatttcagatggtccgcaatttgaattaccaagtggtaatggttccttactgttttagatggtgcctgtgagataccattcctctggatggtcatgtccagtcagtgggaggtagaaagggtggcatctgtagccctcttcatacacataagtggcatttaggtgaatgtcccagctaatcactagcatgtctgggtattggctgggtagtgggtattttgatgatctgggagcaccaaatatgttcattcttcgtttggggaggctggtctgtaaacacaaaaattgttgtccagatctttcatctgtttatgatcatcaacaaagacttgttagaaaggtctagtcttagcacttggcagttaatctagggaagatgaattaaatgggtagatagtgatgcatacctgtattcactgatgtatgtttaagggatttgggggggatacctcagttcatgtggaagggacagtctcggtgtgtcccatgaataaccttggaactgcaacaaatggtttgtgctcagaaaaagtctttcatggtgacaggaagacagtttccctggagctggccatgaaggccttagaagccatttctggtgtctggtgggtagcaggcatagagatgatgtgccgaggtcccagtgaacaacagtagccaaagaatgtactaactttatcattaataggaaagtcatacctaggaaacaatgactttttgatggcaaaatgattttttaattctattttgatgctgtaattccatttcatgacctagttgtattagaaaaccttgatgaactatatgttcccgatttacaaaaaaattaataaaacctccagagtaaactcagtcaaacaataattgagtagcagcttttataacatttaaaatttgcacatgagtgtgttgtcatatggagtgtctgaatctgttgctgggacataccaatccatgtattcattagagccatagaagttattattcattagttcatagtgtttgagttctttatgtcactctgttagaaacaagaactgagtcgtgaagaaataagaattggatttttataaaaacctctgaaggatatttacctatgaaaaagttgttaagaataaaaattagaagtccatggttaacttttccttcaatttatattattcctgaatcatagggaatctttctagaatgtgtttataatttccttgtacagtttctttggaaatacgttaaagatagtggcaatttcatatatttcatggatacttgagtttgtgcttttaaggtgtttgtttagggatacaatgaccactagatgtcgctgtttatccagtagactaagattgagtgttctttttgttcagcaactcttctaaaatgtttcaagcaaagatagtaatgacctcagtttctgaaataagggcatcttcatcagattattcttctgttttaaaaaaaagcttgaggcaaatgtgagtgatttccagtgctttgaaagggattacagtatcacacaatgtcaagctagagttaaacacagtattagctaaataggcacttatgtgtattttctttttcatgattatcggtgactggtcagtgtactcatcaatttccaaaatttgtataaatatcacaattagaaaaatgcctgaggtactaaagttatgttggctttttgtgtcttaacacacataaatactattgttattgcagcagatgccttttgaatccattttccataattgcggatagtcataaattgcttgctcaatttttagtaattattgctgttgacaccagcgttgtagatttttggtgttgttgaatgcagtagagagaccaagacactattctgtaagatcaataaaagtaattggaaaataaatatgaacccta

SEQ ID NO: 28159 - DNA, 2526 bp, Homo sapiens
acccggaaacgccttgcggggcagtgtgggagggagaagtccagggcggacaggctgggcgcacccgtgctcgcgcaccccaagatggctgagaggcaggaagagcagagagggagcccgcccttgagggcggaaggcaaggccgacgcggaggttaagctcattctgtaccattggacgcattccttcagctctcaaaaggtgcgcttggtaattgctgaaaaggcattgaagtgcgaggaacatgatgtaagtctgcccttgagtgagcacaatgagccttggtttatgcgtttgaactcaactggagaagtgcctgtccttatccacggggaaaacataatttgtgaggccactcagatcattgattatcttgaacagactttcctggatgaaagaacacccaggttaatgcctgataaagaaagcatgtattacccacgggtacaacattaccgagagctgcttgactccttgccaatggatgcctatacacatggctgcattttacatcctgagttaactgtggactccatgatcccggcttatgcaactacaaggattcgtagccaaattggaaacacagagtctgagctgaagaaacttgctgaagaaaacccagatttacaagaagcatacattgcaaaacagaaacgacttaaatcaaagctgcttgatcatgacaatgtcaagtatttgaagaaaattcttgatgagttggagaaagtcttggatcaggttgaaactgaattgcaaagaagaaatgaagaaaccccagaagagggccagcaaccttggctctgcggtgaatccttcaccctggcagacgtctcactcgctgtcacattgcatcgactgaagttcctggggtttgcaaggagaaactggggaaacggaaagcgaccaaacttggaaacctattacgagcgtgtcttgaagagaaaaacatttaacaaggttttaggacatgtcaacaatatattaatctctgcagtgctgccaacagcattccgggtggccaagaaaagggccccaaaagttcttggcacgacccttgtggttggtttgcttgcaggagtgggatattttgcttttatgcttttcagaaagaggcttggcagcatgatattagcatttagacccagaccaaattatttctaggtttgttgggatcttgtcgtggcagctcatccaagcatttagctagaccctgtgattgcccgtggctctctgagtctgtcttattgagtagttagcagtattttttcctaaaattcagaagtcatctttgttacacaacacaggggttcaggtagcaataggacacaaaattgctttattctacaactgccagctccaggcagaaataggaaggcaaagagataagagaaggaaaaatgagagaatgaagtctgtatagggtagagcaatagaaagtaagcttcgggtgcctccaacgttcatggctgcctgtctcattggtaaacctcacatttagttacttgtggctactgcccacacatacacttctgtaattgagaactcttaggagaggactagggaatcactggggatagtgggctggagagaaccccaggctttatatgtatactttgacctcagtgttaattttaaatgcttatgaatcacacacattgctttagtaagattaagtgcttatatactagaaatttgatgctcattggaacacatctgcctagcatttctgtaaaagtcttaagtgatattaagatgattccttaccatttcagatggtccgcaatttgaattaccaagtggtaatggttccttactgttttagatggtgcctgtgagataccattcctctggatggtcatgtccagtcagtgggaggtagaaagggtggcatctgtagccctcttcatacacataagtggcatttaggtgaatgtcccagctaatcactagcatgtctgggtattggctgggtagtgggtattttgatgatctgggagcaccaaatatgttcattcttcgtttggggaggctggtctgtaaacacaaaaattgttgtccagatctttcatctgtttatgatcatcaacaaagacttgttagaaaggtctagtcttagcacttggcagttaatctagggaagatgaattaaatgggtagatagtgatgcatacctgtattcactgatgtatgtttaagggatttgggggggatacctcagttcatgtggaagggacagtctcggtgtgtcccatgaataaccttggaactgcaacaaatggtttgtgctcagaaaaagtctttcatggtgacaggaagacagtttccctggagctggccatgaaggccttagaagccatttctggtgtctggcgctacagcttataatagttacttggaccagtctttttttgtgaagagttttaatcctattgtgggtgatcccttctgactatctcttgaaccttggtacaattgccgtatacacaatttaacatttcctgtacttgtcactatggtcgtttttca

SEQ ID NO: 28160 - DNA, 4783 bp, Homo sapiens
cgggagcccaggcgggcaggccgctggggtcggggctgcacgtacgagagccgggacgcccgggttcagagcgaaggaggaggcatggcttcggtgttcatgtgtggcgtggaggacctgctgttcagcggcagccgcttcgtatggaacttgaccgtgtccacgctgcggagatggtacacggagaggctgcgggcttgccaccaggtgctgcggacgtggtgcgggctgcaggacgtgtaccagatgacagaaggcaggcactgccaggtgcacctcctggatgataggagactggagctgctggttcagcccaaacttctagcaagagagttgctggacctagtggcttcacatttcaacctgaaagaaaaggagtattttggaataacattcatagatgacacaggtcagcagaactggctgcagttagatcaccgagttcttgaccacgatttgcccaagaaaccaggcccaaccattttgcactttgctgtgaggttttacattgagagcatatcgtttttaaaggataaaaccaccgtggagctgtttttcctgaatgcaaaggcctgtgtgcacaaggggcaaatcgaagtagagagcgaaaccatcttcaagttagcagcgtttattttacaggaagccaagggagattataccagtgatgaaaatgccaggaaagatttaaagacattaccagcctttccaaccaaaactcttcaggagcatccatcccttgcctactgtgaggacagggtaattgagcattatttgaaaatcaaaggtctcactcgaggtcaagctgtggttcagtatatgaaaatagtagaagctctaccgacttacggtgtccattattatgcagtaaaggataagcaaggacttccttggtggcttggaataagctataagggaattggccaatatgatatacaagacaaggtgaagcctcggaagttattccaatggaaacagctggagaacttatatttccgtgagaaaaaatttgctgttgaagttcatgatccacgaaggatttcagtttcaagaagaacctttgggcaaagtggcctgtttgtgcaaacatggtatgctaactcttctctcatcaagtccatttgggtaatggcaattagtcagcatcagttttacttggaccggaagcaaagcaaagcaaaaattccttcagccaggagtttagatgagattgcaatggatttgacagagacaggaacacaaagggcctccaagctggtgacactggaggcgaaaagtcagttcatcatggcaagtaatggcagtttaatctcctcaggttctcaagactcagaagttagtgaagagcaaaagagagaaaaaatccttgaactaaagaagaaggagaaactattacaagaaaaacttctgaaaaaagttgaggagcttaagaagatctgtctgcgggaggctgagctcacaggcaaaatgccaaaggagtatcccctgaacataggcgagaagcctcctcaggtcagaagacgtgtgggtactgcgttcaaattagatgacaacttgctgccgagtgaagaagatcctgctttgcaagaactggagagtaattttctaatacaacaaaagctggtggaagctgcaaagaaacttgccaatgagccagacctttgtaaaactgtgaagaaaaagcgaaagcaagattacacagatgcgatgaaaaagcttcaggagattgaaaatgcaataaacgaataccgaattaggtgtggaaagaaacccagccagaaagcaacagtgttaccagaagacataatcccctcagagagtagctctttgtctgacaccaccacctatgatgatcccagtgatgccttcacttttcctgggcagcgatcaagttcagtacctcattctccaagaattcttccccccaagtctcttggtattgagcgaatccatttcagaaagtcgtccatcaatgaacagtttgtggataccaggcagtccagagaaatgctgtccacacacagcagcccttacaaaactctggagaggcggccccagggaggacgaagcatgcccaccacgccagttcttacccgaaacgcctacagcagcagccacttggaacccgaatcttcatctcagcactgccgccagcggagtggaagcctggagtcccagtcccatctgctctccgagatggacagcgataagccatttttctccctctccaaatcccaaagaagcagcagcacagaaatcctcgatgacgggtcttcttatacaagccaatcaagcacagagtattactgtgtgacaccagttaccggcccctattacaccacccagaccctggacactcgcaccaggggtcggaggaggtcaaagaaacagaatgtttctacttcaaattcaggaagcatgcccaacctagcacaaaaggatagtttgaggaatggtgtttactcaaagagtcaggagccaccgtcttccagttactacattgccgggtacacaccctatgcagagtgtgacttttattacagtggtggttatgtctatgagaatgacaccgagggacagtatagtgtcaacccttcctaccggtcctcagcccactatggatatgagcgccagagggactacagcagatcctttcacgaagatgaggtcgaccgggtaccccataacccatatgcaactctccggctgccaaggaaggctgctgcaaaatcggagcacatcaccaaaaacatccacaaggccttagttgccgagcacttgcgtggctggtaccagcgggcctctgggcagaaggatcagggacacagcccgcagaccagctttgactcagacaggggatcacagagatgcctggggtttgcggggctgcaagtaccttgttctccaagcagtcgtgcatccttgtactcttcagtgtcttctacaaatgcttctgggaactggaggacccagttaaccatagggctgtcggattacgagactccagcacattcttcttacaccagctgctatggcaatgtctataatcctttaccctctccaagcagacaatacacagaaatcagtcaactggatggtacagatggaaaccagctggaagacaacctggagagtagtgagcagagactcttttggcatgaagattcaaagcctggaacattagtctgaactgcagttggacctcctgaccaagcactgcgttctcacactagtgtgccttgcaaattgtatttgtcttccgagaggatgttcgttttagaaacctaaagacatcaaaggttgaagagaagacttagttgccctggaagtgaatcagtgaatcacacaccaagccccacaaagcccctaaaggaggatttggcctttcaaactctaggcactaacgtaactgtagggtctgcccacatgttgaagtattgccaagagaggactcagtgtgaagccttcatcaatagcaagcactttttaagggagtaaaagttgttaaaggcaaacgtcaaaaacatgaaagggcattcaggatgtcccatggcaataagaacaggggaaatctcagagcacaattcagcaggatgagagaaggggaaccagaagctccggagtcattgctcacttcagagtttgaattcgtgagctgacaaagagtaacatgctctttctacacagacatggacaatttagacagtattggaaaattacttgaagctggattttcatgaagttctgaatgagtgtaaatgttttttaggatactataaagagtgatgtttttcataagcaccataaaatgggttctggaaaaactgattaccttagcatcctgtaatataacttatggtagcagattggggaaaatgaagcagcccactgaataattgacaaagtctgcttggagaacattctaaggtacaatatcatggagctcctttttcctttctccactaattgcgtgatgagctattgttctggctggtaattctccaactcggctgtcatttgaagtggcagacttaatatggaaagtttttataattatgagtttgaaaaagcattttaagatgatacagaaagtatccaaaacaacagaaaaaaaaagccacgtcattttagatgaattgcgtgccttaaaatggtgaacgttagaaaattaaacaagtctggattccacaagtagttccaagtcaccaagtgacaaaaacaaggttaacattaaaaaagaaaaacaacaacaacgacaaaaagctccaagctgcagtggatttaattatgaggctaaaactacctcatactttccttggaagaactaattagctatggtttattgtagggttttgtttgtttgttttttaaagcaaatgatttccatattcctgattgatcttttttgtcatctttgcttcaaaattacataaaaggtgctcctttcccccttcttttatacaagtttcttgttcatattgtgaatagaaaagtttctgaacaacttttttggaacattttctatctatattccaaagcatgtaatatatacataaaaacgatttgttaaactggtccttagtcatttgtataattagaaatgaagtttgggaaaaaattttggaaaaaagacaagcaaaaaaaaaataacttattccttttttgcatatttgtatagccttctagaatcagaaataacctttttgcatattcttttattgttctgacttttcaagacctattatttttttacataggtcaataaacaaaaggtgtgctactg

SEQ ID NO: 28161 - DNA, 2161 bp, Homo sapiens
  misc_feature (1445)..(1445): n is a, c, g, or t
  misc_feature (1449)..(1449): n is a, c, g, or t
  misc_feature (1456)..(1456): n is a, c, g, or t
  misc_feature (1460)..(1460): n is a, c, g, or t
  misc_feature (1468)..(1469): n is a, c, g, or t
  misc_feature (1484)..(1484): n is a, c, g, or t
  misc_feature (1486)..(1486): n is a, c, g, or t
  misc_feature (1493)..(1493): n is a, c, g, or t
  misc_feature (1500)..(1500): n is a, c, g, or t
  misc_feature (1502)..(1502): n is a, c, g, or t
  misc_feature (1506)..(1506): n is a, c, g, or t
  misc_feature (1510)..(1510): n is a, c, g, or t
  misc_feature (1518)..(1518): n is a, c, g, or t
  misc_feature (1526)..(1526): n is a, c, g, or t
  misc_feature (1537)..(1537): n is a, c, g, or t
  misc_feature (1546)..(1546): n is a, c, g, or t
  misc_feature (1548)..(1549): n is a, c, g, or t
  misc_feature (1556)..(1556): n is a, c, g, or t
  misc_feature (1560)..(1561): n is a, c, g, or t
  misc_feature (1571)..(1571): n is a, c, g, or t
  misc_feature (1573)..(1573): n is a, c, g, or t
  misc_feature (1588)..(1588): n is a, c, g, or t
  misc_feature (1591)..(1591): n is a, c, g, or t
  misc_feature (1595)..(1595): n is a, c, g, or t
  misc_feature (1604)..(1604): n is a, c, g, or t
  misc_feature (1641)..(1641): n is a, c, g, or t
  misc_feature (1647)..(1647): n is a, c, g, or t
  misc_feature (1651)..(1651): n is a, c, g, or t
  misc_feature (1884)..(1884): n is a, c, g, or t
  misc_feature (1888)..(1888): n is a, c, g, or t
  misc_feature (1899)..(1899): n is a, c, g, or t
  misc_feature (1909)..(1909): n is a, c, g, or t
  misc_feature (1932)..(1933): n is a, c, g, or t
  misc_feature (1937)..(1937): n is a, c, g, or t
  misc_feature (1964)..(1964): n is a, c, g, or t
  misc_feature (1971)..(1971): n is a, c, g, or t
  misc_feature (1976)..(1976): n is a, c, g, or t
  misc_feature (1979)..(1979): n is a, c, g, or t
  misc_feature (1982)..(1982): n is a, c, g, or t
  misc_feature (2014)..(2017): n is a, c, g, or t
  misc_feature (2020)..(2020): n is a, c, g, or t
  misc_feature (2027)..(2027): n is a, c, g, or t
  misc_feature (2032)..(2034): n is a, c, g, or t
  misc_feature (2039)..(2039): n is a, c, g, or t
  misc_feature (2050)..(2050): n is a, c, g, or t
  misc_feature (2052)..(2053): n is a, c, g, or t
  misc_feature (2064)..(2064): n is a, c, g, or t
  misc_feature (2070)..(2070): n is a, c, g, or t
  misc_feature (2073)..(2073): n is a, c, g, or t
  misc_feature (2081)..(2082): n is a, c, g, or t
  misc_feature (2088)..(2088): n is a, c, g, or t
  misc_feature (2092)..(2093): n is a, c, g, or t
  misc_feature (2105)..(2105): n is a, c, g, or t
  misc_feature (2111)..(2111): n is a, c, g, or t
  misc_feature (2113)..(2113): n is a, c, g, or t
  misc_feature (2115)..(2115): n is a, c, g, or t
  misc_feature (2117)..(2117): n is a, c, g, or t
  misc_feature (2129)..(2129): n is a, c, g, or t
  misc_feature (2133)..(2135): n is a, c, g, or t
  misc_feature (2138)..(2138): n is a, c, g, or t
  misc_feature (2142)..(2142): n is a, c, g, or t
  misc_feature (2151)..(2151): n is a, c, g, or t
  misc_feature (2154)..(2154): n is a, c, g, or t
  misc_feature (2157)..(2161): n is a, c, g, or t
actctgaggactgactcttaccagctggggagcaaacaggccagctggagaccgagatgacagaaggcaggcactgccaggtgcacctcctggatgataggagactggagctgctggttcagcccaaacttctagcaagagagttgctggacctagtggcttcacatttcaacctgaaagaaaaggagtattttggaataacattcatagatgacacaggtcagcagaactggctgcagttagatcaccgagttcttgaccacgatttgcccaagaaaccaggcccaaccattttgcactttgctgtgaggttttacattgagagcatatcgtttttaaaggataaaaccaccgtggagctgtttttcctgaatgcaaaggcctgtgtgcacaaggggcaaatcgaagtagagagcgaaaccatcttcaagttagcagcgtttattttacaggaagccaagggagattataccagtgatgaaaatgccaggaaagatttaaagacattaccagcctttccaaccaaaactcttcaggagcatccatcccttgcctactgtgaggacagggtaattgagcattatttgaaaatcaaaggtctcactcgaggtcaagctgtggttcagtatatgaaaatagtagaagctctaccgacttacggtgtccattattatgcagtaaaggataagcaaggacttccttggtggcttggaataagctataagggaattggccaatatgatatacaagacaaggtgaagcctcggaagttattccaatggaaacggctggagaacttatatttccgtgagaaaaaatttgctgttgaagttcatgatccacgaaggtgaggatcaaagacgtttctctgtatgacacagttactatacaaataacgctgctatcaacatttgtgtacaagtttttatatgaacatatgttttcatttctcttgggtgtatacctaggaatggaattgctgggtcaaatggtaactatctttaaccctctgaggaatggcaaggctacttttcaaagtgctgcaccattttacatcccaagcagcagtatatgtggttccaatgccgacacatcctcaccgacacttgttatttttagttttgtgtgcatgtatagtttatgccatcctagtgggttgaagtggtaccttcttgtggttttgatttgcacttccctcatgactaatgatggctgagcatcttttcatgtgctgcttagctattcctatatctttagtagagaaatgtctattcagatcttttgctcatttaaaatgttggtgttcttggtcatttaaaaaaaaaaaagtcaaattaccaacatgaactgaagtcaggatgtgggttctcaaatatcttagaagaaatcccgcccccctccgcccgcccccaactgccagacagagtcttactctgtcacccagnctgnagtgcantggngcaatctnngctcactgcaacctncncctcccnggttcangngatnctcntgcctcancctcccangtagctgggantacaggcangnnccaccangccnngctaattttntntttttagtagagacnggntttnaccatgttngccaggctggtctcaaactcctgacctcaggtgatcngcccgnctcngcctcccaaagtgctgagccgtggcacccggccttaagagaaattcttaatcagtccttagtgggtacttttcagtcccgagatggttatggatgtttagaggccagagggatgggaggaaatacctgtgataaaaaggtgacctgaagagataagccgaattcctacaaagaactacttgcacagacaccaaagccaaaaatatctggcctttaagaaaaagtttgctgccnggcncggtggctcangcctgtaatnccagcactttgggaggccgaggnnggcngatcatgaggtcaggagatgagaccancctggcnaacanggnganaccccatctctactaaaaatacaaaaattagnnnngcntggtggngggcnnntgtantcccagctacncnngaggctgaggnagaatngcntgaacccnngaggcngagnntgcagtgagccnagatcncncnantgcactccagcntggnnnacngagngagactccntcnccnnnnn

SEQ ID NO: 28162 - DNA, 1108 bp, Homo sapiens
tgagttctctctcccacttgacagccctgatttgcaactgagtgtagataactttgagcacttcagaatctcctcctacagagacagtagaagtctaaaacggtgtattcagtgacatgcatcctgtaagaagccaaatggctttgatgagaaatccagaagaaagagtgtatgaaagaaaaagatgacatctatgcatagcaaacaaaatctgaagattattacagtaaaaacaaaagaaaggcaagagaatacttactagttaaagagataaggtctcaccatgttgtccagactggacttgaactcctggcttcaagcaatctgcccacctccgcctcccaaagtcctgggatttataggcatgaaccaccgcacctggcctccccaccattttattttctcccgtggctatcacaaccaggaataagagagggagggggacctcagtggtgattttatgctaaggattatggataacaccatccccccattttacaaatgaagaaactggggctcaaaaagcttaattaaatgtctaaggccactgaggcagcaattaaagaggatgtgaagccagtctgctttgtcttcttctggagcctctccttgaggctgacacacctgatcatagccccattatcttaagagtgttagccatatccagtggccagcacactctagacacttctgttattgtagagagacctgttagagatggatgcaagagatttaccctttttcagccttgcctctgctgtcttggggaagtgggaaggttgctttaaatgacgtgtctcgtgatctgtaaataaaagaaaaataatttctggccacttcaattatggcataagttttggttatctgacacccaccctcaccctctccccaacaaaaatgtgtagtcactactttatcctcaagagcctggcacagagtaggtgctcaaaaaatagtcattcactggaaagcaaacaagacaatggatgaagccagcaaaatggaccacgttcacaatttgatggaaattgggtattttattatgtaatcagaagaaagaaatgataaaatagactaattgccaattatagggaaaaaacagtcccaa

SEQ ID NO: 28163 - DNA, 1168 bp, Homo sapiens
cgggagcccaggcgggcaggccgctggggtcggggctgcacgtacgagagccgggacgcccgggttcagagcgaaggaggaggcatggcttcggtgttcatgtgtggcgtggaggacctgctgttcagcggcagccgcttcgtatggaacttgaccgtgtccacgctgcggagatggtacacggagaggctgcgggcttgccaccaggtgctgcggacgtggtgcgggctgcaggacgtgtaccagataagtaccagtgcaaaagccttttggattatttctcattcttccacttttgcctcacccactccagtttggtctcctcacaagataaggtctcaccatgttgtccagactggacttgaactcctggcttcaagcaatctgcccacctccgcctcccaaagtcctgggatttataggcatgaaccaccgcacctggcctccccaccattttattttctcccgtggctatcacaaccaggaataagagagggagggggacctcagtggtgattttatgctaaggattatggataacaccatccccccattttacaaatgaagaaactggggctcaaaaagcttaattaaatgtctaaggccactgaggcagcaattaaagaggatgtgaagccagtctgctttgtcttcttctggagcctctccttgaggctgacacacctgatcatagccccattatcttaagagtgttagccatatccagtggccagcacactctagacacttctgttattgtagagagacctgttagagatggatgcaagagatttaccctttttcagccttgcctctgctgtcttggggaagtgggaaggttgctttaaatgacgtgtctcgtgatctgtaaataaaagaaaaataatttctggccacttcaattatggcataagttttggttatctgacacccaccctcaccctctccccaacaaaaatgtgtagtcactactttatcctcaagagcctggcacagagtaggtgctcaaaaaatagtcattcactggaaagcaaacaagacaatggatgaagccagcaaaatggaccacgttcacaatttgatggaaattgggtattttattatgtaatcagaagaaagaaatgataaaatagactaattgccaattatagggaaaaaacagtcccaa

SEQ ID NO: 28164 - DNA, 4638 bp, Homo sapiens
gcacacacacacacaccgcacaagtgcttaatacgtgtgtcttttgtcttaagcactctcttcagttcctttaaatgagccgaggtcatggtggttcggagatgacagaaggcaggcactgccaggtgcacctcctggatgataggagactggagctgctggttcagcccaaacttctagcaagagagttgctggacctagtggcttcacatttcaacctgaaagaaaaggagtattttggaataacattcatagatgacacaggtcagcagaactggctgcagttagatcaccgagttcttgaccacgatttgcccaagaaaccaggcccaaccattttgcactttgctgtgaggttttacattgagagcatatcgtttttaaaggataaaaccaccgtggagctgtttttcctgaatgcaaaggcctgtgtgcacaaggggcaaatcgaagtagagagcgaaaccatcttcaagttagcagcgtttattttacaggaagccaagggagattataccagtgatgaaaatgccaggaaagatttaaagacattaccagcctttccaaccaaaactcttcaggagcatccatcccttgcctactgtgaggacagggtaattgagcattatttgaaaatcaaaggtctcactcgaggtcaagctgtggttcagtatatgaaaatagtagaagctctaccgacttacggtgtccattattatgcagtaaaggataagcaaggacttccttggtggcttggaataagctataagggaattggccaatatgatatacaagacaaggtgaagcctcggaagttattccaatggaaacagctggagaacttatatttccgtgagaaaaaatttgctgttgaagttcatgatccacgaaggatttcagtttcaagaagaacctttgggcaaagtggcctgtttgtgcaaacatggtatgctaactcttctctcatcaagtccatttgggtaatggcaattagtcagcatcagttttacttggaccggaagcaaagcaaagcaaaaattccttcagccaggagtttagatgagattgcaatggatttgacagagacaggaacacaaagggcctccaagctggtgacactggaggcgaaaagtcagttcatcatggcaagtaatggcagtttaatctcctcaggttctcaagactcagaagttagtgaagagcaaaagagagaaaaaatccttgaactaaagaagaaggagaaactattacaagaaaaacttctgaaaaaagttgaggagcttaagaagatctgtctgcgggaggctgagctcacaggcaaaatgccaaaggagtatcccctgaacataggcgagaagcctcctcaggtcagaagacgtgtgggtactgcgttcaaattagatgacaacttgctgccgagtgaagaagatcctgctttgcaagaactggagagtaattttctaatacaacaaaagctggtggaagctgcaaagaaacttgccaatgagccagacctttgtaaaactgtgaagaaaaagcgaaagcaagattacacagatgcgatgaaaaagcttcaggagattgaaaatgcaataaacgaataccgaattaggtgtggaaagaaacccagccagaaagcaacagtgttaccagaagacataatcccctcagagagtagctctttgtctgacaccaccacctatgatgatcccagtgatgccttcacttttcctgggcagcgatcaagttcagtacctcattctccaagaattcttccccccaagtctcttggtattgagcgaatccatttcagaaagtcgtccatcaatgaacagtttgtggataccaggcagtccagagaaatgctgtccacacacagcagcccttacaaaactctggagaggcggccccagggaggacgaagcatgcccaccacgccagttcttacccgaaacgcctacagcagcagccacttggaacccgaatcttcatctcagcactgccgccagcggagtggaagcctggagtcccagtcccatctgctctccgagatggacagcgataagccatttttctccctctccaaatcccaaagaagcagcagcacagaaatcctcgatgacgggtcttcttatacaagccaatcaagcacagagtattactgtgtgacaccagttaccggcccctattacaccacccagaccctggacactcgcaccaggggtcggaggaggtcaaagaaacagaatgtttctacttcaaattcaggaagcatgcccaacctagcacaaaaggatagtttgaggaatggtgtttactcaaagagtcaggagccaccgtcttccagttactacattgccgggtacacaccctatgcagagtgtgacttttattacagtggtggttatgtctatgagaatgacaccgagggacagtatagtgtcaacccttcctaccggtcctcagcccactatggatatgagcgccagagggactacagcagatcctttcacgaagatgaggtcgaccgggtaccccataacccatatgcaactctccggctgccaaggaaggctgctgcaaaatcggagcacatcaccaaaaacatccacaaggccttagttgccgagcacttgcgtggctggtaccagcgggcctctgggcagaaggatcagggacacagcccgcagaccagctttgactcagacaggggatcacagagatgcctggggtttgcggggctgcaagtaccttgttctccaagcagtcgtgcatccttgtactcttcagtgtcttctacaaatgcttctgggaactggaggacccagttaaccatagggctgtcggattacgagactccagcacattcttcttacaccagctgctatggcaatgtctataatcctttaccctctccaagcagacaatacacagaaatcagtcaactggatggtacagatggaaaccagctggaagacaacctggagagtagtgagcagagactcttttggcatgaagattcaaagcctggaacattagtctgaactgcagttggacctcctgaccaagcactgcgttctcacactagtgtgccttgcaaattgtatttgtcttccgagaggatgttcgttttagaaacctaaagacatcaaaggttgaagagaagacttagttgccctggaagtgaatcagtgaatcacacaccaagccccacaaagcccctaaaggaggatttggcctttcaaactctaggcactaacgtaactgtagggtctgcccacatgttgaagtattgccaagagaggactcagtgtgaagccttcatcaatagcaagcactttttaagggagtaaaagttgttaaaggcaaacgtcaaaaacatgaaagggcattcaggatgtcccatggcaataagaacaggggaaatctcagagcacaattcagcaggatgagagaaggggaaccagaagctccggagtcattgctcacttcagagtttgaattcgtgagctgacaaagagtaacatgctctttctacacagacatggacaatttagacagtattggaaaattacttgaagctggattttcatgaagttctgaatgagtgtaaatgttttttaggatactataaagagtgatgtttttcataagcaccataaaatgggttctggaaaaactgattaccttagcatcctgtaatataacttatggtagcagattggggaaaatgaagcagcccactgaataattgacaaagtctgcttggagaacattctaaggtacaatatcatggagctcctttttcctttctccactaattgcgtgatgagctattgttctggctggtaattctccaactcggctgtcatttgaagtggcagacttaatatggaaagtttttataattatgagtttgaaaaagcattttaagatgatacagaaagtatccaaaacaacagaaaaaaaaagccacgtcattttagatgaattgcgtgccttaaaatggtgaacgttagaaaattaaacaagtctggattccacaagtagttccaagtcaccaagtgacaaaaacaaggttaacattaaaaaagaaaaacaacaacaacgacaaaaagctccaagctgcagtggatttaattatgaggctaaaactacctcatactttccttggaagaactaattagctatggtttattgtagggttttgtttgtttgttttttaaagcaaatgatttccatattcctgattgatcttttttgtcatctttgcttcaaaattacataaaaggtgctcctttcccccttcttttatacaagtttcttgttcatattgtgaatagaaaagtttctgaacaacttttttggaacattttctatctatattccaaagcatgtaatatatacataaaaacgatttgttaaactggtccttagtcatttgtataattagaaatgaagtttgggaaaaaattttggaaaaaagacaagcaaaaaaaaaataacttattccttttttgcatatttgtatagccttctagaatcagaaataacctttttgcatattcttttattgttctgacttttcaagacctattatttttttacataggtcaataaacaaaaggtgtgctactg

SEQ ID NO: 28165 - DNA, 374 bp, Homo sapiens
gattttaggtatacatacacatacatccatcacataaatacgtgcggtgcatatttcttttaaaacggaaaagaaagcacaaccttcctcaggtttctcaaaattcttgccctgcttttggggaacactgaatgaggaatgctgagaggtgaaaataaatctgaaggaacaaactcctctgctgtttttcaggttttacattgagagcatatcgtttttaaaggataaaaccaccgtggagctgtttttcctgaatgcaaaggcctgtgtgcacaaggtaggtgccccgtttgtcatgttcactggatgcctccagagcgactgggatgacaggaagaaatggttttgcctctcttcttgcattcaaactaaga

SEQ ID NO: 28166 - DNA, 533 bp, Homo sapiens
agctaatcctgacatttcttagattccataatgttaggagcatttaatcctgtattttacaagttaggaagcagaggatcagagatgggaaaggactaaccccaaggcccaacattaacaagcccctctaacaaaaactttacaatacatttatgttgaatggaactccaagatctcacctctcccatcccaggaatggagtcccatgtaatcaaagtgaacttaaaaataggacagtttcaacaagtcaggagattcacagcaactgatcaaagggagtccagtcaacgtgagcaagcgtgattatgatgaggaagccccctctgctttaatccacacaaggaacgtaacctgaagtaacctgatgttaaccaatctgctgtgtctactatgctgtttccttgttcctgctagtgctgctttacaaatgcagaccattctatcatacctggcggggcttctgttttattttgtaggctggatgctacccagttcatgaatcgctaataaaagccaattagatctttaaataa

SEQ ID NO: 28167 - DNA, 436 bp, Homo sapiens
ctgccttgtccacagagaggtgcctgtccgctgcttcgagcgtgtgccgacgtctcccgaatgtgtcccctttctcttcttccttgggatttcctaacgtctgacgatcccagcttgcgttggccccctgtgctgtggccccacgacgttttgtccagcttgatcagagcagaaaggggacctggtgggcagcccaaggggcaggaaacttccgggtggattccagcacagccccagccctgccggggtcttcatgccaaacccctggtcggccaggcttgaagctgggctgtggagccacagtcctggcctacaggcaggtgcttaagtcactcaggccactatgacacagttccacagcctgggcagcctacataacagacatgtacctctcacagttccagaggctggacgtccacagtgagacactgtctct

SEQ ID NO: 28168 - DNA, 209 bp, Homo sapiens
ttctgtttctctacaaaatgccaagggattttgatagggatttcattgaatctgtagatcactttaaatagtacaaacattttaacaatatgaagtctttaactctattaacatcaaacgtctttccatttgtttatgtcgtgtttaatttcttttatcagtgttttttagttttcattatataagtcgttcccccccttagttaaatt

SEQ ID NO: 28169 - DNA, 337 bp, Homo sapiens
tcccctaaaacttttaagataaagtcttacgtggattagatctgatttaagtctttcacagaagaaagagcctaatctgtctgtggaagttggaaataagcatcttcaggcctggcgcgggcctcacacctgtaatcccagcgctttgggaggccaaggcggatggatcacttgaggtcaagagtttgaaaccaacctggccaacatggtgaaacccagtgtctacaaaaatacaaaaattagctgggcgtggtggcatgtgcctgtaatcccagctacttgggagactgaggcaggaggattgcttgaacccgggaggcggaggttgcagtgagcc

SEQ ID NO: 28170 - DNA, 564 bp, Homo sapiens
agaatggattatgtttattcataccctggaatattaggttgcaatgagaatgagtgatgtgaagttacatgcaacaacatggatgaatctcaggaacatgtggaatgacgtaaagctgactaagaacacacactctatagttctatttgtatacagctgggcaatgcactcctgcagagccagccacagggcagtggctacatgtggatgggcaggtagcatgggaagcaggctcgggtggtttgggtactggcagtattatgcttcttaatctgtgctgttggctatgcagatgtgttcagattgtgaaaattccttgagctgtacacttcacctctctatcgtaaaaagtttttaaaaattagcaaactgagaataaaagatttgcaattcatattacaggtttaaagcccattcccctaatatataaacagttccaataaacaataagaaaaagaccaactaccccaaaattggaaacaatttatagaaaaagaaataaaaacgatcgttaaatgtacaacaaaaaatgttcatttttaatcatggaaagaaatgcagtgt

SEQ ID NO: 28171 - DNA, 372 bp, Homo sapiens
gctccctgggcaactgggagcctgtggtagagaatgccagagagcgttctctctaacacgtcacacatggctctttagaggggcacaaaagccttttctacatctgcacacttgatccagaaacccaatctgggtatcccagagggatacctggacacatatgcaaatgtgagggtacaaaggtgttcacagtacttgtttagattgcaaggactcctgcgctgacagtggaggacccatcaaaccagtggccctgcagccacctgctgtgtcacctgctcgggaggatgctgccgtatattgttaggtggaaaaaatgcatttgaaaaccacatatggtcgcatcccgttgtcgttaaaaaccaatctcat

SEQ ID NO: 28172 - DNA, 507 bp, Homo sapiens
ctacatctttctcccgtgctggatgcttcctgccctcaaacattggactctaatttcttcagttttggaactcggactgcctctccttgctcctcagcctgcagtcagcctattgtgggaccttgtgatcgtgtgagttaattcttaataaactcccctttatatatatatacatattcaattagttctgtcgctctagagaacattgactaatacgttcatccagtgtaaaagggaaagtaaaataattactgtaacaaaggagaatatctccaagccaacctgcattatttcataaaatatttatctttatacatggtgttcaagttttcctttgaaagaatggatatattttatttaaaggtattagcaggtttccatgactacgacctctggaggaaggggataactttttttaaaccttcctgtgtactactcagttccaattatgtaccaaaccagctggttcaatgcattctcaagaactttaaacatagcaataaaggc

SEQ ID NO: 28173 - DNA, 463 bp, Homo sapiens
gggttttgtttataatcatgttttgagcttatatagacatgctctttcttaaaattcatttatttgcttttcatccatggaaaaccagttttttttcaatgagttataaagtatttaataagaagagattctgatttaattatatccagagatggctttggatcatgttatttaagatggagaatgactatttagaaatattaatgtttggccgggtgcagtggcacacacctgtaatcctagtactttgggaggctgaggcaggcaggtcacttgaggtcaggagttcaagaccagcttggccaaacatgttgaaaccctgtctctaataaaaatacaaaaaatagccaggcatggtggtacacacctgtaatcccagctacttgggaggctgagggaggaaaatcacttgaacctgggaggaggttgcagtgagccaagatcatgccactgtactccagcc

SEQ ID NO: 28174 - DNA, 455 bp, Homo sapiens
  misc_feature (9)..(9): n is a, c, g, or t
  misc_feature (29)..(29): n is a, c, g, or t
  misc_feature (78)..(78): n is a, c, g, or t
  misc_feature (104)..(104): n is a, c, g, or t
  misc_feature (123)..(123): n is a, c, g, or t
cccaaagcntcggaaatttaacccccctnaccctaaaggggaaacaaaaaagctggaaagcttccccaccccggtggngggcccggcctcctaagaacctaagngggatccccccggggctgnagggaaattcgggcaaccgaggaaaatgttgaagaaaatgaacacaaacaatacctcataaatttagatgaagttaaactactataaaagtgaaatatcatagaatattttaaaactaacaacattagcttttttttttgagatggactctcactctgtcaccaggctggagtgcagtgtgcagtggcgcgatcttggctcactgcaatctccgcctccagggttcaagcgattcccctgcctcagcctcccgagtagctgggactacaggcgcgccccatcacgcccggctaattttttgtattttagtagagacaggctttcaccatgtt

SEQ ID NO: 28175 - DNA, 474 bp, Homo sapiens
ggtccacccacctcggcctcccaaagtgctgggatttccacctcctgggttcaagcgattcacatgcctcagccttccaagtagctgggattacaggcacccgccaccattcctggctaatttttataattttagtagaagtgggttttcggcatgttggctaggctgatctcgaacgcctgacctcaggtgatcctgcctcagcctccccagttgctggggttacagatgtgagccactgcacctggcctggaaaggcttctctcactgtccctcacaacaatttgggtcagaagcttttcctgtatactcccgtttccctttatcattagcccttaatatggagtgtcctaacactgtatttacagagagtttacttaactcccctactagattgtctagattgttaggattgtttttttttttaatttttgtggttttttttgtaaatggagtctcgctctgtcacccagg

SEQ ID NO: 28176 - DNA, 301 bp, Homo sapiens
tacttttgtattttcagtagtgacagggtttccccatgttgctcaggctggtgtagaactcctgggctcaagcaatcctcccacctcagccttccaaagtgctgggattacaagtgggagccactgtacccagcaaaataattacaatggagagatctggaagttcaccttggtcaagtgatcaaacttagtattacaggccatctgcagttacgaggcaggaaggatacatcacctatgcagtatttttcccaaaaatgcttaacttgaatttcgtcatgaggaaacagacaaatccggg

SEQ ID NO: 28177 - DNA, 623 bp, Homo sapiens
acagaagtggtggcagtaggcaactttgtctcattcttagtaacattcagtaattcaccatcaactgtgtttgtggaaaatttttgtagatactcttcatgaaataaaagatactccctttcatttttagttgactaagaattgttattaggaatgggtattgaattttatcaaatgcttcgttctatcaggatggatcatacgatttttcttcttttgttcctttgttcttttgttcctctgataaattttacacatttcttttcatctttattttgaatgttcagaattcttgaatatgatccttatgacttcaaaataatatttattgctcagaacatgtagcttttaaaatctattcttcattaaacactgattatctcatttgaagtatttcacataagtgagtatgcgtaagagtttttgaacacaggccaggtgcagttgttcaagcttctaatcccagcactttgggaggctgaggtgggtgggtcacttgaggccaggagtttaagaccagcctggccaacatggtgaaaccccatctttactaaaaatagaaaaattagctgggtgtgttggcacaagcctgtagtcccagctactagggaggctgagatgga

SEQ ID NO: 28178 - DNA, 1030 bp, Homo sapiens
gccattttttcagtgactatccaattactggaagtaagttattctattcagaggtgaacaccagtcacgcttaagtgttcccaccaaccggtgtgcagcgccccacacttggagccaccgcacaggacaaatactgcttttcctgagctcccctggagcttcattcattgaggcaacccaagatcccttgctaaaagcaaaactaaagcattccacgccgttttcattcaggtggcctccatttgactcccgacagcctgaactcgtcacgtaggtaagaaaactttttaaagaccatttggactttgctttgtttcagtgaaatgggtcgtgagaaaaagtgccttccaacgaccaactccctaaatcccaacaccccttctcttaacagcgtttttacatccaacctttacaaccaagactctatacctcaaactacagtgccttggaaaattactgccacatcggcagaaaaccgagttacctttcgagtcaggtttgattctgatgcaggcagccatgtgcggcagggctttcgcacggttgcaagcgcacacctggccggatgctggctgcaccacacactgccaagtacaaactccccgaaaaacaggtggattcggaaaccaacagcgcccgggtcagaactctgggccagtccaaaacctgacaacatctgcgttccttgcagctgttttcgaacgtaagcccgacgctaggcagtgctgttagaaagtgatttggaagagcgcttccgagccacggcgcgccctccgggggagcgcaccggagcaggtgcgggcgagccccgcgcccggggaggtcaggaattccccagccacaccagatccaaccggacgccccagaacggggacggtccccggagtccgcctcccaacctgggtgagaaaacacctccgtccctccgctgcctgagcgctcgaatttacaactcagggcgctttgtgccgcggaggcccggcggacgcgaggtcgggacaatgcacggggccggggtcccggcggccgc

SEQ ID NO: 28179 - DNA, 651 bp, Homo sapiens
gccattttttcagtgactatccaattactggaagtaagttattctattcagaggtgaacaccagtcacgcttaagtgttcccaccaaccggtgtgcagcgccccacacttggagccaccgcacaggacaaatactgcttttcctgagctcccctggagcttcattcattgaggcaacccaagatcccttgctaaaagcaaaactaaagcattccacgccgttttcattcaggtggcctccatttgactcccgacagcctgaactcgtcacgtaggtaagaaaactttttaaagaccatttggactttgctttgtttcagtgaaatgggtcgtgagaaaaagtgccttccaacgaccaactccctaaatcccaacaccccttctcttaacagcgtttttacatccaacctttacaaccaagactctatacctcaaactacagtgccttggaaaattactgccacatcggcagaaaaccgagttacctttcgagtcaggtttgattctgatgcaggcagccatgtgcggcagggctttcgcacggttgcaagcgcacacctgtaatcccagcactttgggaggctgaggcgggcggatcatgaggtcaggagttcgagactagcatgaccaacatggtgaaaccacgtctcta

SEQ ID NO: 28180 - DNA, 1511 bp, Homo sapiens
gccattttttcagtgactatccaattactggaagtaagttattctattcagaggtgaacaccagtcacgcttaagtgttcccaccaaccggtgtgcagcgccccacacttggagccaccgcacaggacaaatactgcttttcctgagctcccctggagcttcattcattgaggcaacccaagatcccttgctaaaagcaaaactaaagcattccacgccgttttcattcaggtggcctccatttgactcccgacagcctgaactcgtcacgtaggtaagaaaactttttaaagaccatttggactttgctttgtttcagtgaaatgggtcgtgagaaaaagtgccttccaacgaccaactccctaaatcccaacaccccttctcttaacagcgtttttacatccaacctttacaaccaagactctatacctcaaactacagtgccttggaaaattactgccacatcggcagaaaaccgagttacctttcgagtcaggtttgattctgatgcaggcagccatgtgcggcagggctttcgcacggttgcaagcgcacacctggccggatgctggctgcaccacacactgccaagtacaaactccccgaaaaacaggtggattcggaaaccaacagcgcccgggtcagaactctgggccagtccaaaacctgacaacatctgcgttccttgcagctgttttcgaacgtaagcccgacgctaggcagtgctgttagaaagtgatttggaagagcgcttccgagccacggcgcgccctccgggggagcgcaccggagcaggtgcgggcgagccccgcgcccggggaggtcaggaattccccagccacaccagatccaaccggacgccccagaacggggacggtccccggagtccgcctcccaacctggaagcaccttgaggaagaaattgtcttgtctacagctctatcctcagtacagcaccaagcttacagtggatgctcagtgaagatttgccgatttgccgaatgaatgctttcacccctgcaactgtttactgcctgctaggagctcagagcctctgggatacaggctgggaatgacagtgcctgctcgcttggaaggcctctcttctggagtcaataaaacagcacttctttgcttcttcctggctggtccacatctttcactgaggagtggatagtggagggagagttcatttctagggcaccacagctatgagaaaagcaagaccagtgcccttggaggcccactaaaaaggcccccactggattattccagcaggctcggctggcctgttttcttcctcccctggtagaattgtgcctgcattggctataaagtccatttgcacacagaaggggtgtgtgtggaaggactctgcagaagtgaatccgctgagtaatgcctgcttcctcagagggtgaatgccaagatgcctccaaaggacatgaagggctctgaaggggaagatgactgagggcaccatttttgatcactgccaattaaaaaaaaaa

SEQ ID NO: 28181 - DNA, 5019 bp, Homo sapiens
gaggaaaaacagtacagatgggccaagagcttcaaggagaagtagttataataattacagatcagtacggaaatcagattcaagcattttcaccaagttctttatcttctttgtcaattgctggggttggacttgatagctcaaatttgaaaacaacctttcaggaaaacacacagagtataagtgtaagaggcatcaaatttattccaggtcctcctggaaataaggatctttgttttacttggcgtgagttttctgactttattcgagtgcaactaatttctggacctcctgctaaacttctccttatagactggccagaactaaaggagtccattccagtgattaatggaagagatttacagaaccctattattgttcaactttgtgatcagtgggataatccagcaccggtacaacatgttaaaataagtcttacaaaagctagcaatttaaagctcatgccttcaaaccaacagcataaaacagatgagaaaggcagggctaatttgggagtattcagtgtttttgcccctaggggagagcatactcttcaggttaaagccatctataacaaaagtatcatagaaggacctataattaagttaatgattcttccagacccagaaaaacccgttcgtctcaatgttaaatatgacaaagatgcatccttcttagcagggggtcttttcactgattttatgattagtgttatttctgaagatgacagtatcattaaaaacattaatccagcacgtatttccatgaaaatgtggaagctgtctaccagtgggaaccgacccccagcaaatgcagaaacatttagttgtaataaaataaaagataatgacaaagaagatggctgcttctatttcagggataaagtaattcctaataaagtggggacatattgtatccagtttggttttatgatggataaaacaaatattctcaacagtgaacaggttatagttgaagtcctgcctaatcaacctgtgaagttagtacctaaaattaaaccacctacaccagctgtttcaaatgttcgctcagttgccagtaggaccttggtcagagatctacatcttagtatcacggatgactacgacaaccatactggaattgatttggttggcactataatagccaccattaaaggctctaatgaggaagatactgataccccactttttattgggaaagttagaacacttgaattccccttcgtgaatggttcggctgaaatcatgagtctggtgctggcagaaagtagtcctggaagggatagtactgaatattttattgtatttgagccccggctaccacttttatcaagaaccttagaaccatatatcctaccgttcatgttttacaatgatgttaagaagcagcaacaaatggcagcacttacaaaagaaaaggaccaattatctcagtctattgttatgtataaaagtttatttgaagccagccaacagcttcttaatgaaatgaaatgtcaagttgaagaagcaagattaaaagaggcccaattgcgaaatgaactaaaaatacataatattgacattcctacaacacaacaggtgccacacattgaagcacttctgaaaagaaagctatcagaacaagaagaactgaagaaaaaacctagaagatcgtgtactcttccaaactatactaaaggcagtggagatgttttgggaaagattgcacatctagcacaaattgaagatgatagagctgcgatggttatttcttggcatctggcaagtgacatggactgtgtagtcaccctaaccactgacgctgcacgtcgtatctatgatgaaacccaaggtcgtcagcaggtgttgccccttgattctatttacaagaagactcttccagattggaaaagatctctacctcatttccgaaatggaaaattgtattttaaacccattggagatccagtctttgctcgagacttgttaacatttccagataatgtagaacattgtgaaacagtatttggtatgctgttaggagacaccattattttggataatctggatgcggccaatcattatagaaaagaggttgttaaaattacacactgtcctacactgctgaccagagatggagatcgaattcgaagtaatggaaagtttgggggccttcagaataaagctcctccaatggataaacttcggggaatggtatttggagctccagttccaaaacagtgtctgatcttaggggaacaaatagatcttcttcagcagtatcgttctgctgtgtgcaaactagacagtgtgaataaggatcttaacagtcaattagagtaccttcgcactccggatatgaggaagaaaaagcaagaacttgatgaacatgagaaaaatctcaaactaatagaggaaaaactaggtatgactcccatacgtaagtgtaatgactcattgcgtcattcaccaaaggttgagacgacagattgtccagttcctcctaaaagaatgagacgagaagctacaagacaaaataggattataaccaaaacagatgtatgagaggtgacagagagaagaggccattggtctcagtaagaatgccctgctttctgcatctctgtttcagaagaccaagagggtgacttaccagactgagtatttctggggacaatacaagtacctgggcatgaatttccatttcgattcagatgggactggaaacaaccattcaattttatgaatcttactggacattatggatttactggaattattccagacattatgccctttggttgtcactaccttgcaaatgtgtaagaggaaaatgtgctaatgtggcagtgactgtaaaactggcacatggcatttattaatcctgaagaaaagtacatgtactatttttcagtataaatataatgaacatgtcagaactatttcttgaaaacctttttattacttttgcgtgaatttatttaacaaagatgttttgtcttttgtgtaagggaggttctagaggctagatgtttaattgtaaatatgtgaggaaactcaatgcagaattcaggataaaaattttaaaagcacaggtatttgggaattgaaatgttaagatacccagaacaacattaaatcaatgagtgaacttgtgacagtggtagcatttcaaatttcaaaagacttatcctgtgtgtgtgtgtgtgtgtatatatatatatatatataaatatatatatataaaatattcagcagcaccaagttttataactattgtttgtttgactttattaatactagaatatgtagtctcagccttaattttacatttacattattttgtaattttttattactatttttaaggggttaaagagaacatacattctcacattagtgtactttctggtagaaagttgctgcaaaaacatttgaaatgtatattaacctaatgtatgtcatatatatgtctttgtgtaagttcaagactattgatctgtgaagttattttgtaaggacatacatttggtaagtaagtttgtgtcccaggaaatgtatgtgtttttaaaccctttctaaatatgcaggccattaataaataagattgtttcttccctactgaatagataagtgtttttcttttttaaaattggaagcttcataaaagttatcttgttaaaaaacgatgatgatgttaacctatctttataattggaaattatttaaactgtttgttgttacagaagaaacaaaatggtaattacagaattagctgtggggaagattggctcccatggtactacaggttgagtatcccttattcaaaatggttgggacctgaagtgttttggattttggttttttgtggggtttttaaattattattttggaatatttgcattatatttaccaatttagcatccctaatccaaaaatctttcattagaaattggaaatgcttcaatgagcatttcccttatgtgtcatatctgcgctcaaatgttttgaattttggaacatttcttgtttctgacttttagattagggatactcaccccgtaccaatatttggagtccttagacattagattatatgaaaatgattgattgataggtaagaaaggttaaagagaaatgactttttaggaactagacttgaacgtataattaatatgtggaactagtttgcttttataattcattgtatcaagaaggagtcatgttttaaatccaaggcattgagactatctagaagcaaaaaagttggttttaaaaattctttttattagaagtgtgtttaaaaacatgtctttttttcccttgagcgacagtggcctcactacattgcccaggctagtcttgaactcctgggttcaagcagtcttcctgccttggcctcctaagtagcagggattacaggcatgcacccacatgccaatttttattgcttaaaatggcgagttctatggatattatctagccccaagcccatatctgtacacttttgttcattttataataccagaaagaatgttctatcagtaaaagaaggttttaagtatgaatctccatttttgtggagtttttctaccctgtaaaaattaactttgtggttcccagtaattacagtaaggagtttttctatattttcacagttggatttatctaaggatatttctcagcatattaaggaatccttttctacatttgagcaaatactgaggttcatgttgtaccaaataataataaattgcttttgtgtttaatatgtaacacgtaagaacaattgaaattttcttctaagatttaatactagtcttttagtataaaggaatgtaactggagaaaaaaattaatgctacagccatttatcctgtgttatgtgttatataatctgaaatttgtcacaatgttacaatcaggaagttttttttctggtttcttcttccaaaggaaaataatagcctacttgtattttgaagtaactgaaataaaactctctccaagcctttttgcacattaaaaaaaaaag

SEQ ID NO: 28182 - DNA, 740 bp, Homo sapiens
gatgttctataattttgaaatacaaaactgtcgcttagaaattcataaagtagaaatgaagcaaaatttacttgacatgtaattcagcattttttacgtatttactgctttctcaacttcatattcctgttctttcaatttttaccatatccagcacgtttattctggatgttttgtaaaagaatgtacaggtaagaggaacctgggagtaagcaagaaatatttgttgaacgaatgaaggtcaatatactattagtagttctattcttcctactcatttatttttgtggaaagaacagaaatgttgactctttgaattccttccccctttatacaaacattgtcagtaatcttaactttcttttaaatttagggataaagtaattcctaataaagtggggacatattgtatccagtttggttttatgatggataaaacaaatattctcaacagtgaacaggtttgcttactttttttatataccacagttagctttacattttctttttttttccctcttggttctgcattacatgaaatagcttcacattttctcatttagtttatgaatgaaatattttgtttaaaagtgaagtaattattggatgtgaaatataaataattcaattttcaggaaaattagtatataatatgtttaaatttgttcaataatttgacctgttacaggagtcacatttccatttctctttatatcaaagactcagcattttagtgtgta

SEQ ID NO: 28183 - DNA, 141 bp, Homo sapiens
atatattttgttgctgaagtaacaactaacagttgttaacagtaaaaataacaaaaaagcaaggtaatgtgagtcttaatactttgttatttgattcatcattgtgtcctcatttgttaaaaataatgagtgtaataattc

SEQ ID NO: 28184 - DNA, 3605 bp, Homo sapiens
gaggaaaaacagtacagatgggccaagagcttcaaggagaagtagttataataattacagatcagtacggaaatcagattcaagcattttcaccaagttctttatcttctttgtcaattgctggggttggacttgatagctcaaatttgaaaacaacctttcaggaaaacacacagagtataagtgtaagaggcatcaaatttattccaggtcctcctggaaataaggatctttgttttacttggcgtgagttttctgactttattcgagtgcaactaatttctggacctcctgctaaacttctccttatagactggccagaactaaaggagtccattccagtgattaatggaagagatttacagaaccctattattgttcaactttgtgatcagtgggataatccagcaccggtacaacatgttaaaataagtcttacaaaagctagcaatttaaagctcatgccttcaaaccaacagcataaaacagatgagaaaggcagggctaatttgggagtattcagtgtttttgcccctaggggagagcatactcttcaggttaaagccatctataacaaaagtatcatagaaggacctataattaagttaatgattcttccagacccagaaaaacccgttcgtctcaatgttaaatatgacaaagatgcatccttcttagcagggggtcttttcactgattttatgattagtgttatttctgaagatgacagtatcattaaaaacattaatccagcacgtatttccatgaaaatgtggaagctgtctaccagtgggaaccgacccccagcaaatgcagaaacatttagttgtaataaaataaaagataatgacaaagaagatggctgcttctatttcagggataaagtaattcctaataaagtggggacatattgtatccagtttggttttatgatggataaaacaaatattctcaacagtgaacaggttatagttgaagtcctgcctaatcaacctgtgaagttagtacctaaaattaaaccacctacaccagctgtttcaaatgttcgctcagttgccagtaggaccttggtcagagatctacatcttagtatcacggatgactacgacaaccatactggaattgatttggttggcactataatagccaccattaaaggctctaatgaggaagatactgataccccactttttattgggaaagttagaacacttgaattccccttcgtgaatggttcggctgaaatcatgagtctggtgctggcagaaagtagtcctggaagggatagtactgaatattttattgtatttgagccccggctaccacttttatcaagaaccttagaaccatatatcctaccgttcatgttttacaatgatgttaagaagcagcaacaaatggcagcacttacaaaagaaaaggaccaattatctcagtctattgttatgtataaaagtttatttgaagccagccaacagcttcttaatgaaatgaaatgtcaagttgaagaagcaagattaaaagaggcccaattgcgaaatgaactaaaaatacataatattgacattcctacaacacaacaggtgccacacattgaagcacttctgaaaagaaagctatcagaacaagaagaactgaagaaaaaacctagaagatcgtgtactcttccaaactatactaaaggcagtggagatgttttgggaaagattgcacatctagcacaaattgaagatgatagagctgcgatggttatttcttggcatctggcaagtgacatggactgtgtagtcaccctaaccactgacgctgcacgtcgtatctatgatgaaacccaaggtcgtcagcaggtgttgccccttgattctatttacaagaagactcttccagattggaaaagatctctacctcatttccgaaatggaaaattgtattttaaacccattggagatccagtctttgctcgagacttgttaacatttccagataatgtagaacattgtgaaacagtatttggtatgctgttaggagacaccattattttggataatctggatgcggccaatcattatagaaaagaggttgttaaaattacacactgtcctacactgctgaccagagatggagatcgaattcgaagtaatggaaagtttgggggccttcagaataaagctcctccaatggataaacttcggggaatggtatttggagctccagttccaaaacagtgtctgatcttaggggaacaaatagatcttcttcagcagtatcgttctgctgtgtgcaaactagacagtgtgaataaggatcttaacagtcaattagagtaccttcgcactccggatatgaggaagaaaaagcaagaacttgatgaacatgagaaaaatctcaaactaatagaggaaaaactaggtatgactcccatacgtaagtgtaatgactcattgcgtcattcaccaaaggttgagacgacagattgtccagttcctcctaaaagaatgagacgagaagctacaagacaaaataggattataaccaaaacagatgtatgagaggtgacagagagaagaggccattggtctcagtaagaatgccctgctttctgcatctctgtttcagaagaccaagagggtgacttaccagactgagtatttctggggacaatacaagtacctgggcatgaatttccatttcgattcagatgggactggaaacaaccattcaattttatgaatcttactggacattatggatttactggaattattccagacattatgccctttggttgtcactaccttgcaaatgtgtaagaggaaaatgtgctaatgtggcagtgactgtaaaactggcacatggcatttattaatcctgaagaaaagtacatgtactatttttcagtataaatataatgaacatgtcagaactatttcttgaaaacctttttattacttttgcgtgaatttatttaacaaagatgttttgtcttttgtgtaagggaggttctagaggctagatgtttaattgtaaatatgtgaggaaactcaatgcagaattcaggataaaaattttaaaagcacaggtatttgggaattgaaatgttaagatacccagaacaacattaaatcaatgagtgaacttgtgacagtggtagcatttcaaatttcaaaagacttatcctgtgtgtgtgtgtgtgtgtatatatatatatatatataaatatatatatataaaatattcagcagcaccaagttttataactattgtttgtttgactttattaatactagaatatgtagtctcagccttaattttacatttacattattttgtaattttttattactatttttaaggggttaaagagaacatacattctcacattagtgtactttctggtagaaagttgctgcaaaaacatttgaaatgtatattaacctaatgtatgtcatatatatgtctttgtgtaagttcaagactattgatctgtgaagttattttgtaaggacatacatttggtaagtaagtttgtgtcccaggaaatgtatgtgtttttaaaccctttctaaatatgcaggccattaataaataagattgtttcttcccta

SEQ ID NO: 28185 - DNA, 3033 bp, Homo sapiens
ttcatttattgacttttttagtatttggtatgctgttaggagacaccattattttggataatctggatgcggccaatcattatagaaaagaggttgttaaaattacacactgtcctacactgctgaccagagatggagatcgaattcgaagtaatggaaagtttgggggccttcagaataaagctcctccaatggataaacttcggggaatggtatttggagctccagttccaaaacagtgtctgatcttaggggaacaaatagatcttcttcagcagtatcgttctgctgtgtgcaaactagacagtgtgaataaggatcttaacagtcaattagagtaccttcgcactccggatatgaggaagaaaaagcaagaacttgatgaacatgagaaaaatctcaaactaatagaggaaaaactaggtatgactcccatacgtaagtgtaatgactcattgcgtcattcaccaaaggttgagacgacagattgtccagttcctcctaaaagaatgagacgagaagctacaagacaaaataggattataaccaaaacagatgtatgagaggtgacagagagaagaggccattggtctcagtaagaatgccctgctttctgcatctctgtttcagaagaccaagagggtgacttaccagactgagtatttctggggacaatacaagtacctgggcatgaatttccatttcgattcagatgggactggaaacaaccattcaattttatgaatcttactggacattatggatttactggaattattccagacattatgccctttggttgtcactaccttgcaaatgtgtaagaggaaaatgtgctaatgtggcagtgactgtaaaactggcacatggcatttattaatcctgaagaaaagtacatgtactatttttcagtataaatataatgaacatgtcagaactatttcttgaaaacctttttattacttttgcgtgaatttatttaacaaagatgttttgtcttttgtgtaagggaggttctagaggctagatgtttaattgtaaatatgtgaggaaactcaatgcagaattcaggataaaaattttaaaagcacaggtatttgggaattgaaatgttaagatacccagaacaacattaaatcaatgagtgaacttgtgacagtggtagcatttcaaatttcaaaagacttatcctgtgtgtgtgtgtgtgtgtatatatatatatatatataaatatatatatataaaatattcagcagcaccaagttttataactattgtttgtttgactttattaatactagaatatgtagtctcagccttaattttacatttacattattttgtaattttttattactatttttaaggggttaaagagaacatacattctcacattagtgtactttctggtagaaagttgctgcaaaaacatttgaaatgtatattaacctaatgtatgtcatatatatgtctttgtgtaagttcaagactattgatctgtgaagttattttgtaaggacatacatttggtaagtaagtttgtgtcccaggaaatgtatgtgtttttaaaccctttctaaatatgcaggccattaataaataagattgtttcttccctactgaatagataagtgtttttcttttttaaaattggaagcttcataaaagttatcttgttaaaaaacgatgatgatgttaacctatctttataattggaaattatttaaactgtttgttgttacagaagaaacaaaatggtaattacagaattagctgtggggaagattggctcccatggtactacaggttgagtatcccttattcaaaatggttgggacctgaagtgttttggattttggttttttgtggggtttttaaattattattttggaatatttgcattatatttaccaatttagcatccctaatccaaaaatctttcattagaaattggaaatgcttcaatgagcatttcccttatgtgtcatatctgcgctcaaatgttttgaattttggaacatttcttgtttctgacttttagattagggatactcaccccgtaccaatatttggagtccttagacattagattatatgaaaatgattgattgataggtaagaaaggttaaagagaaatgactttttaggaactagacttgaacgtataattaatatgtggaactagtttgcttttataattcattgtatcaagaaggagtcatgttttaaatccaaggcattgagactatctagaagcaaaaaagttggttttaaaaattctttttattagaagtgtgtttaaaaacatgtctttttttcccttgagcgacagtggcctcactacattgcccaggctagtcttgaactcctgggttcaagcagtcttcctgccttggcctcctaagtagcagggattacaggcatgcacccacatgccaatttttattgcttaaaatggcgagttctatggatattatctagccccaagcccatatctgtacacttttgttcattttataataccagaaagaatgttctatcagtaaaagaaggttttaagtatgaatctccatttttgtggagtttttctaccctgtaaaaattaactttgtggttcccagtaattacagtaaggagtttttctatattttcacagttggatttatctaaggatatttctcagcatattaaggaatccttttctacatttgagcaaatactgaggttcatgttgtaccaaataataataaattgcttttgtgtttaatatgtaacacgtaagaacaattgaaattttcttctaagatttaatactagtcttttagtataaaggaatgtaactggagaaaaaaattaatgctacagccatttatcctgtgttatgtgttatataatctgaaatttgtcacaatgttacaatcaggaagttttttttctggtttcttcttccaaaggaaaataatagcctacttgtattttgaagtaactgaaataaaactctctccaagcctttttgcacattaaaaaaaaaag

SEQ ID NO: 28186 - DNA, 2954 bp, Homo sapiens
gaggaaaaacagtacagatgggccaagagcttcaaggagaagtagttataataattacagatcagtacggaaatcagattcaagcattttcaccaagttctttatcttctttgtcaattgctggggttggacttgatagctcaaatttgaaaacaacctttcaggaaaacacacagagtataagtgtaagaggcatcaaatttattccaggtcctcctggaaataaggatctttgttttacttggcgtgagttttctgactttattcgagtgcaactaatttctggacctcctgctaaacttctccttatagactggccagaactaaaggagtccattccagtgattaatggaagagatttacagaaccctattattgttcaactttgtgatcagtgggataatccagcaccggtacaacatgttaaaataagtcttacaaaagctagcaatttaaagctcatgccttcaaaccaacagcataaaacagatgagaaaggcagggctaatttgggagtattcagtgtttttgcccctaggggagagcatactcttcaggttaaagccatctataacaaaagtatcatagaaggacctataattaagttaatgattcttccagacccagaaaaacccgttcgtctcaatgttaaatatgacaaagatgcatccttcttagcagggggtcttttcactgattttatgattagtgttatttctgaagatgacagtatcattaaaaacattaatccagcacgtatttccatgaaaatgtggaagctgtctaccagtgggaaccgacccccagcaaatgcagaaacatttagttgtaataaaataaaagataatgacaaagaagatggctgcttctatttcagggataaagtaattcctaataaagtggggacatattgtatccagtttggttttatgatggataaaacaaatattctcaacagtgaacaggttatagttgaagtcctgcctaatcaacctgtgaagttagtacctaaaattaaaccacctacaccagctgtttcaaatgttcgctcagttgccagtaggaccttggtcagagatctacatcttagtatcacggatgactacgacaaccatactggaattgatttggttggcactataatagccaccattaaaggctctaatgaggaagatactgataccccactttttattgggaaagttagaacacttgaattccccttcgtgaatggttcggctgaaatcatgagtctggtgctggcagaaagtagtcctggaagggatagtactgaatattttattgtatttgagccccggctaccacttttatcaagaaccttagaaccatatatcctaccgttcatgttttacaatgatgttaagaagcagcaacaaatggcagcacttacaaaagaaaaggaccaattatctcagtctattgttatgtataaaagtttatttgaagccagccaacagcttcttaatgaaatgaaatgtcaagttgaagaagcaagattaaaagaggcccaattgcgaaatgaactaaaaatacataatattgacattcctacaacacaacaggtgccacacattgaagcacttctgaaaagaaagctatcagaacaagaagaactgaagaaaaaacctagaagatcgtgtactcttccaaactatactaaaggcagtggagatgttttgggaaagattgcacatctagcacaaattgaagatgatagagctgcgatggttatttcttggcatctggcaagtgacatggactgtgtagtcaccctaaccactgacgctgcacgtcgtatctatgatgaaacccaaggtcgtcagcaggtgttgccccttgattctatttacaagaagactcttccagattggaaaagatctctacctcatttccgaaatggaaaattgtattttaaacccattggagatccagtctttgctcgagacttgttaacatttccagataatgtagaacattgtgaaacagtatttggtatgctgttaggagacaccattattttggataatctggatgcggccaatcattatagaaaagaggttgttaaaattacacactgtcctacactgctgaccagagatggagatcgaattcgaagtaatggaaagtttgggggccttcagaataaagctcctccaatggataaacttcggggaatggtatttggagctccagttccaaaacagtgtctgatcttaggggaacaaatagatcttcttcagcagtatcgttctgctgtgtgcaaactagacagtgtgaataaggatcttaacagtcaattagagtaccttcgcactccggatatgaggaagaaaaagcaagaacttgatgaacatgagaaaaatctcaaactaatagaggaaaaactaggtatgactcccatacgtaagtgtaatgactcattgcgtcattcaccaaaggttgagacgacagattgtccagttcctcctaaaagaatgagacgagaagctacaagacaaaataggattataaccaaaacagatgtatgagaggtgacagagagaagaggccattggtctcagtaagaatgccctgctttctgcatctctgtttcagaagaccaagagggtgacttaccagactgagtatttctggggacaatacaagtacctgggcatgaatttccatttcgattcagatgggactggaaacaaccattcaattttatgaatcttactggacattatggatttactggaattattccagacattatgccctttggttgtcactaccttgcaaatgtgtaagaggaaaatgtgctaatgtggcagtgactgtaaaactggcacatggcatttattaatcctgaagaaaagtacatgtactatttttcagtataaatataatgaacatgtcagaactatttcttggtgtaggggggttctagagct

SEQ ID NO: 28187 - DNA, 722 bp, Homo sapiens
cttgtccacattagatgctgcagtggtgttttgtcagcagcagctggtggtgtatctactgatataagcagtcttcctgccttggcctcctaagtagcagggattacaggcatgcacccacatgccaatttttattgcttaaaatggcgagttctatggatattatctagccccaagcccatatctgtacacttttgttcattttataataccagaaagaatgttctatcagtaaaagaaggttttaagtatgaatctccatttttgtggagtttttctaccctgtaaaaattaactttgtggttcccagtaattacagtaaggagtttttctatattttcacagttggatttatctaaggatatttctcagcatattaaggaatccttttctacatttgagcaaatactgaggttcatgttgtaccaaataataataaattgcttttgtgtttaatatgtaacacgtaagaacaattgaaattttcttctaagatttaatactagtcttttagtataaaggaatgtaactggagaaaaaaattaatgctacagccatttatcctgtgttatgtgttatataatctgaaatttgtcacaatgttacaatcaggaagttttttttctggtttcttcttccaaaggaaaataatagcctacttgtattttgaagtaactgaaataaaactctctccaagcctttttgcacattaaaaaaaaaag

SEQ ID NO: 28188 - DNA, 501 bp, Homo sapiens
aaaacattttattttgtttttctgaacactaagtgataccccctgtctttctcaatgtacttttcctcactaggaaaacacacagagtataagtgtaagaggcatcaaatttattccaggtcctcctggaaataaggatctttgttttacttggcgtgagttttctgactttattcgagtgcaactaatttctggacctcctgctaaacttctccttatagactggccagaactaaaggaggtaagtcacttcatgtcttcactgaaagaatttaatatcatatggcttattactttcagattgtcagtgaatcagaatagatatattttgttgctgaagtaacaactaacagttgttaacagtaaaaataacaaaaaagcaaggtaatgtgagtcttaatactttgttatttgattcatcattgtgtcctcatttgttaaaaataatgagtgtaataattcagatcttaaaaactacattacagaggatttcaagcatgc

SEQ ID NO: 28189 - DNA, 4515 bp, Homo sapiens
gatgttctataattttgaaatacaaaactgtcgcttagaaattcataaagtagaaatgaagcaaaatttacttgacatgtaattcagcattttttacgtatttactgctttctcaacttcatattcctgttctttcaatttttaccatatccagcacgtttattctggatgttttgtaaaagaatgtacaggtaagaggaacctgggagtaagcaagaaatatttgttgaacgaatgaaggtcaatatactattagtagttctattcttcctactcatttatttttgtggaaagaacagaaatgttgactctttgaattccttccccctttatacaaacattgtcagtaatcttaactttcttttaaatttagggataaagtaattcctaataaagtggggacatattgtatccagtttggttttatgatggataaaacaaatattctcaacagtgaacaggttatagttgaagtcctgcctaatcaacctgtgaagttagtacctaaaattaaaccacctacaccagctgtttcaaatgttcgctcagttgccagtaggaccttggtcagagatctacatcttagtatcacggatgactacgacaaccatactggaattgatttggttggcactataatagccaccattaaaggctctaatgaggaagatactgataccccactttttattgggaaagttagaacacttgaattccccttcgtgaatggttcggctgaaatcatgagtctggtgctggcagaaagtagtcctggaagggatagtactgaatattttattgtatttgagccccggctaccacttttatcaagaaccttagaaccatatatcctaccgttcatgttttacaatgatgttaagaagcagcaacaaatggcagcacttacaaaagaaaaggaccaattatctcagtctattgttatgtataaaagtttatttgaagccagccaacagcttcttaatgaaatgaaatgtcaagttgaagaagcaagattaaaagaggcccaattgcgaaatgaactaaaaatacataatattgacattcctacaacacaacaggtgccacacattgaagcacttctgaaaagaaagctatcagaacaagaagaactgaagaaaaaacctagaagatcgtgtactcttccaaactatactaaaggcagtggagatgttttgggaaagattgcacatctagcacaaattgaagatgatagagctgcgatggttatttcttggcatctggcaagtgacatggactgtgtagtcaccctaaccactgacgctgcacgtcgtatctatgatgaaacccaaggtcgtcagcaggtgttgccccttgattctatttacaagaagactcttccagattggaaaagatctctacctcatttccgaaatggaaaattgtattttaaacccattggagatccagtctttgctcgagacttgttaacatttccagataatgtagaacattgtgaaacagtatttggtatgctgttaggagacaccattattttggataatctggatgcggccaatcattatagaaaagaggttgttaaaattacacactgtcctacactgctgaccagagatggagatcgaattcgaagtaatggaaagtttgggggccttcagaataaagctcctccaatggataaacttcggggaatggtatttggagctccagttccaaaacagtgtctgatcttaggggaacaaatagatcttcttcagcagtatcgttctgctgtgtgcaaactagacagtgtgaataaggatcttaacagtcaattagagtaccttcgcactccggatatgaggaagaaaaagcaagaacttgatgaacatgagaaaaatctcaaactaatagaggaaaaactaggtatgactcccatacgtaagtgtaatgactcattgcgtcattcaccaaaggttgagacgacagattgtccagttcctcctaaaagaatgagacgagaagctacaagacaaaataggattataaccaaaacagatgtatgagaggtgacagagagaagaggccattggtctcagtaagaatgccctgctttctgcatctctgtttcagaagaccaagagggtgacttaccagactgagtatttctggggacaatacaagtacctgggcatgaatttccatttcgattcagatgggactggaaacaaccattcaattttatgaatcttactggacattatggatttactggaattattccagacattatgccctttggttgtcactaccttgcaaatgtgtaagaggaaaatgtgctaatgtggcagtgactgtaaaactggcacatggcatttattaatcctgaagaaaagtacatgtactatttttcagtataaatataatgaacatgtcagaactatttcttgaaaacctttttattacttttgcgtgaatttatttaacaaagatgttttgtcttttgtgtaagggaggttctagaggctagatgtttaattgtaaatatgtgaggaaactcaatgcagaattcaggataaaaattttaaaagcacaggtatttgggaattgaaatgttaagatacccagaacaacattaaatcaatgagtgaacttgtgacagtggtagcatttcaaatttcaaaagacttatcctgtgtgtgtgtgtgtgtgtatatatatatatatatataaatatatatatataaaatattcagcagcaccaagttttataactattgtttgtttgactttattaatactagaatatgtagtctcagccttaattttacatttacattattttgtaattttttattactatttttaaggggttaaagagaacatacattctcacattagtgtactttctggtagaaagttgctgcaaaaacatttgaaatgtatattaacctaatgtatgtcatatatatgtctttgtgtaagttcaagactattgatctgtgaagttattttgtaaggacatacatttggtaagtaagtttgtgtcccaggaaatgtatgtgtttttaaaccctttctaaatatgcaggccattaataaataagattgtttcttccctactgaatagataagtgtttttcttttttaaaattggaagcttcataaaagttatcttgttaaaaaacgatgatgatgttaacctatctttataattggaaattatttaaactgtttgttgttacagaagaaacaaaatggtaattacagaattagctgtggggaagattggctcccatggtactacaggttgagtatcccttattcaaaatggttgggacctgaagtgttttggattttggttttttgtggggtttttaaattattattttggaatatttgcattatatttaccaatttagcatccctaatccaaaaatctttcattagaaattggaaatgcttcaatgagcatttcccttatgtgtcatatctgcgctcaaatgttttgaattttggaacatttcttgtttctgacttttagattagggatactcaccccgtaccaatatttggagtccttagacattagattatatgaaaatgattgattgataggtaagaaaggttaaagagaaatgactttttaggaactagacttgaacgtataattaatatgtggaactagtttgcttttataattcattgtatcaagaaggagtcatgttttaaatccaaggcattgagactatctagaagcaaaaaagttggttttaaaaattctttttattagaagtgtgtttaaaaacatgtctttttttcccttgagcgacagtggcctcactacattgcccaggctagtcttgaactcctgggttcaagcagtcttcctgccttggcctcctaagtagcagggattacaggcatgcacccacatgccaatttttattgcttaaaatggcgagttctatggatattatctagccccaagcccatatctgtacacttttgttcattttataataccagaaagaatgttctatcagtaaaagaaggttttaagtatgaatctccatttttgtggagtttttctaccctgtaaaaattaactttgtggttcccagtaattacagtaaggagtttttctatattttcacagttggatttatctaaggatatttctcagcatattaaggaatccttttctacatttgagcaaatactgaggttcatgttgtaccaaataataataaattgcttttgtgtttaatatgtaacacgtaagaacaattgaaattttcttctaagatttaatactagtcttttagtataaaggaatgtaactggagaaaaaaattaatgctacagccatttatcctgtgttatgtgttatataatctgaaatttgtcacaatgttacaatcaggaagttttttttctggtttcttcttccaaaggaaaataatagcctacttgtattttgaagtaactgaaataaaactctctccaagcctttttgcacattaaaaaaaaaag

SEQ ID NO: 28190 - DNA, 4782 bp, Homo sapiens
gaggaaaaacagtacagatgggccaagagcttcaaggagaagtagttataataattacagatcagtacggaaatcagattcaagcattttcaccaagttctttatcttctttgtcaattgctggggttggacttgatagctcaaatttgaaaacaacctttcaggaaaacacacagagtataagtgtaagaggcatcaaatttattccaggtcctcctggaaataaggatctttgttttacttggcgtgagttttctgactttattcgagtgcaactaatttctggacctcctgctaaacttctccttatagactggccagaactaaaggagtccattccagtgattaatggaagagatttacagaaccctattattgttcaactttgtgatcagtgggataatccagcaccggtacaacatgttaaaataagtcttacaaaagctagcaatttaaagctcatgccttcaaaccaacagcataaaacagatgagaaaggcagggctaatttgggagtattcagtgtttttgcccctaggggagagcatactcttcaggttaaagccatctataacaaaagtatcatagaaggacctataattaagttaatgattcttccagacccagaaaaacccgttcgtctcaatgttaaatatgacaaagatgcatccttcttagcagggggtcttttcactgattttatgattagtgttatttctgaagatgacagtatcattaaaaacattaatccagcacgtatttccatgaaaatgtggaagctgtctaccagtgggaaccgacccccagcaaatgcagaaacatttagttgtaataaaataaaagataatgacaaagaagatggctgcttctatttcagggataaagtaattcctaataaagtggggacatattgtatccagtttggttttatgatggataaaacaaatattctcaacagtgaacaggttatagttgaagtcctgcctaatcaacctgtgaagttagtacctaaaattaaaccacctacaccagctgtttcaaatgttcgctcagttgccagtaggaccttggtcagagatctacatcttagtatcacggatgactacgacaaccatactggaattgatttggttggcactataatagccaccattaaaggctctaatgaggaagatactgataccccactttttattgggaaagttagaacacttgaattccccttcgtgaatggttcggctgaaatcatgagtctggtgctggcagaaagtagtcctggaagggatagtactgaatattttattgtatttgagccccggctaccacttttatcaagaaccttagaaccatatatcctaccgttcatgttttacaatgatgttaagaagcagcaacaaatggcagcacttacaaaagaaaaggaccaattatctcagtctattgttatgtataaaagtttatttgaagccagccaacagcttcttaatgaaatgaaatgtcaagttgaagaagcaagattaaaagaggcccaattgcgaaatgaactaaaaatacataatattgacattcctacaacacaacaggtgccacacattgaagcacttctgaaaagaaagctatcagaacaagaagaactgaagaaaaaacctagaagatcgtgtactcttccaaactatactaaaggcagtggagatgttttgggaaagattgcacatctagcacaaattgaagatgatagagctgcgatggttatttcttggcatctggcaagtgacatggactgtgtagtcaccctaaccactgacgctgcacgtcgtatctatgatgaaacccaaggtcgtcagcaggtgttgccccttgattctatttacaagaagactcttccagattggaaaagatctctacctcatttccgaaatggaaaattgtattttaaacccattggagatccagtctttgctcgagacttgttaacatttccagataatgtagaacattgtgaaacagtatttggtatgctgttaggagacaccattattttggataatctggatgcggccaatcattatagaaaagaggttgttaaaattacacactgtcctacactgctgaccagagatggagatcgaattcgaagtaatggaaagtttgggggccttcagaataaagctcctccaatggataaacttcggggaatggtatttggagctccagttccaaaacagtgtctgatcttaggggaacaaatagatcttcttcagcagtatcgttctgctgtgtgcaaactagacagtgtgaataaggatcttaacagtcaattagagtaccttcgcactccggatatgaggaagaaaaagcaagaacttgatgaacatgagaaaaatctcaaactaatagaggaaaaactaggtatgactcccatacgtaagtgtaatgactcattgcgtcattcaccaaaggttgagacgacagattgtccagttcctcctaaaagaatgagacgagaagctacaagacaaaataggattataaccaaaacagatgtatgagaggtgacagagagaagaggccattggtctcagtaagaatgccctgctttctgcatctctgtttcagaagaccaagagggtgacttaccagactgagtatttctggggacaatacaagtacctgggcatgaatttccatttcgattcagatgggactggaaacaaccattcaattttatgaatcttactggacattatggatttactggaattattccagacattatgccctttggttgtcactaccttgcaaatgtgtaagaggaaaatgtgctaatgtggcagtgactgtaaaactggcacatggcatttattaatcctgaagaaaagtacatgtactatttttcagtataaatataatgaacatgtcagaactatttcttgaaaacctttttattacttttgcgtgaatttatttaacaaagatgttttgtcttttgtgtaagggaggttctagaggctagatgtttaattgtaaatatgtgaggaaactcaatgcagaattcaggataaaaattttaaaagcacaggtatttgggaattgaaatgttaagatacccagaacaacattaaatcaatgagtgaacttgtgacagtggtagcatttcaaatttcaaaagacttatcctgtgtgtgtgtgtgtgtgtatatatatatatatatataaatatatatatataaaatattcagcagcaccaagttttataactattgtttgtttgactttattaatactagaatatgtagtctcagccttaattttacatttacattattttgtaattttttattactatttttaaggggttaaagagaacatacattctcacattagtgtactttctggtagaaagttgctgcaaaaacatttgaaatgtatattaacctaatgtatgtcatatatatgtctttgtgtaagttcaagactattgatctgtgaagttattttgtaaggacatacatttggtaagtaagtttgtgtcccaggaaatgtatgtgtttttaaaccctttctaaatatgcaggccattaataaataagattgtttcttccctactgaatagataagtgtttttcttttttaaaattggaagcttcataaaagttatcttgttaaaaaacgatgatgatgttaacctatctttataattggaaattatttaaactgtttgttgttacagaagaaacaaaatggtaattacagaattagctgtggggaagattggctcccatggtactacaggttgagtatcccttattcaaaatggttgggacctgaagtgttttggattttggttttttgtggggtttttaaattattattttggaatatttgcattatatttaccaatttagcatccctaatccaaaaatctttcattagaaattggaaatgcttcaatgagcatttcccttatgtgtcatatctgcgctcaaatgttttgaattttggaacatttcttgtttctgacttttagattagggatactcaccccgtaccaatatttggagtccttagacattagattatatgaaaatgattgattgataggtaagaaaggttaaagagaaatgactttttaggaactagacttgaacgtataattaatatgtggaactagtttgcttttataattcattgtatcaagaaggagtcatgttttaaatccaaggcattgagactatctagaagcaaaaaagttggttttaaaaattctttttattagaagtgtgtttaaaaacatgtctttttttcccttgagcgacagagtgagactccgtctcaaaaaaaaaaaaaaaaaaaaaaaaaaaaaaaaaatttttaattaaaattttacgggatgggggtttatatatccgttttatatttataaaagcaaaattttacgttggggtcatcgtgagacgtatgttggcagcttcttaaaaccacctttatgcataaatttgatcactttattaagcttgatctctttttggggttttaaagggctctaattattacctgttaaaacagaatctgggtgaaaagtgtggttttcttttttttaaagtgttgggggaaaccatattaccgccgagattattatttaagccaatttataattccagaacccattaaaaattattaaccgggtgagggacctctcataattaggtgcagggaaggtggacagaattattcaaagaatttataattccaaaaagccaccacctttttacccgtgattag

SEQ ID NO: 28191 - DNA, 1468 bp, Homo sapiens
gaggaaaaacagtacagatgggccaagagcttcaaggagaagtagttataataattacagatcagtacggaaatcagattcaagcattttcaccaagttctttatcttctttgtcaattgctggggttggacttgatagctcaaatttgaaaacaacctttcaggaaaacacacagagtataagtgtaagaggcatcaaatttattccaggtcctcctggaaataaggatctttgttttacttggcgtgagttttctgactttattcgagtgcaactaatttctggacctcctgctaaacttctccttatagactggccagaactaaaggagtccattccagtgattaatggaagagatttacagaaccctattattgttcaactttgtgatcagtgggataatccagcaccggtacaacatgttaaaataagtcttacaaaagctagcaatttaaagctcatgccttcaaaccaacagcataaaacagatgagaaaggcagggctaatttgggagtattcagtgtttttgcccctaggggagagcatactcttcaggttaaagccatctataacaaaagtatcatagaaggacctataattaagttaatgattcttccagacccagaaaaacccgttcgtctcaatgttaaatatgacaaagatgcatccttcttagcagggggtcttttcactgattttatgattagtgttatttctgaagatgacagtatcattaaaaacattaatccagcacgtatttccatgaaaatgtggaagctgtctaccagtgggaaccgacccccagcaaatgcagaaacatttagttgtaataaaataaaagataatgacaaagaagatggctgcttctatttcaggtatttctcaaaacatttcatattttgaatacatatcttgttacaaagtaattcaaccctggagatatatgtgggctcacctgaggaaaagtaatttatgatcaaatagaaatgttagtgtctctaaatttttctcagttttttgggaaaaggtgtgttttcgtttttaagcattaaattggttttaagctttgtaaattgtaattgtatttgcttttgaaactatcgaagccatcagaagaattcttttatgttgtcagggcactttataacttcttattatataggaggtttctataaagattagactggcttttaacatttctgtgactttgagcatgttgctgcttcattctggacctccattttcaaatctaaaaacattatgtgttaagtttctttacaaatcctttatcatcaatagggtcaaaatgctcattatatttgttcagtgctttttcagactaattggtaaaggaccaatcatggaagctccaccccttacctcttccagttattaccgtcttccttcctgttgtgcatgccatgcacacactcatgtagacacacacatgcacacaccacaaaccc

SEQ ID NO: 28192 - DNA, 392 bp, Homo sapiens
gcactcataaagcagatcttggcgactcttactggtttggccttttcctaagctttggtgggtggtgtgcttgccacactagactgactgccatggctatggtgcaggtgctaagctctgcagttacatcatcattcatgggttctggaaggcacattttctcatatgtcaactctgaaatcagaatacctcatttttagttaaggtaatgaagtgacattgtcctcatctgggatacagtaggtgaagagtgagaaaacatgtctaggtgtattgggactagagggcttcggcagagcagcttcctcctcctcctcaccccttccctgtcatggaaacacatgctcatataaattaaacattccaacagttcataaaggtataaaatgaca

SEQ ID NO: 28193 - DNA, 513 bp, Homo sapiens
  misc_feature (483)..(483): n is a, c, g, or t
  misc_feature (486)..(487): n is a, c, g, or t
  misc_feature (492)..(492): n is a, c, g, or t
  misc_feature (494)..(494): n is a, c, g, or t
ccattaatccaggaatcttagctttagcgtttctcaacacttagtaacccaaccggcatttcccgccctggattttggagtaggaggtttctaaccactttttctttacgatactttccaaaaacatggtttctatttaatgtatgataatttccaaaaacaggttgcaaaagaagactccttcttgttggtgactgatatgaataactagatgaaagcttaccaaggacataaagtttgcgcggttagtaatttttgacgactgccttactcccacctcccttattttacagacatgaggattctagcttgaatgatgaagacatctgctcaagggcccacactgtgggtcgatattacacatctacttttagaaccctagtttccaagattcccgagggatcttcaaccctgtagagggcgcgccgtgcgcgttagggaccgcgggcggagactgcaccctcgcagctcgcggccctggtnaanngtggngngttcgccggtcgtccgcgc

SEQ ID NO: 28194 - DNA, 487 bp, Homo sapiens
caccacagaggcaaagagaacaggatgatgctttggtgctagctgctggggcttggagttgggtgagagctgtaagcatcaaatcttctgaagggatcaaccctcatgtagttacaacacgggctcatttttctcttgaaagggctctaagagtccttcacacagtgtccatccagctcttctcagtagagggctcactcccacaggactgctgccactttgcaagcaattggttgtcacctatacttctgatcaactggctataaaccggggttcccaccacccactcctccagtttgattaatttgctaggatggctcacagaactcaatgaagcacatttcgtgaatagccagatgaagaggtggatggggcagggtatgggggaggtgctaccgagctcccaagtgctctccaggaacaccaccctcccagcacctatgcatgttcagtgacccggaagctcactgaggattgttcaagagtt

SEQ ID NO: 28195 - DNA, 439 bp, Homo sapiens
gattaatacactttcattaagtatctactgagaaatttttataaggaatataaaaaggtaaaatactctctgtctttgggaaaactaatctgattagaaatattagacagatgtttgaaacaactgaaaaacttggtaagtttaaaatgtagctcaaaggagaaagagaatgagaggttaggatcgcaaatgctaaagatgttggatgtaatagttgctgcagggcagtttgagtgagaaaagtcaatgggttagtgcaggagttgaaggatttgggaacacttgagagcactagttcctagtttgggacctcagacttatgcagtctataaagccatgtctaccaaatattgtttatgcactgaacaaaggttcagctaccatcatttaagggttatctggagtaatttttggcattgaaaagagtgttttagctgtg

SEQ ID NO: 28196 - DNA, 414 bp, Homo sapiens
ctgactgcaacatagtgtgtcttgttgtctgtgtgacctgcgtagaattactttcctttctcattgggctccagtctgaaacacccttgaattttagaaacattgtaaggttaccccttcctcttttttttgtttttgtgttttttgtttttagaggcaaggtcttgctctgtcacccaggctggagggtaatggcacaattatagctcactgaagccttgacctcctgggcccatgagatcctcatgcttcagcctcccaaatagctgggacgataggttcctgctaccacatctgactccttttttttaagccatctttgtctttgtgtacactcatttacatttgtctagatacacatgaatgcatgcagagatagactcactagtcttacatgtctctttccccccatcc

SEQ ID NO: 28197 - DNA, 751 bp, Homo sapiens
ccaacatacgtagaagagtacttgtgtttaactttgaatgtttcaagaaacccaaaacttaacaccatgtcttatgacagaggcatttactgctaagtacccatgcactatcccaagatcatgtcactgcactccagtctgggcaacagagtgagactccgtctcaaaaaaaaaaaataatttgatcctcataaaattcagcattccaaagaattgggggtaggaaacttgagccccactttgagatggggtgggattcctcttgagatactctacagcacacatactcttgaccttttcatgtatctctgtctcctaatttggcaggaaatataggaaaaggaacaagggaaaaacatagtgacagccaggaatattgaatgtcaccttataatctgaaaatatgtggtagaattagtttggatgttttccccactatatagaagaagtgacttgttcaggaagaagaaatcccacatccccttcaaatgtctagttcttggtctacacatgggaacaatacatggtgactggttaataaccaatggtccacacctaggagtctgcccaggacccactagtctggctaaataaggtggttattgtatatcttctggtgaagagttctccagttgggtgtggtggctcacacctgtaatctcagcactttgagaggctgagtctggctgatggcttgagctcaggagtttgagaccaggctggtcaacatggcgaaacctcatctctacaa

SEQ ID NO: 28198 - DNA, 466 bp, Homo sapiens
taatattctttgttattataatgaagatgcacagaatacttttaattctgctatgtagttgagataacaaagacttaaaaatgactatataactgtgccaatagattcacaatacaaaatgatgtaattcgcgacatcaataaaacacataggcagccataaagaggcagggttttatatgctatagtagttatttttggtaatatctatagtaacaacaaagaaaatacctatagtacttaggattttgagactagtctggtcaacatggcaaaaccctgtctctatgaaaaataacaaaaattagccaggagtactggtgcacatctgtggtcccaggtactcagaaggctgtggtgggaggattgtttgagttgagcctgagaggcagagcttgcaataagcagagattgtgccactgccctccagcctgggtgacagagcaaaaccctgtcaaaaaaaaaaa

SEQ ID NO: 28199 - DNA, 445 bp, Homo sapiens
actactaaattcgcggccgcgtcgacccctttcattagggcccctatatccaatacctaatattattaaaattgctgattccgttcaatcaacaactggtaaatattttgctcttgtggatttggctaacgtgctgtttcaatagcgtcttcactgcagttcgcctcctcctctaaaagaacacagtacaccttttcagacctctgcagctgtgtcatcacatgcaatctttaattaatcttaacgacatccaccttctccaggagcactggtatgagagtacatccaggacattctcagccaaggagactcacttaatacatacattgatgacattcgagaccaatatttcttagtacttttgggttttggtggcaacatattcctcatttataaattttacttctaaattaaagtctacagacactcctgtaagtgacttctt

SEQ ID NO: 28200 - DNA, 563 bp, Homo sapiens
actactaaattcgcggccgcgtcgacccctttcattagggcccctatatccaatacctaatattattaaaattgctgattccgttcaatcaacaactggtaaatattttgctcttgtggatttggctaacgtgctgtttcaatagcgtcttcactgcagttcgcctcctcctctaaaagaacacagtacaccttttcagacctctgcagctgtgtcatcacatgcaatctttaattaatcttaacgacatccaccttctccaggagcactggtatgagagtacatccaggacattctcagccaaggagactcacttaatacatacattgatgacattcgagaccaatatttcttagtacttttgggttttggtggcaacatattcctcatttataaattttacttctaaattaaagtctacagacactcctgtaagtgacttcttaaaaaaaaaaaaagcctttactgtagagtcttctcaaccttttcaaatgcctcctgcaatctctggatatttaggatagctatcagttgccccaggatttctgatacgagatattgcc

SEQ ID NO: 28201 - DNA, 774 bp, Homo sapiens
ggacaactggcacaagggccgcaaagctgggggcaagagaaggccctgccacaagaagcggaagtatgagttggggcgcccagctgccaacagcaagactgacccgtgccgcatccacacagtccgtgtgcgaggaggtaacaagaaatactgtgccccgaggctggacgtggggaatttctcctggggctcacgagtgattgtagctccgtaataaccaagagatcatctgagtgtgggtcgtatcaactgcgaagtactacatagacgcagcatgtgtgtcgtcaccgagagcacccgtggctgacagcaattgctagtcagtcgcgtccatcagaggcaggcagcacgcagtacgcgacgagtgtgtagcgaggttcccccactattgtcggctggccccctggggaccgtacagcaagggcagcatgaagcttgatctgcgctgtaggaacgacagaggatgttttgagaatcaaaaagaaggatgcttaaagaaaaatttcacgagagaaactattgagtgaacagggacaaaagaaatgccaaaatgagcagtctcctgggggagcagttccagcagggcaagcttcttgcgtgcatcgcttcaaggccgggacagtgtggccgagcagatggctatgtgctagagggcaaagagttggagttctatcttaggaaaatcaaggccgcaaagggcaaataaatccttgttttgtcttcacccatgtaataaaggtgtttattgttttgttcccaaaaaaaaaaaagaaa

SEQ ID NO: 28202 - DNA, 843 bp, Homo sapiens
ctcttcttagtaaactaatgtattcgttcattatcagataaatggaatgtaaaccagttatgtaaaaatatcacatatactaatgcatttttccaaaccttaaagccctacagaaattataaagaaacattattctcgtgttatcatgaagctagaagggtccaaagaaatacaaagtgaaacctcttgtatttaaaacaaaacttgcaccaccaccaccaccccaaaatagttttttttttttttttagaatatctcttccaagttttaaagttcaagtaaaattgatgtaatagcaataagtgtagtaacagtaaagtagggaatggtgactattctatagcaaagatctacagatgttggaattgtgttagaaaccttcagagccacaccacagccttctattacatttaaatgtcgtaggaaaaactgcaattttccggaaaattgtattaaggaccaggtgctctaataccaagagctgttttgacacatcaaaggttaagtttgggtctttgaaaatcctgcctcttactgaacactttaaaagtcattcatgttaaaacacacacattcttgcctttgactatacactgtaaaagtactacatgttaaaatggagatggggacatttttgttgtttaagtttatggaagtatgactccattttagtatagctacaatgtcgcaaacgatggaataaggtactcatcaatacattacctggtaagtataaatagttcaacttgccggctttgaaaagcttaatcctatttcttatggtgaaccttaaataaaatgaaaatacacaactgacaatgtttaacgtgcacttaaacaaac

SEQ ID NO: 28203 - DNA, 399 bp, Homo sapiens
ctttccctggctgacagaactctgccttcgagtaggtgttgggggtcatgcccttcatgaaaggaggagtttctctctcatctcgtcaaaaaacaaattattctgccaagcaaggagcatgttttagcttagtcaccacagaagaaacagatcacttttaattatgacatttcatcaacacttggcaagtaagaaagatgggttgaaagactgcatcagaaatattctagagttattttcctgctaacatggaaacaaaaagattcaatgtgagaagaaaaaatagattcctaatggtcaagagaacaagaaaattagatagaaacttaaatataaagtacccggaagtcaaaatgtttgaaatgacacttagagccttaattaaccagattttaagat

SEQ ID NO: 28204 - DNA, 320 bp, Homo sapiens
attttttaccatacacaaaatttaactgaagatggattaaagacttaaatgtaagacctgaaactactagaagaaaacataggtgaaatgcttcataacactggactggacaaagttttgttaataagactttaaaagcacaggcaaaaaatgaaaagtagacaatgggattacatcaaaatacaaggcttctgcactgcaaaggaaacagtcaacaagtgaaaagacaacctgcaaaatgggagaatatatttgcaaacactacatctaacaagaggaggatattcaaaatatataagaaactcaaacaactcaatagc

SEQ ID NO: 28205 - DNA, 152 bp, Homo sapiens
acacactaacatcccagggactaaaactatagatggcagtgtagttctgccaagagcgtgggtgtttacattacgttgaaattcatttcctgttgatggatttaagaaaattattatatcagttaataaaacttctgttaaatagggtcaaa

SEQ ID NO: 28206 - DNA, 2781 bp, Homo sapiens
ggcgcgggcgcactggccgcatagagacgcagcgcacgcgcagtcgcgtatccgtgtgatgggcgggctgttgacggcgctgcgatggctgcctgcgagggcaggagaagcggagctctcggttcctctcagtcggacttcctgacgccgccagtgggcggggccccttgggccgtcgccaccactgtagtcatgtacccaccgccgccgccgccgcctcatcgggacttcatctcggtgacgctgagctttggcgagagctatgacaacagcaagagttggcggcggcgctcgtgctggaggaaatggaagcaactgtcgagattgcagcggaatatgattctcttcctccttgcctttctgcttttctgtggactcctcttctacatcaacttggctgaccattggaaagctctggctttcaggctagaggaagagcagaagatgaggccagaaattgctgggttaaaaccagcaaatccacccgtcttaccagctcctcagaaggcggacaccgaccctgagaacttacctgagatttcgtcacagaagacacaaagacacatccagcggggaccacctcacctgcagattagacccccaagccaagacctgaaggatgggacccaggaggaggccacaaaaaggcaagaagcccctgtggatccccgcccggaaggagatccgcagaggacagtcatcagctggaggggagcggtgatcgagcctgagcagggcaccgagctcccttcaagaagagcagaagtgcccaccaagcctcccctgccaccggccaggacacagggcacaccagtgcatctgaactatcgccagaagggcgtgattgacgtcttcctgcatgcatggaaaggataccgcaagtttgcatggggccatgacgagctgaagcctgtgtccaggtccttcagtgagtggtttggcctcggtctcacactgatcgacgcgctggacaccatgtggatcttgggtctgaggaaagaatttgaggaagccaggaagtgggtgtcgaagaagttacactttgaaaaggacgtggacgtcaacctgtttgagagcacgatccgcatcctgggggggctcctgagtgcctaccacctgtctggggacagcctcttcctgaggaaagctgaggattttggaaatcggctaatgcctgccttcagaacaccatccaagattccttactcggatgtgaacatcggtactggagttgcccacccgccacggtggacctccgacagcactgtggccgaggtgaccagcattcagctggagttccgggagctctcccgtctcacaggggataagaagtttcaggaggcagtggagaaggtgacacagcacatccacggcctgtctgggaagaaggatgggctggtgcccatgttcatcaatacccacagtggcctcttcacccacctgggcgtattcacgctgggcgccagggccgacagctactatgagtacctgctgaagcagtggatccagggcgggaagcaggagacacagctgctggaagactacgtggaagccatcgagggtgtcagaacgcacctgctgcggcactccgagcccagtaagctcacctttgtgggggagcttgcccacggccgcttcagtgccaagatggaccacctggtgtgcttcctgccagggacgctggctctgggcgtctaccacggcctgcccgccagccacatggagctggcccaggagctcatggagacttgttaccagatgaaccggcagatggagacggggctgagtcccgagatcgtgcacttcaacctttacccccagccgggccgtcgggacgtggaggtcaagccagcagacaggcacaacctgctgcggccagagaccgtggagagcctgttctacctgtaccgcgtcacaggggaccgcaaataccaggactggggctgggagattctgcagagcttcagccgattcacacgggtcccctcgggtggctattcttccatcaacaatgtccaggatcctcagaagcccgagcctagggacaagatggagagcttcttcctgggggagacgctcaagtatctgttcttgctcttctccgatgacccaaacctgctcagcctggacgcctacgtgttcaacaccgaagcccaccctctgcctatctggacccctgcctagggtggatggctgctggtgtggggacttcgggtgggcagaggcaccttgctgggtctgtggcattttccaagggcccacgtagcaccggcaaccgccaagtggcccaggctctgaactggctctgggctcctcctcgtctctgctttaatcaggacaccgtgaggacaagtgaggccgtcagtcttggtgtgatgcggggtgggctgggccgctggagcctccgcctgcttcctccagaagacacgaatcatgactcacgattgctgaagcctgagcaggtctctgtgggccgaccagaggggggcttcgaggtggtccctggtactggggtgaccgagtggacagcccagggtgcagctctgcccgggctcgtgaagcctcagatgtccccaatccaagggtctggaggggctgccgtgactccagaggcctgaggctccagggctggctctggtgtttacaagctggactcagggatcctcctggccgccccgcagggggcttggagggctggacggcaagtccgtctagctcacgggcccctccagtggaatgggtcttttcggtggagataaaagttgatttgctctaaaaaaa

SEQ ID NO: 28207 - DNA, 492 bp, Homo sapiens
cctcaggggtttgctgacagcagcaagagtggcggcgggctcgtgctggaggaaatggaagcaactgtcgagattgcagcggaatatgattctcttcctccttgcctttctgcttttctgtggactcctcttctacatcaacttggctgaccattggaaagctctggctttcaggctagaggaagagcagaagatgaggccagaaattgctgggttaaaaccagcaaatccacccgtcttaccagctcctcagaaggcggacaccgaccctgagaacttacctgagatttcgtcacagaagacacaaagacacatccagcggggaccacctcacctgcagattagactggctgctctcagcactgcctgttatcctgacactttccctggacatggtcctgtaaaacggtcatgatcaggccccagtctcctggattcggtcttcctccttcatgattttactctcattttggtgagcaaagaccccaaaag

SEQ ID NO: 28208 - DNA, 687 bp, Homo sapiens
ggcgcgggcgcactggccgcatagagacgcagcgcacgcgcagtcgcgtatccgtgtgatgggcgggctgttgacggcgctgcgatggctgcctgcgagggcaggagaagcggagctctcggttcctctcagtcggacttcctgacgccgccagtgggcggggccccttgggccgtcgccaccactgtagtcatgtacccaccgccgccgccgccgcctcatcgggacttcatctcggtgacgctgagctttggcgagagctatgacaacagcaagagttggcggcggcgctcgtgctggaggaaatggaagcaactgtcgagattgcagcggaatatgattctcttcctccttgcctttctgcttttctgtggactcctcttctacatcaacttggctgaccattggaaagctctggctttcaggctagaggaagagacccggtgtccaaaaaaagtaaaaataaaaataaagttagggagagagattgtaacacttaagttaacagatagtacagattgcacttcattttcatctcccggtctttagggaggaagggccgctgggaaggattgaggaagggagaagcgaaggtgagtggccggagatgagtggagattaccgtaggcccggaggggttgtggggaagggaggatggagaaagaagggccagtttcaaggaggtca

SEQ ID NO: 28209 - DNA, 588 bp, Homo sapiens
ggcgcgggcgcactggccgcatagagacgcagcgcacgcgcagtcgcgtatccgtgtgatgggcgggctgttgacggcgctgcgatggctgcctgcgagggcaggagaagcggagctctcggttcctctcagtcggacttcctgacgccgccagtgggcggggccccttgggccgtcgccaccactgtagtcatgtacccaccgccgccgccgccgcctcatcgggacttcatctcggtgacgctgagctttggcgagagctatgacaacagcaagagttggcggcggcgctcgtgctggaggaaatggaagcaactgtcgagattgcagcggaatatgattctcttcctccttgcctttctgcttttctgtggactcctcttctacatcaacttggctgaccattggaaagctctggctttcaggctagaggaagagcagaagatgaggccagaaattgctgggttaaaaccagcaaatccacccgtcttaccagctcctcagaaggcggacaccgaccctgagaacttacctgagatttcgtcacagaattttgagacccattaaaaaagttaaatgagaaaaaaa

SEQ ID NO: 28210 - DNA, 317 bp, Homo sapiens
gccctttaaaaaaaaaagcctgtgcttaataatgctacaataatgacgttgtgtcacatttcagccacggggctcttaatccaccactgcattcaaatattgtgaaatgtgttacttacgatattgggttagcgggaaaaataatgtcctagcaagaaggaaggagaaatacattttccgttttatcttgtagcctgggacaggccagagaaggcatgtccctggtcataagttagaatgacagttgctctttttgagtcccggctatgcatcaagggcttacacatggggcttacacttactaatgcttgaaacac

SEQ ID NO: 28211 - DNA, 280 bp, Homo sapiens
gccaagtctttgacagaggacttataactagaatataaaaagaattcaccaaatctcaacagttaaacagcaaacaatttaactaggtatgggcaaaaatcacgaacacacattttgctgtagagtgtccaacaatgggcagctacttgtgtcattcactggaccatttatgccccagtgaatagcatcttccaggcaccctcactcacaaggttgcttaacttttttcttttcattgcaagttttccccaaactcttatcagctgaatgtagacactta

SEQ ID NO: 28212 - DNA, 465 bp, Homo sapiens
cctatcttccagtctgttgcttttacctcccattgggggaaaaaaatgcatggtagtctaggaaatggagtttgtagacttccagcccttgcagcatagaggagcatgtggaagggtgggaactgaaccaagcgtctgcaggcaaacaactagcacagcgtacaggcaccagccccagtgtgagggatcccagaggcccacagctaagggatggtcactacagcacttgcctccttgttttctttctttgctggtcatcttggcagagcaatctgaattgtcaggtcccatatggttcatctcagtccagagagtgacagccccaggggaacaggaggaaaagaggagaaggaagaaaaaaaggggtgcttggaaccagggcatctctgaaattggtagccttttttataatggaatcctctggtttacttggtgttataagtaaaatgtttattcagaaacaga

SEQ ID NO: 28213 - DNA, 951 bp, Homo sapiens
atgatgggactcaccgagggggtgttcctgattctgtctggcactcagttcacactgggaattctggtcaattgtttcattgagttggtcaatggtagcagctggttcaagaccaagagaatgtctttgtctgacttcatcatcaccaccctggcactcttgaggatcattctgctgtgtattatcttgactgatagttttttaatagaattctctcccaacacacatgattcagggataataatgcaaattattgatgtttcctggacatttacaaaccatctgagcatttggcttgccacctgtcttggtgtcctctactgcctgaaaatcgccagtttctctcaccccacattcctctggctcaagtggagagtttctagggtgatggtatggatgctgttgggtgcactgctcttatcctgtggtagtaccgcatctctgatcaatgagtttaagctctattctgtctttaggggaattgaggccaccaggaatgtgactgaacacttcagaaagaagaggagtgagtattatctgatccatgttcttgggactctgtggtacctgcctcccttaattgtgtccctggcctcctactctttgctcatcttctccctggggaggcacacacggcagatgctgcaaaatgggacaagctccagagatccaaccactgaggcccacaagagggccatcagaatcatcctttccttcttctttctcttcttactttactttcttgctttcttaattgcatcatttggtaatttcctaccaaaaaccaagatggctaagatgattggcgaagtaatgacaatgttttatcctgctggccactcatttattctcattctggggaacagtaagctgaagcagacatttgtagtgatgctccggtgtgagtctggtcatctgaagcctggatccaagggacccattttctcttag

SEQ ID NO: 28214 - DNA, 619 bp, Homo sapiens
ctggccctgtgtataaggttttaaaatttttacaatcccccaaatgacttcttttcattgaacctgactctttggtaatgaagagtctagctgcagttttaaagccccaaattagtacctatgatttgtgtaaccttgtaggcaagtcaaaatgatggcttaatcaacagccgtgaagctcagatagctttgaataaaatgtgtttatgctaaaggcattcttactgagaagtgagacgcaggctgcttgttgagatgacaggcaaggcagatctgttttggagatgtgtagttacctctattgcaatgttatctcagtgtcccatttttttagcctgcggatccccttaagattattaatgtattctcagttgggcgcagtggctcatgcctataatcccagcactttgggaggtcaaggcagatggatcacttgaggccaggagttcaagaccagcctggccaacatggcaaaaccccgtctctactaaaatacgaaaaaaacatctgggcatagtggtgcatgcctataatgccagctgcttgggcagctgagacacaagaatcaccggaaccctgcaggtggtggagaccaaaattgtgccactgcagtccagcc

SEQ ID NO: 28215 - DNA, 272 bp, Homo sapiens
tgcctacaaggccttacatagattggctttccagtaccactctgccctcattttttgctacagcctcccctgaccattccacacattggctctacccgactctgctttcttaaacctgcgaagcacatcatgcctcagtgcatttgtacttgctgctccttttacctagaaagctttttcctcagatatcctcatgtgtcatagcctcagctcctttaggtctttactcaaatgacacttttcaatgaggctttccttggttattttttcta

SEQ ID NO: 28216 - DNA, 604 bp, Homo sapiens
ctgctctagtgtctgtgacaaaagatattatctggaaacattttaagtatgtgtctcgcgaattggacctctaagaaatattcttactttttggtaaatttttttcagtaaaactattatttatgaagataaataataacatgaatgctcatttccaccactcatttggctttcattatatgttgagacaaaaattttgattaaaggaagcaaagaaacccttggactgttatcattcccctacctacatcccctatagtctacagaatctacatctctggaagagtttccagtcttaacaaagggtttgtgctggggagagggatttatggcgagatgtggttctgctatttattttaagttagaactcttattctgagagttttccatagaaacacagtaagatatgtggttaagttccagagtactgttaatattacaggtatgttcaggcatttgttaattagcctagaaacctaaccactgggtataacgtttccagaggaacatatatcctgaaattcaagtaaccgcttcactagagactgtctttcctaacttgtttactcagcattaaaaaggtaatgattttggcaaaaaaaaa

SEQ ID NO: 28217 - DNA, 263 bp, Homo sapiens
gaaaaactaacatttcgtttgtcaactagcaggcttcatagtggggtgaatgggctttgattgtacttggaaaacaccaccatgaggaatctacagtgcattaagcaattgattcctcttttgagaagcaatagttgtttgtttgtttgttttgagacggagtcttgctctgttgcccaggctggagtgcagtggcgcgatttcgactcactgaaagctccgcctcccggtttcccaccattctcctgcctcagccactcgag

SEQ ID NO: 28218 - DNA, 1749 bp, Homo sapiens
gcggtcttatataagccagatccgcaggggagtccgcagaagggttaaacaggtctttgggcttcggcgacctcgcccgcggcagaaaccggtaagaagacagtgggctgcgcgtctcattttcagccttgcccggactctcccaaagccggcgcccagtagtggctccagagcccacaggtggcccccggcagtctctggggcgcatggagcggcgttaatagggctggcggcgcaggccagtagccgctccaacatgaacctcgtgggcagctacgcacaccatcaccaccatcaccacccgcaccctgcgcaccccatgctccacgaacccttcctcttcggtccggcctcgcgctgtcatcaggaaaggccctacttccagagctggctgctgagcccggctgacgctgccccggacttccctgcgggcgggccgccgcccgcggccgctgcagccgccaccgcctatggtcctgacgccaggcctgggcagagccccgggcggctggaggcgcttggcggccgtcttggccggcggaaaggctcaggacccaagaaggagcggagacgcactgagagcattaacagcgcattcgcggagttgcgcgagtgcatccccaacgtgccggccgacaccaagctctccaagatcaagactctgcgcctagccaccagctacatcgcctacctgatggacgtgctggccaaggatgcacagtctggcgatcccgaggccttcaaggctgaactcaagaaggcggatggcggccgtgagagcaagcggaaaagggagctgcagcagcacgaaggttttcctcctgccctgggcccagtcgagaagaggattaaaggacgcaccggctggccgcagcaagtctgggcgctggagttaaaccagtgagccgaggcccgcgccgaggacctggccaggccagccactcctgaagccccgggaggagaggaaggcagcggcgaacgccaggctctgggctccggcgactggtgctacgcatcccgcggagcttctgctgagcgccggcaggtcgtcggctgcaaccacacacttggatcgcacgtgcaatgtcctttgattttttttaatacattaagagaaagagaaatatatatatatccacccccagcccaaccgagggcggcccttggcggcaacatgcaagaaggagggactgtcgaacccaagggctcaaagacgcactcttccacccttttggagcgaatttagaacctcagccctatctccatttccctatctggctctttctctcttgtccctccatatgatccgccccgacgccgtcttctctaattaaaatgcaataaggaatcaattcttttctgcctgagaaagagaaccagacgcaggaagatgaaaggctgccctttgttcttcgaatcgtggtggttttattttatttttctttttgtcgctgcacttcctgtttagttccaagggaaacactttctctctttctctgtctctctcttttcttccttcttttccttcctttttgtttctatctaaataaaagctttccctgtgttggaaagtttttatgtatttaaactacctaccatgcctgttgtgctcaggtgtttgttcatcctgccatccccaacccttttctacctcaagtctgtgtgaccactcacagcccccctcccttcgccaaagcagtgtctatgctcttgattaataaaacattttctgaaatcaaaaaaaaaaaa

SEQ ID NO: 28219 - DNA, 146 bp, Homo sapiens
ttaaaatcttagaagaaaacctagaaagtactcttcttgacatgaaccttggcaaagaacgtttgactaagtccccaaaagcaattgcaacaaaaacaataattggcaagtgggacctaactaaactaaacagcttctgcacagca

SEQ ID NO: 28220 - DNA, 476 bp, Homo sapiens
gttcaaaatactgtatagtagctaagattgccacattttcattgtgtgtctaaatcttgagtaaacttcaaaatatgtggtaaagttaaaaatacttctattgttccatttactgcaggcagtgggatcaactattctggtgagtataactgtacaggtagattagaatttgtagatttgtctgaagtttttcttctaaaaccgtttcttcatccatgctagtctttatttgggaggtttcttggcaagctctactgaatctaatgaattaaaatattaattgattttttcccttcccctcctaaaacatctctaaagcagaaaaactcaatattgatcaggtgatttacagaatgaagcttgaaaaaaacgaattatgtggttggaagtaattgtttacataacataattaatgtcagcactaagctttaagttggcaggggatttttttcttcttcttgttagtaacactccat

SEQ ID NO: 28221 - DNA, 5163 bp, Homo sapiens
  misc_feature (2761)..(2761): n is a, c, g, or t
agctggtctcctgcttgacaccataaagaggccagcattgcagggtctatgtctttgtcttgacttccagtttgatactgtggttaaagacagacccacaattttgagcaagcttttactcttgcactttcttaagcaggatattcctgctctgagctgggagttctttgtcaatagatttgagacgctttctttggaagcccagctacatttggattgtaacaaggaatttccttttcctacaaccatcactgctgtgaggaccaatgttgctaacctcagcgatgcagccttatggaagatcaagagagctcgctttgcaagaaaccgccagaagagtgtacgttccctgagggacagcgtgaaagggcctgtggaatccaagagggcgctctccctccctgagaccctgacctccaaaattcctatgaggttgaccaggcatgagcagtctgctccagctctcggtgggacacccgaacagacgccaggacaacaatctcctgagaatgacaacaccatcaaggacctgctcccagaagacgctgggatcgaccaccagacagttcaccagctgattacagtgctcatgaagttcatggccaaggatgaaagcagcgctgagtcagacatcagcagtgcaaaggccttcaacacggtcaagcgacacctgtacgtcttactcggctatgaccagcaggaaggttgcttcatgattgcacctcaaaaaatgcgcctgtcaacttgctttaatgcattcattgcaggaattgcccaagttatggactataacattaacttgggaaaacaccttctccccttagtggttcaggtgctcaaatactgctcttgtcctcaactccggcattatttccaacagccgcctcgttgctccctctggtccctaaagcctcacatccggcagatgtggttgaaggccttgcttgtcatcctttacaagtatccataccgagactgtgatatcagcaagatcctgctgcatctgattcacataacagtcaatacactcaatgcgcagtatcatagctgcaagccccatgccacggcaggacctttgtacagtgacaacagtaacataagcagatacagcgaaaaagaaaaagaagaagatagtgtttttgatgaatctgatattcatgatacacctactggaccctgcaataaagagtctcaaactttttttgcaagattgaaaagaataggcggcagcaaaatggtgaaatatcagccggttgagatgaatgttcagagaagtgaaatagaactggctgaatatagagagacgggtgcattacaagacagccttctccactgtgtgagagaagaaagcattccgaaaaaaaagctacgctctttcaaacaaaaatctcttgatatagggaatgcagactcgcttttgtttacattagacgaacatcgtaggaagtcgtgcatagatcggtgtgacatagagaagcctccgacccaagctgcgtatatcgcacaaagaccaaacgaccctggacgttctagacagaactctgctacgaggcctgacaatagtgaaatccccgagaacccagctatggaagggtttccagatgctcgaaggcctgtcataccagaggttaggttaaactgtatggagactttcgaggtgaaagttgactcgccggtaaagcctgctcctaaagaggatttagatctgatagatctatcctcagattcaacctcggggcctgaaaaacactctatactctcaacctccgacagcgactctcttgtatttgagcctcttccccctctcagaatagtcgagagtgacgaagaagaggagacgatgaaccaaggcgatgacggcccctccggtaaaaatgctgcctcttctccctccatccccagccatccctccgtcctcagcctgagcacagctccgcttgtacaagtaagtgtggaggattgttccaaagacttttcttctaaggactcaggaaataatcagtcagcagggaacactgactctgccctcatcactctggaagaccctatggacgccgaaggatcctcaaagccagaggagctgccagagttctcctgcggtagcccactgacgctgaagcaaaaacgagacctccttcagaagtcgtttgctctccccgagatgtcgctggatgatcaccctgacccgggcactgagggggagaagcctggggagctgatgccaagttcaggggcaaaaaccgtcctcctcaaagttcccgaagatgcagagaaccccacagaaagtgagaagcctgataccagtgcagaatctgatacagaacagaatcctgaaaggaaggtggaagaggatggagctgaggaatccgaatttaagattcagattgttcccaggcagaggaagcagaggaagattgctgtcagtgctatccagagagagtacctcgacatctccttcaacattctggacaaactgggagaacagaaagatccagatccttctactaaaggactttcaactttggaaatgccacgagaatcttcatctgcccctacgttagatgcaggtgtgccggaaacaagtagccattcctcaatatcaactcagtataggcagatgaaaaggggatccctgggagttctgacaatgagccagttaatgaagcggcagctggagcatcagtctagcgccccccataacatcagcaactgggacactgaacagatacagcctgggaaacgccagtgtaacgtgccaacntgcctaaaccctgacctggagggacagccattgaggatgagaggtgccaccaaatccagcctgctatcagcaccaagcatagtcagtatgtttgtgcctgcacctgaagagttcactgacgagcagccgacggtgatgacggacaaatgccatgactgtggggccattcttgaagaatacgatgaagagacacttgggctagccatcgtggtcctctccacattcattcacttaagcccagacctggcagccccgctgctgctggatatcatgcagtctgtgggaagattggcatccagtactaccttttctaatcaagcagaaagcatgatggttcccggcaatgcggcgggggtggccaagcagttcctgcgctgcatcttccatcagttggcccccaacggcatcttcccgcagctgttccaaagcacgatcaaagatgggacttttttacggaccttagcctcgtctctgatggacttcaatgagctgagctccatcgcagctctcagtcagctcctagagggtctaaataacaaaaagaatttaccagcagggggtgctatgattcgctgtttggaaaacattgcaaccttcatggaagctttgcctatggattctcctagtagcctctggaccacaattagcaaccagtttcagacattttttgccaagctgccttgtgttttacctctgaagtgttctttagattccagtttaagaattatgatttgcctcttgaagatcccttctaccaatgctacaaggagtttgttggaaccattttcaaaactgctcagctttgtaattcagaatgccgtcttcactctggcctacctggtggagctgtgtggcttatgttaccgagctttcactaaggaacgagataaattctacttgtctcgtagtgttgttctagaacttctgcaggccctaaagctcaaatctcctttaccagatacaaaccttcttctgcttgttcagtttatttgtgcagatgctggaaccaaactagctgagtcaacaatcctgagcaagcagatgatagcctctgtacctggatgtgggactgcagcgatggagtgtgtgaggcagtacatcaacgaagtgcttggatttcatggcagacatgcacacgctgaccaaactgaagagccacatgaagacatgttcccagcctctgcatgaagatacctttgggggacatctcaaagtggggctggcccagattgcagccatggacatctcacggggcaaccacagagataacaaagctgtgatccgctatctgccttggctttatcatcccccctctgcaatgcagcaaggacctaaagaattcattgagtgtgtctcccatatccgactgttgtcctggctgctgctgggttccctcactcacaatgcagtgtgcccaaatgcctcctctccctgcctgcccattcctctggatgcaggctcccacgttgcagaccatcttattgttatcctgattggatttccagagcaatcaaagacctccgtgctgcacatgtgctccctcttccacgcgttcatctttgctcagctgtggacagtttattgcgagcaaagtgccgtcgctacaaatctccaaaatcagaatgaattcagcttcacggcgatactgacagcactagaattttggagtagggtgacacccagcatccttcagctaatggcccataacaaagtgatggtagaaatggtgtgtctccatgtgattagtttaatggaggcattgcaggaatgcaattcgaccatttttgtcaagctgatacctatgtggttgccaatgattcagtcaaatatcaagcacttatctgcgggactccagcttcgcctccaggctattcagaaccacgtgaaccaccacagcctaaggacgctgccgggctcgggccagagcagtgctggcctggcagccctccgaaagtggttgcagtgcactcagttcaaaatggcccaggtggagatcccagtcctcggaagcagcctctcaattttatcctctatgagtggactcctcggcgctcagtgtcaacactctggtttagcaataatgggtttaaaaacaaacaatttgatccaagcaggttggggaacatattggtactgtacattctctttctagtttagtaaaagatgtgcaaaggccagagagggccgaaaatgaagctttcttgctacacatatttctgatgactccttgggctatctgattaagtgtttccttacattattttttaaaaaccaaatcatttttctttaactaacttctattttttttaagaaaaaaaaatagactggtgggtactcacagaaaagttgtataagtccccctgttgctatttttgatgatagagaataaatagggtttttga

SEQ ID NO: 28222 - DNA, 482 bp, Homo sapiens
  misc_feature (107)..(107): n is a, c, g, or t
agagagagagagagagagagagagagagagagagagagagagagagagagagagagagagagagagagagagagagagagagagagagagagagagagagagctganatggaatctcaaagtgtccacaccactcctaatcctcacactccctgttttcacagatctcagttgtaaggttatataaatggatcggggatatgttaccttataagctggatgttctgcttgcataagcattttgattaaaaataagcattttgattaaaaacaaaataatagttcaagagatctattgtacgccgtggtgactacagttaataacaatatattctatacttgaaaattgctacgaggagatttcaaatgttctcaccataaaaaataagtacgtaaggcaatgtacatgttaaatagcttgatttagccattccacaatgtatatctatctcaaaacttttatattgatatatgaatattaaa

SEQ ID NO: 28223 - DNA, 5230 bp, Homo sapiens
  misc_feature (2761)..(2761): n is a, c, g, or t
agctggtctcctgcttgacaccataaagaggccagcattgcagggtctatgtctttgtcttgacttccagtttgatactgtggttaaagacagacccacaattttgagcaagcttttactcttgcactttcttaagcaggatattcctgctctgagctgggagttctttgtcaatagatttgagacgctttctttggaagcccagctacatttggattgtaacaaggaatttccttttcctacaaccatcactgctgtgaggaccaatgttgctaacctcagcgatgcagccttatggaagatcaagagagctcgctttgcaagaaaccgccagaagagtgtacgttccctgagggacagcgtgaaagggcctgtggaatccaagagggcgctctccctccctgagaccctgacctccaaaattcctatgaggttgaccaggcatgagcagtctgctccagctctcggtgggacacccgaacagacgccaggacaacaatctcctgagaatgacaacaccatcaaggacctgctcccagaagacgctgggatcgaccaccagacagttcaccagctgattacagtgctcatgaagttcatggccaaggatgaaagcagcgctgagtcagacatcagcagtgcaaaggccttcaacacggtcaagcgacacctgtacgtcttactcggctatgaccagcaggaaggttgcttcatgattgcacctcaaaaaatgcgcctgtcaacttgctttaatgcattcattgcaggaattgcccaagttatggactataacattaacttgggaaaacaccttctccccttagtggttcaggtgctcaaatactgctcttgtcctcaactccggcattatttccaacagccgcctcgttgctccctctggtccctaaagcctcacatccggcagatgtggttgaaggccttgcttgtcatcctttacaagtatccataccgagactgtgatatcagcaagatcctgctgcatctgattcacataacagtcaatacactcaatgcgcagtatcatagctgcaagccccatgccacggcaggacctttgtacagtgacaacagtaacataagcagatacagcgaaaaagaaaaagaagaagatagtgtttttgatgaatctgatattcatgatacacctactggaccctgcaataaagagtctcaaactttttttgcaagattgaaaagaataggcggcagcaaaatggtgaaatatcagccggttgagatgaatgttcagagaagtgaaatagaactggctgaatatagagagacgggtgcattacaagacagccttctccactgtgtgagagaagaaagcattccgaaaaaaaagctacgctctttcaaacaaaaatctcttgatatagggaatgcagactcgcttttgtttacattagacgaacatcgtaggaagtcgtgcatagatcggtgtgacatagagaagcctccgacccaagctgcgtatatcgcacaaagaccaaacgaccctggacgttctagacagaactctgctacgaggcctgacaatagtgaaatccccgagaacccagctatggaagggtttccagatgctcgaaggcctgtcataccagaggttaggttaaactgtatggagactttcgaggtgaaagttgactcgccggtaaagcctgctcctaaagaggatttagatctgatagatctatcctcagattcaacctcggggcctgaaaaacactctatactctcaacctccgacagcgactctcttgtatttgagcctcttccccctctcagaatagtcgagagtgacgaagaagaggagacgatgaaccaaggcgatgacggcccctccggtaaaaatgctgcctcttctccctccatccccagccatccctccgtcctcagcctgagcacagctccgcttgtacaagtaagtgtggaggattgttccaaagacttttcttctaaggactcaggaaataatcagtcagcagggaacactgactctgccctcatcactctggaagaccctatggacgccgaaggatcctcaaagccagaggagctgccagagttctcctgcggtagcccactgacgctgaagcaaaaacgagacctccttcagaagtcgtttgctctccccgagatgtcgctggatgatcaccctgacccgggcactgagggggagaagcctggggagctgatgccaagttcaggggcaaaaaccgtcctcctcaaagttcccgaagatgcagagaaccccacagaaagtgagaagcctgataccagtgcagaatctgatacagaacagaatcctgaaaggaaggtggaagaggatggagctgaggaatccgaatttaagattcagattgttcccaggcagaggaagcagaggaagattgctgtcagtgctatccagagagagtacctcgacatctccttcaacattctggacaaactgggagaacagaaagatccagatccttctactaaaggactttcaactttggaaatgccacgagaatcttcatctgcccctacgttagatgcaggtgtgccggaaacaagtagccattcctcaatatcaactcagtataggcagatgaaaaggggatccctgggagttctgacaatgagccagttaatgaagcggcagctggagcatcagtctagcgccccccataacatcagcaactgggacactgaacagatacagcctgggaaacgccagtgtaacgtgccaacntgcctaaaccctgacctggagggacagccattgaggatgagaggtgccaccaaatccagcctgctatcagcaccaagcatagtcagtatgtttgtgcctgcacctgaagagttcactgacgagcagccgacggtgatgacggacaaatgccatgactgtggggccattcttgaagaatacgatgaagagacacttgggctagccatcgtggtcctctccacattcattcacttaagcccagacctggcagccccgctgctgctggatatcatgcagtctgtgggaagattggcatccagtactaccttttctaatcaagcagaaagcatgatggttcccggcaatgcggcgggggtggccaagcagttcctgcgctgcatcttccatcagttggcccccaacggcatcttcccgcagctgttccaaagcacgatcaaagatgggacttttttacggaccttagcctcgtctctgatggacttcaatgagctgagctccatcgcagctctcagtcagctcctagagggtctaaataacaaaaagaatttaccagcagggggtgctatgattcgctgtttggaaaacattgcaaccttcatggaagctttgcctatggattctcctagtagcctctggaccacaattagcaaccagtttcagacattttttgccaagctgccttgtgttttacctctgaagtgttctttagattccagtttaagaattatgatttgcctcttgaagatcccttctaccaatgctacaaggagtttgttggaaccattttcaaaactgctcagctttgtaattcagaatgccgtcttcactctggcctacctggtggagctgtgtggcttatgttaccgagctttcactaaggaacgagataaattctacttgtctcgtagtgttgttctagaacttctgcaggccctaaagctcaaatctcctttaccagatacaaaccttcttctgcttgttcagtttatttgtgcagatgctggaaccaaactagctgagtcaacaatcctgagcaagcagatgatagcctctgtacctggatgtgggactgcagcgatggagtgtgtgaggcagtacatcaacgaagtgcttggatttcatggcagacatgcacacgctgaccaaactgaagagccacatgaagacatgttcccagcctctgcatgaagatacctttgggggacatctcaaagtggggctggcccagattgcagccatggacatctcacggggcaaccacagagataacaaagctgtgatccgctatctgccttggctttatcatcccccctctgcaatgcagcaaggacctaaagaattcattgagtgtgtctcccatatccgactgttgtcctggctgctgctgggttccctcactcacaatgcagtgtgcccaaatgcctcctctccctgcctgcccattcctctggatgcaggctcccacgttgcagaccatcttattgttatcctgattggatttccagagcaatcaaagacctccgtgctgcacatgtgctccctcttccacgcgttcatctttgctcagctgtggacagtttattgcgagcaaagtgccgtcgctacaaatctccaaaatcagaatgaattcagcttcacggcgatactgacagcactagaattttggagtagggtgacacccagcatccttcagctaatggcccataacaaagtgatggtagaaatggtgtgtctccatgtgattagtttaatggaggcattgcaggaatgcaattcgaccatttttgtcaagctgatacctatgtggttgccaatgattcagtcaaatatcaagcacttatctgcgggactccagcttcgcctccaggctattcagaaccacgtgaaccaccacagcctaaggacgctgccgggctcgggccagagcagtgctggcctggcagccctccgaaagtggttgcagtgcactcagttcaaaatggcccaggtggagatcccagtcctcggaagcagcctctcaattttatcctctatgagtggactcctcggcgctcagtgtcaacactctggtttagcaataatgggtttaaaaacaaacaatttgatccaagcaggttggggaacatattggtactgtacattctctttctagtttagtaaaagatgtgcaaaggccagagagggccgaaaatgaagctttcttgctacacatatttctgatgactccttgggctatctgattaagtgtttccttacattattttttaaaaaccaaatcatttttctttaactaacttctattttttttaagaaaaaaaaatagactggtgggtactcacagaaaagttgtataagtccccctgttgctatttttgatgatagagaataaatagggtttttgaaacctttgtagtgttttttcttaaaatccactcttggcaatgcaataaaaaaaaccgtcaccataag

SEQ ID NO: 28224 - DNA, 4880 bp, Homo sapiens
  misc_feature (2761)..(2761): n is a, c, g, or t
agctggtctcctgcttgacaccataaagaggccagcattgcagggtctatgtctttgtcttgacttccagtttgatactgtggttaaagacagacccacaattttgagcaagcttttactcttgcactttcttaagcaggatattcctgctctgagctgggagttctttgtcaatagatttgagacgctttctttggaagcccagctacatttggattgtaacaaggaatttccttttcctacaaccatcactgctgtgaggaccaatgttgctaacctcagcgatgcagccttatggaagatcaagagagctcgctttgcaagaaaccgccagaagagtgtacgttccctgagggacagcgtgaaagggcctgtggaatccaagagggcgctctccctccctgagaccctgacctccaaaattcctatgaggttgaccaggcatgagcagtctgctccagctctcggtgggacacccgaacagacgccaggacaacaatctcctgagaatgacaacaccatcaaggacctgctcccagaagacgctgggatcgaccaccagacagttcaccagctgattacagtgctcatgaagttcatggccaaggatgaaagcagcgctgagtcagacatcagcagtgcaaaggccttcaacacggtcaagcgacacctgtacgtcttactcggctatgaccagcaggaaggttgcttcatgattgcacctcaaaaaatgcgcctgtcaacttgctttaatgcattcattgcaggaattgcccaagttatggactataacattaacttgggaaaacaccttctccccttagtggttcaggtgctcaaatactgctcttgtcctcaactccggcattatttccaacagccgcctcgttgctccctctggtccctaaagcctcacatccggcagatgtggttgaaggccttgcttgtcatcctttacaagtatccataccgagactgtgatatcagcaagatcctgctgcatctgattcacataacagtcaatacactcaatgcgcagtatcatagctgcaagccccatgccacggcaggacctttgtacagtgacaacagtaacataagcagatacagcgaaaaagaaaaagaagaagatagtgtttttgatgaatctgatattcatgatacacctactggaccctgcaataaagagtctcaaactttttttgcaagattgaaaagaataggcggcagcaaaatggtgaaatatcagccggttgagatgaatgttcagagaagtgaaatagaactggctgaatatagagagacgggtgcattacaagacagccttctccactgtgtgagagaagaaagcattccgaaaaaaaagctacgctctttcaaacaaaaatctcttgatatagggaatgcagactcgcttttgtttacattagacgaacatcgtaggaagtcgtgcatagatcggtgtgacatagagaagcctccgacccaagctgcgtatatcgcacaaagaccaaacgaccctggacgttctagacagaactctgctacgaggcctgacaatagtgaaatccccgagaacccagctatggaagggtttccagatgctcgaaggcctgtcataccagaggttaggttaaactgtatggagactttcgaggtgaaagttgactcgccggtaaagcctgctcctaaagaggatttagatctgatagatctatcctcagattcaacctcggggcctgaaaaacactctatactctcaacctccgacagcgactctcttgtatttgagcctcttccccctctcagaatagtcgagagtgacgaagaagaggagacgatgaaccaaggcgatgacggcccctccggtaaaaatgctgcctcttctccctccatccccagccatccctccgtcctcagcctgagcacagctccgcttgtacaagtaagtgtggaggattgttccaaagacttttcttctaaggactcaggaaataatcagtcagcagggaacactgactctgccctcatcactctggaagaccctatggacgccgaaggatcctcaaagccagaggagctgccagagttctcctgcggtagcccactgacgctgaagcaaaaacgagacctccttcagaagtcgtttgctctccccgagatgtcgctggatgatcaccctgacccgggcactgagggggagaagcctggggagctgatgccaagttcaggggcaaaaaccgtcctcctcaaagttcccgaagatgcagagaaccccacagaaagtgagaagcctgataccagtgcagaatctgatacagaacagaatcctgaaaggaaggtggaagaggatggagctgaggaatccgaatttaagattcagattgttcccaggcagaggaagcagaggaagattgctgtcagtgctatccagagagagtacctcgacatctccttcaacattctggacaaactgggagaacagaaagatccagatccttctactaaaggactttcaactttggaaatgccacgagaatcttcatctgcccctacgttagatgcaggtgtgccggaaacaagtagccattcctcaatatcaactcagtataggcagatgaaaaggggatccctgggagttctgacaatgagccagttaatgaagcggcagctggagcatcagtctagcgccccccataacatcagcaactgggacactgaacagatacagcctgggaaacgccagtgtaacgtgccaacntgcctaaaccctgacctggagggacagccattgaggatgagaggtgccaccaaatccagcctgctatcagcaccaagcatagtcagtatgtttgtgcctgcacctgaagagttcactgacgagcagccgacggtgatgacggacaaatgccatgactgtggggccattcttgaagaatacgatgaagagacacttgggctagccatcgtggtcctctccacattcattcacttaagcccagacctggcagccccgctgctgctggatatcatgcagtctgtgggaagattggcatccagtactaccttttctaatcaagcagaaagcatgatggttcccggcaatgcggcgggggtggccaagcagttcctgcgctgcatcttccatcagttggcccccaacggcatcttcccgcagctgttccaaagcacgatcaaagatgggacttttttacggaccttagcctcgtctctgatggacttcaatgagctgagctccatcgcagctctcagtcagctcctagagggtctaaataacaaaaagaatttaccagcagggggtgctatgattcgctgtttggaaaacattgcaaccttcatggaagctttgcctatggattctcctagtagcctctggaccacaattagcaaccagtttcagacattttttgccaagctgccttgtgttttacctctgaagtgttctttagattccagtttaagaattatgatttgcctcttgaagatcccttctaccaatgctacaaggagtttgttggaaccattttcaaaactgctcagctttgtaattcagaatgccgtcttcactctggcctacctggtggagctgtgtggcttatgttaccgagctttcactaaggaacgagataaattctacttgtctcgtagtgttgttctagaacttctgcaggccctaaagctcaaatctcctttaccagatacaaaccttcttctgcttgttcagtttatttgtgcagatgctggaaccaaactagctgagtcaacaatcctgagcaagcagatgatagcctctgtacctggatgtgggactgcagcgatggagtgtgtgaggcagtacatcaacgaagtgcttggatttcatggcagacatgcacacgctgaccaaactgaagagccacatgaagacatgttcccagcctctgcatgaagatacctttgggggacatctcaaagtggggctggcccagattgcagccatggacatctcacggggcaaccacagagataacaaagctgtgatccgctatctgccttggctttatcatcccccctctgcaatgcagcaaggacctaaagaattcattgagtgtgtctcccatatccgactgttgtcctggctgctgctgggttccctcactcacaatgcagtgtgcccaaatgcctcctctccctgcctgcccattcctctggatgcaggctcccacgttgcagaccatcttattgttatcctgattggatttccagagcaatcaaagacctccgtgctgcacatgtgctccctcttccacgcgttcatctttgctcagctgtggacagtttattgcgagcaaagtgccgtcgctacaaatctccaaaatcagaatgaattcagcttcacggcgatactgacagcactagaattttggagtagggtgacacccagcatccttcagctaatggcccataacaaagtggtgagttcacagacgagtttcccttctgagatggaatctcaaagtgtccacaccactcctaatcctcacactccctgttttcacagatctcagttgtaaggttatataaatggatcggggatatgttaccttataagctggatgttctgcttgcataagcattttgattaaaaataagcattttgattaaaaacaaaataatagttcaagagatctattgtacgccgtggtgactacagttaataacaatatattctatacttgaaaattgctacgaggagatttcaaatgttctcaccataaaaaataagtacgtaaggcaatgtacatgttaaatagcttgatttagccattccacaatgtatatctatctcaaaacttttatattgatatatgaatattaaa

SEQ ID NO: 28225 - DNA, 320 bp, Homo sapiens
agattgcagccatggacatctcacggggcaaccacagagataacaaagctgtgatccgctatctgccttggctttatcatcccccctctgcaatgcagcaagggtaagacccttactattccgggaatgagggtaaagaaggcaggagacacccctgagtttcctcgggctcagctagagttaaggagtacaccgaagatttatgacagtggaatatacttggttaggaagatggaaatcagatcccatctccttacgtacttgctgacccagaatgctctttgacatgctgccaaaaaataaacctgtcctcccacaaa

SEQ ID NO: 28226 - DNA, 172 bp, Homo sapiens
aatgtgggcacaagtgtccccccgaaacagaccagtggcagctgtaagataaaaccctcatgaggctaggcatggtggctcatgcctacaatttcaatattttgggaggccagcgcaggaggatcacttgagcccaggagtttgaggccagcctgcacaacatagcaagacc

SEQ ID NO: 28227 - DNA, 273 bp, Homo sapiens
tagaagccaaaccaaactgacaataatgcttgaaaaattaggaatggattatgatgggcggcctcactgtggtcttgatgactctaagaatatcgcccgaatagcagttcgaatgcttcaggatgggtgtgaactccgaatcaacgagaaaatgcatgcaggacagctaatgagtgtgtcctcttccttaccaatagagggcactccaccaccacaaatgccacattttagaaagtaacagttttgtgtgtggatcattccaattgaagttgc

SEQ ID NO: 28228 - DNA, 619 bp, Homo sapiens
ttcaactctttttaatccaacagttttaaaagcagcctaggcaagattaccagaacctctgccttttattttctgttcttctctctcgctcttgcccttgtctgactcagagtcagtgggcgaggagagtactattaaaggtaaagggcttatatggtacttgaaacactcactttcctgactaccaaatgtatagaattgagaagacttgggcattatttattctaaagatacagagaaactaaggtcatagtttcaatttgatttaaaaaggggtttaagcaattgtgtattagtaatttattactgagtaacaaattacctcaaaacttagtggcttaaaacaataaacatttgtcatctcacagtgtttgtgattaggactagagagcatcttatctgggtggttctggctcagggcctctcctgaggctcctgctatctgaaggcctgactgcggtggaggagctgcctcccaggaggctcacctacgtgcttggcaagttagtgctgtttgttgcccagaagcctcagctctttgctacatggacctttctccatgtgactgctttagtgtcttcaccttagagcacgtgatccaagagagaacaaggaggag

SEQ ID NO: 28229 - DNA, 1117 bp, Homo sapiens
aaagaatatacacagcaacattttttgtaaaagcaaaaagtctaggctgggcgtagactcatgcctgtaatcccagcactttgggaggctgaggcaggcggatcacgaagtcaggagttcgagaccagcctggccaacatagtgaaaccccatctctactaaaaatacaaaaattagtcgggcatggtggtgggcgcctttagtcccagctactcgggaggcggaggttgtggtgagccaagatcatgccactgcactccagcctgggcaacgagcgaaactccatccccccaaaaaaaaaaaaagaaaaaaagaaaacaaaaaaaggaaaaagtctagaaccaacccaaagacccagccagtgagaatgggtgaagtatgatataaccacactgtgtaatgttattcagcagtgaaaatctatgaaccacagtgacctacagtgtggagttctcttcttcatataatgctgagagaagacaatatatatcatgatgtactatgaataaagttcataaacaacaaaaacattcactattgtttaggcaatttataaaatttttaagctaattttaattacatattttactgccagaaaacctagtttttaaagacaaggaaattataaacccagagattcttatcgcaagggaagagaagggtacacggtcggatgagcccattcagcattctggctgccggggtggctgctagtcccagatgtcactaagtcattaccatttatttactttttaagcatgaaattaaactttaaaaaaataaatatttaaattcaggagcacaactcccgcttgaaaagaaagctgtggtgaatcatttaaaaccaagatttgtcccagatggactggtttcacaggtgactattatacattgaaatggcaagatgggacatgagacattttctgtcaaacccctgaggcctttgtcctgtcggcctgaaccactggaattaagtcccacagcgtcttctgggagccctggggtggtttcaagcccgccctgctgcttcacagacacagccaggcactgagccccaggcccactgccctgccccgactccaaggatatccagccctggtctctggcctttccaacc

SEQ ID NO: 28230 - DNA, 857 bp, Homo sapiens
agaggagatcccccagcttggttgccccccccaaaaaaaaaaaaagaaaaaaagaaaacaaaaaaaggaaaaagtctagaaccaacccaaagacccagccagtgagaatgggtgaagtatgatataaccacactgtgtaatgttattcagcagtgaaaatctatgaaccacagtgacctacagtgtggagttctcttcttcatataatgctgagagaagacaatatatatcatgatgtactatgaataaagttcataaacaacaaaaacattcactattgtttaggcaatttataaaatttttaagctaattttaattacatattttactgccagaaaacctagtttttaaagacaaggaaattataaacccagagattcttatcgcaagggaagagaagggtacacggtcggatgagcccattcagcattctggctgccggggtggctgctagtcccagatgtcactaagtcattaccatttatttactttttaagcatgaaattaaactttaaaaaaataaatatttaaattcaggagcacaactcccgcttgaaaagaaagctgtggtgaatcatttaaaaccaagatttgtcccagatggactggtttcacaggtgactattatacattgaaatggcaagatgggacatgagacattttctgtcaaacccctgaggcctttgtcctgtcggcctgaaccactggaattaagtcccacagcgtcttctgggagccctggggtggtttcaagcccgccctgctgcttcacagacacagccaggcactgagccccaggcccactgccctgccccgactccaaggatatccagccctggtctctggcctttccaacc

SEQ ID NO: 28231 - DNA, 1060 bp, Homo sapiens
aacaagtgaattcaactagatcccaggatacagggtcagtatatagaacctgttgtagcagtgaacactttgaaatgaaagtgttacattaatagcatcaaaaacatgataaatttttaaatgcgtaaaaggaactataaacataaatgtaaaagctaaaactataaactttttttttttttttgagacagagtctcacttccagcctgggcaacgagcgaaactccatccccccaaaaaaaaaaaaagaaaaaaagaaaacaaaaaaaggaaaaagtctagaaccaacccaaagacccagccagtgagaatgggtgaagtatgatataaccacactgtgtaatgttattcagcagtgaaaatctatgaaccacagtgacctacagtgtggagttctcttcttcatataatgctgagagaagacaatatatatcatgatgtactatgaataaagttcataaacaacaaaaacattcactattgtttaggcaatttataaaatttttaagctaattttaattacatattttactgccagaaaacctagtttttaaagacaaggaaattataaacccagagattcttatcgcaagggaagagaagggtacacggtcggatgagcccattcagcattctggctgccggggtggctgctagtcccagatgtcactaagtcattaccatttatttactttttaagcatgaaattaaactttaaaaaaataaatatttaaattcaggagcacaactcccgcttgaaaagaaagctgtggtgaatcatttaaaaccaagatttgtcccagatggactggtttcacaggtgactattatacattgaaatggcaagatgggacatgagacattttctgtcaaacccctgaggcctttgtcctgtcggcctgaaccactggaattaagtcccacagcgtcttctgggagccctggggtggtttcaagcccgccctgctgcttcacagacacagccaggcactgagccccaggcccactgccctgccccgactccaaggatatccagccctggtctctggcctttccaacc

SEQ ID NO: 28232 - DNA, 2215 bp, Homo sapiens
aacaagtgaattcaactagatcccaggatacagggtcagtatatagaacctgttgtagcagtgaacactttgaaatgaaagtgttacattaatagcatcaaaaacatgataaatttttaaatgcgtaaaaggaactataaacataaatgtaaaagctaaaactataaactttttttttttttttgagacagagtctcactcttgcccaggctggagtgcagtggcacaatctcggctcactgcaacctccgcctccctggttcaagcgattctcctgcctcagtctcccaagtagctgggattacaggcactcaccaccatacccagctaatttttgtattcctaatagagacggggtttcaccatgttggccaggctggtcttgaactcctgacctctggtgatccacccgccttgggctcccaaagtgctggattacaggcgcgagccaccatgcccgtccctaactataaacttctaaaagaaagaaatacaaaagcatatgagaaaatattcatgagagctggaatacaatggttttgtacttggaaaaatattatattggttctctatttttcatacactggaattaaatccaggtggattaaagacctaaatgtttctttaaaaaaaaactatacagggccgggcacatggctcatgcctataatcccagcactttgggaggccaagacaggagttttgtttgagcccagcctgtgcagcatagagagacccccaactctacaaaaattaactaaaattaaccaggcgtagtggcatgcacctgtagtcccagctactcaggaggctagggtgggaagatcacttgaaaccggagttcaaagctgcagtgaactgtgattgcgccgctgcattccagcttgggggacagggtgagaccctgtctcaaaaaaaaacaaccaaaaaaaactatataattttgtgtggaaaatataggtaaatatatttttgactttggggtagtgaaagactccttaagccacaaaaagaatttaaaaagaaatgatgaacatacttgaccatatgaaaattagaacctaaatccataaaccttaagaaagtgaaatctaaactacaaactgggagaagagataaatagtctcaagactacatgaagaactctgataaatcaatgagaaaacaacctaataggaaaatagaaaaaaaaacatgcataggcatttcatggaagaagagatacaaaaggccaacatagtgaaaccccatctctactaaaaatacaaaaattagtcgggcatggtggtgggcgcctttagtcccagctactcgggaggcggaggttgtggtgagccaagatcatgccactgcactccagcctgggcaacgagcgaaactccatccccccaaaaaaaaaaaaagaaaaaaagaaaacaaaaaaaggaaaaagtctagaaccaacccaaagacccagccagtgagaatgggtgaagtatgatataaccacactgtgtaatgttattcagcagtgaaaatctatgaaccacagtgacctacagtgtggagttctcttcttcatataatgctgagagaagacaatatatatcatgatgtactatgaataaagttcataaacaacaaaaacattcactattgtttaggcaatttataaaatttttaagctaattttaattacatattttactgccagaaaacctagtttttaaagacaaggaaattataaacccagagattcttatcgcaagggaagagaagggtacacggtcggatgagcccattcagcattctggctgccggggtggctgctagtcccagatgtcactaagtcattaccatttatttactttttaagcatgaaattaaactttaaaaaaataaatatttaaattcaggagcacaactcccgcttgaaaagaaagctgtggtgaatcatttaaaaccaagatttgtcccagatggactggtttcacaggtgactattatacattgaaatggcaagatgggacatgagacattttctgtcaaacccctgaggcctttgtcctgtcggcctgaaccactggaattaagtcccacagcgtcttctgggagccctggggtggtttcaagcccgccctgctgcttcacagacacagccaggcactgagccccaggcccactgccctgccccgactccaaggatatccagccctggtctctggcctttccaacc

SEQ ID NO: 28233 - DNA, 257 bp, Homo sapiens
ttaattattttgtgcccattaaccattgccacttcccaatcatttttattgattgattagttgattgattgagatgggagtcttgccgtgtggcacaggctggtcttgagctcctggcctcaagtgaccctcccacttcagcctcctgagtaactgggactgattacaggtgcaaaatactacgcccatctaattaaatttttttttttggagagacaaggtctcactaggttgcccagctggtcttgcactcctag

SEQ ID NO: 28234 - DNA, 942 bp, Homo sapiens
atggaggggaaaaatctgaccagcatctcagaatgtttcctcctggggttctctgagcagctggaggagcagaagcccctctttgggtccttcctgttcatgtacttggtcacggtggcaggcaacctcctcatcattctagtcatcattactgacactcaactccatacccccatgtacttctttctagccaacctctcccttgcagatgcctgctttgtgtccaccacagtccctaagatgctggcaaacatacagatccagagtcaggccatctcctactcagggtgtctactacagttgtattttttcatgttatttgtgatgctggaggcattcctcttggcggtcatggcctatgactgctacgtggccatatgccacccacttcattacattctgatcatgagccctgggctctgcatcttcctcgtgtctgcatcctggatcatgaatgccctccactcccttctacacacacttctgatgaacagcctgtccttctgcgcaaaccatgagatcccacacttcttctgtgacatcaatcccctcctgagtctgtcctgcacagaccccttcaccaatgagctggtgatcttcatcactgggggtctcacaggactcatttgtgtgctttgcctgattatctcttacacgaacgttttctcgaccatcctgaagatcccatcagctcaggggaagcggaaagccttttccacctgcagctctcatctctccgtggtctctctcttctttgggacttctttttgtgttgatttcagttctccctcaacccactcggcccagaaggacacagttgcatcagtgatgtacacagtggtaactccaatgttgaatccctttatctacagtttgaggaaccaagaaataaagtcttccctgagaaagttaatctgggttcggaaaattcattccccttag

SEQ ID NO: 28235 - DNA, 340 bp, Homo sapiens
tgtctgagtccagagcctttctgcagctcatgcagcatgagcacagctggaggaagtgctctttttctccctgcctttctcactccctctctccagttctaatcctgctgcctggaatgagatcatcatccctgctagcagtagcgctgtcctgggctgccttacagagggatgttggaatttaggctgcagttttgggaaatggatttttttttttttttgagatggagtcttgctgtgttgcccaggctggactggagttgcagtgagccgagattgcactactgcactccagcctgggtgacaaagtgagactccacctcaaaaaaaagccaaaaca

SEQ ID NO: 28236 - DNA, 838 bp, Homo sapiens
gttgattactgttgcatgatgtgattgttgttcctactactgctttttccaagaaatagtgtttgatactgtggatgatacagagataaataagatacagccttcattatagatttgaaaaacaagtctcttcattatgtatacatttgattcttttgctggttccataatgtgttcatttctagagaggcgcctttaatccttcatagctttatagtttccatgaattgttcatctttgtcttgtacagagtagaattaataaaatgtttattttttctttttcttccttcttccccttatttctcttttttccctgccatctctccattttttattgttgcaaggaaatatttacatgttaaacagttccttaaaaagccctctggggttaaatatttttttcctcaaaaactataatcatctaattctcaaatgaaaatgcttaagtgaacaaaatttaactggaatttgatcacattttaacataaaagtcaaagattaaaattggaatgagaagggacacataaatgaatgctagcaaacaaaacaaacatttggtcattttaaaagttgtgtattttggataggtgccatggcttatgccataattccagcacttttgaaggctgaggtgggcggatcacctgaggtcaggagtttgagaccaacctggccaacatggtgaaaccccatttctactaaaaatacaaaaattagccaggcgtggtggccggcgcctgtaatcccagttacttgtcaggctgaggcaggagaattgcttgaacctggaaggcagaggttgcagtgagccgagattgtgccattgcactgcaaac

SEQ ID NO: 28237 - DNA, 401 bp, Homo sapiens
gcctactactactaaattaaaaaccggtcgaaccatccatatatattaaatgagagtaagtgaatacccatataacaatagaaagtattaattaaattatttttacatataaaagctcagtgtcaaattgcattaattctgaatttcactgacatttaataaaaatgtaatataattttttcacataaactttcatcaatggcagaggtaacatttttctattaatttactagctaggggtactgtgataccaaagccagacaaaagaatcacaagtaaagaagactatggactaaaattccatataaatatagaattcctgatgaagttattagaaatgttagcacacggctgggcatggtggctcatgactgtaatccagcactttgggaggctgaggc

SEQ ID NO: 28238 - DNA, 202 bp, Homo sapiens
gttaatattataataatctcttatattagtagagtatagttggcaaaacactttctctcacatacattatatcatttgatgcttacaataaccattcaaggtagatggaaggtattattcagtttatttcagtggaaagtcctaccactatccaaagtctgaatttcttttttaacaaatacagaagtatacaaaaagaaaa

SEQ ID NO: 28239 - DNA, 119 bp, Homo sapiens
aatgctttatatgagttagcccatttaatctccttccttagcatatcaattatactatttttcatcagaactactactattccgattttatagaaaaggaaactgaggcttattaaaac

SEQ ID NO: 28240 - DNA, 1700 bp, Homo sapiens
  misc_feature (1055)..(1055): n is a, c, g, or t
  misc_feature (1084)..(1084): n is a, c, g, or t
  misc_feature (1115)..(1115): n is a, c, g, or t
  misc_feature (1165)..(1165): n is a, c, g, or t
  misc_feature (1187)..(1187): n is a, c, g, or t
  misc_feature (1235)..(1235): n is a, c, g, or t
  misc_feature (1477)..(1477): n is a, c, g, or t
tatacttcaattctttaagcatagttctccttagttttttaacctatttgcaatagttgctttgaagtctttatcttctagctccaacatctggggtcacttggggatattttctatttattgttttgtggggttttttttgtgttttttttttttaatccccctgagctgtggtgttctatcttgtttctttgtatgtgtacacatttcttttgtaaataacatatatatattttagacagagtctcactctgttgcccatgctagtatgtagtggtgcgatcttgattcactatagcctcgacatcctgaactcaagcaatcccctcacctcagaccccagactagctgggactacagctccgcactaccatgctcacctaatttttgtattttttgtagagatgggatttcaccatgttgcccaggctggtctcaatccacttgcctcagcctcccaaagtcctgggattacaggaatgagccactgcagctggccaaaacatacatttttgttactttgttgtttctgagaattcccatcctctagtctctacccagcaagaagtgtttctgtaccttcatttatttacttccctgtggttgctaatgtctctgctgtgtttaaagaaagctaaaatataatttttaagtgtagcatcctagctttgccctagctttgtccatgtatctttggtttgcctctaatctcaaatataagttatgttcaatcccctcaaggcagtaaggcttctgtcgtctcctgatgaatctatgcttgggtaagtgagattgcccaaattaattcaaagttaaggctgtttaaaaatctgctacaattttctcactgatgtgttgtttcacttatcctttccatatgtgtgtgtctttagcatggccagggttgcatataacttactcctagttaagttaatatatgtaattcctgttgtttccagccacagtgcagtagtgcttttaagatgggcatctgggctgggcgcagtggctcatgcctgtaatcctagcactttgggaggccgaggcgggcggancgagaccatcctggctaacacggtgaaancccatctctactaaaaatacaaaagaaaaanaaattagctgggtgtggtggcgggagcctgtagtcccagctactcgggangctgaaacaggagaatggcatnaacccaggaggcagagcttgcagtgagctgagatcgcaccactgcacnccagcctgggtgacagagtgagactccatctcaaaaaaaaaaaaaaaaaaaaaaagatgggcatctgatccaacacagacaaatgccatgcaagcctaaaagttttttatgttaaaacttagaagttctcctttctgctggggtttatatcaggagagttacatttccttcatgtacagagaataaactcaatgtagaggaatagggagaatttggagaaggacattgatcatatttttgtnttttgttttcagatgaagtctcactctgttgcccaggctggagtgcagtggtgtgatcttggataactgcaacctccgcctcctgggttcaaacaattcttgtgcctcaactactcgggaagctgaaacaggagaatggcataaacccaggaggcagagcttgcagtgagctgagatcgcaccactgcaccccagcctgggtgacagagtgagactccatctc

SEQ ID NO: 28241 - DNA, 1419 bp, Homo sapiens
  misc_feature (1196)..(1196): n is a, c, g, or t
tatacttcaattctttaagcatagttctccttagttttttaacctatttgcaatagttgctttgaagtctttatcttctagctccaacatctggggtcacttggggatattttctatttattgttttgtggggttttttttgtgttttttttttttaatccccctgagctgtggtgttctatcttgtttctttgtatgtgtacacatttcttttgtaaataacatatatatattttagacagagtctcactctgttgcccatgctagtatgtagtggtgcgatcttgattcactatagcctcgacatcctgaactcaagcaatcccctcacctcagaccccagactagctgggactacagctccgcactaccatgctcacctaatttttgtattttttgtagagatgggatttcaccatgttgcccaggctggtctcaatccacttgcctcagcctcccaaagtcctgggattacaggaatgagccactgcagctggccaaaacatacatttttgttactttgttgtttctgagaattcccatcctctagtctctacccagcaagaagtgtttctgtaccttcatttatttacttccctgtggttgctaatgtctctgctgtgtttaaagaaagctaaaatataatttttaagtgtagcatcctagctttgccctagctttgtccatgtatctttggtttgcctctaatctcaaatataagttatgttcaatcccctcaaggcagtaaggcttctgtcgtctcctgatgaatctatgcttgggtaagtgagattgcccaaattaattcaaagttaaggctgtttaaaaatctgctacaattttctcactgatgtgttgtttcacttatcctttccatatgtgtgtgtctttagcatggccagggttgcatataacttactcctagttaagttaatatatgtaattcctgttgtttccacctgggtgacagagtgagactccatctcaaaaaaaaaaaaaaaaaaaaaaagatgggcatctgatccaacacagacaaatgccatgcaagcctaaaagttttttatgttaaaacttagaagttctcctttctgctggggtttatatcaggagagttacatttccttcatgtacagagaataaactcaatgtagaggaatagggagaatttggagaaggacattgatcatatttttgtnttttgttttcagatgaagtctcactctgttgcccaggctggagtgcagtggtgtgatcttggataactgcaacctccgcctcctgggttcaaacaattcttgtgcctcaactactcgggaagctgaaacaggagaatggcataaacccaggaggcagagcttgcagtgagctgagatcgcaccactgcaccccagcctgggtgacagagtgagactccatctc

SEQ ID NO: 28242 - DNA, 933 bp, Homo sapiens
tcctcacaccaattcagtgatgtggatagtgttcttcattttgcagatgagaaaactgagacacagagaggtcaaagtattttgcacaacatcacatagctaggaagtgtctgaaataggatttgaatgcagataggcagatccagagttcatgcttttaattaccactcccaaccccgcctcccaaaaaaactgaatgaataagagtctcttggctaaatgccttttcaagtagtgctttgttgtgtctctgctgaaagatcttgtcttccatattgccagtagcaagatgctgttttgataaggtgggtaggtccaatctgtcttgtcttccttacaaaattattgtttgtatatctatgttcagtctgagtgttaataatttctttctgcaaatgataaccctcttgaacagccagaacttgagctagacctcagggtagattcctagcccatcgattagggcctgtgtctatggaggaggcacagtacacagtgggagaccactgtggagttgatgcagagatcctagtgctcccttcagcctgaagagaaagtgtgaacgctttcccacggggaaacagggacctcaccaagaagtactccccaagagaaaaaagaaaaatgtcagtgacaaaagaagaaagtcgtgggagcctgtggggcccctgagggtagatcaggaggaagtgtgagtgcaggtgcccctttgggctcaagtgagagtgacccatagagacaatactcagttttgctctcccattcgccatccagtgcagattatgcaatttgtcttcccacaccctcttcctcaacactgcttaccgcaaatctctaactctgctgttaaatcctttcctctctcctcaaaaaccccatgtcttttatgccacgcctcagcttgcggtggtgtaatgaatacttttagtccag

SEQ ID NO: 28243 - DNA, 486 bp, Homo sapiens
ggttattttctgtaactggctcctaggagtcacatattcagttattttaggttttcttcattaaaaatatggtagtacactaagatacctgtaaattagttttataacgctaatattcagagtgatttgtgaataattttaaaaattgctagtttttctataaacattatagaagtgacatgctctccataaagaaataaaaattcacaattccaccacaccaattgatttttcattatacatactcttttgcagtctttattcacttatatataatattctatttttataatcacgacaattttgtttgcttcctttgtcagttaacattatatgttgacataatctttaaatcttgctaacaaacttcaatcaaaataatttcagtaatattctgaacttttgaaaatagatctcactttaaaaatcaggagtgaacaaatagcattttgggtctctctaagatacttaatattacctattaga

SEQ ID NO: 28244 - DNA, 612 bp, Homo sapiens
aatgcggtatgtcatgtttattgatttgtttatgatgaaccattcttatattcctgggataaatcccacttgttcatggtgaattatcttttaaatgtgctgttaaattcagttttatagtattttgttcagggtttttctgtctgttcttcagggatattggcctatagttttccttttttgtctatttttggtatcagtgtaatgctggccttgtagaataagttaggaaaaattccttcctcttcaattttttggaatactttgagaagaattgctattagttcttctgtaactgttggtagaattcagcagtgatgccatcaggtcctgggcctttctttgataggagactttttattactgattcaagtctcctttctcattactggcctgttcaggttttctatttattcataattcagtcctggtaggtagtgtggtagaggaattcatttcttctaggtttttcaatttattggcatataattgttctttgtatttctgtggtatcaattgtaatgtctccttttttatttctgattttatttatttgagtcgactgtcttttttacctagtctagctaaaggtttgttgattttgtttctttc

SEQ ID NO: 28245 - DNA, 3247 bp, Homo sapiens
ccattttttaaagcccttttggtaaaaaccaacaggttgtggccgcagacctcagatggacccggcccatccctggggacgtgctggcgtggcaggtccagagagctgcaccctgcacggggcaccgcaccgcttccctccgcgcactcttctgcctggttttcggaggccaggctgctgggaggcttccgtgttcctgtcagtccttccttcaagaagccggggaactcaggcagactcatctccgcagagcataccagccgtgggggaccgttcgacttgatgatgtgtgcacacttcaggtggtggggacttgagctttaaaaaaacctccacagccgaatcttctcctccgagccactccacgtcacgtccagctgggcctggccagtctgtggttatccatgtggggatgagataacaccacatcctgcagctgtgaagggggatggacaagggacgacggccgacggagagcatcagcagccgacacatagttcgggtcggggccttgggtggtcctgcatggcccgggactcatctcacggaccctccgttctgcattaagccccaggttctcttctggctttgaaagggcccgagtgctcccagtgtagcttcgtcacatcgtcacgagcccctgtggtcatgggcgacctcacacctccctccctgagttctgctctgacataaggaagtcctcggtggctggtgcagcgcggctgtgctgtgctggggaggcagccgttccttcgggggtccttgggcctgcagtcccctcatactcacccttcacccaacatattttccggtgctgatatgtttccagactccagcgcaacctggggtgctctccagacccgtgcaggggccgcctggggtacacggaaggaagttgagtcctagtgcaaaatgcaggcggacgttgccagagagtgcgcagcaaatgaccttcattgccagttccaccctactcctctcattttttatactaagcaataactttccaaagcaagaagttcaggatggagagagtcccctcctgtgtaggcatggggtggatgcggtgcccacctgggctatgtggggagcaccactgtctcgggatgcgcgaattttttttttttttttaattaacagggcattagaagatgattttgccaaaattgtcatgactctgaattcttgctgtggggacttcctgagttttctcagtttttacatctaagattagtcttggctgaagagaaatgagacgtgattatactactttttcaattgcaggtttaaggagttcagatttaatgaccaaagtcatacagatcatggaatctgtcgtcgtcttatacagtgtcagcctcgagtacatttattaaccttttggggctgtcagttttccactaggattaagattttggccgggcgcggtggctcacgcctgcaatcccaacacattggggggtcgaggcggacggatcactttgagcccaggagttcaagaccagcctgggcaacatggcgaaacctcgtctctactaaaaatacaaaatatatatatatatatatactagctggggcacatagtggtgtgcacctgtagtcccagctgcttgggaggctgaggtgggaggatggctagagcccaggagatgggtgttgcagtgagctgagaccatgccactgtactctagcctgggtaacagccagaccctgtctcaaaaaaaaaaacaatttttttcataacataattcccatttttatttattttgagtcactcataattaattgccaaaaaagcattttatacattgagttggggggtagtggatcttagtgtggtgttgcatggaggggcgagattttatatttataatcaacacgtgggttaacatgtttttttgaaatccaagcaatacacaggaaatttaagtagaataaaaattgcagcccatttttgaaatgtcagcatgtgctgtgttcagttcaggtttttgttgtttgttttgttattttttaactaataagttggttatcagtggtgggttttcaaaatgtacttgttctaataagttgtacaatgaactaaatcagtggcattctctagataatgtgggggaaggttagaatattttctggccttctatggggtagcaacccagaatcaatctgaattagtcctgttttggtggagtttgtacattttaaatcctataacaaaaataatctagttttcatttccttactagctagatgcgaatttgtctttttgaatgaccctgtcaataagccagaaagggcaacccagaaaaagtgctccccacatccttctgagacttggcctgtgtgtgtggacgagaagccattcaccgtaagggtgcagaaagctcgaccaagccgaattgcaaacaacgttcgttctatttttaaatgtacaggttcgatcgtttctatagaaatgggtttatctaagaaaagtcttggtttgtcttgctgctgtaaaaggcctttccaaacccctccttttattcctgtttcccgaaataaggtatttgtagagttaaggacctactgcatgcctgtccccagggccccggtggaaggaaggcagcgcctgctcttccttgactcagcccatcatctgaaaattcagaagtgaaccaagggttagacgccagaggttgggcttctgttagagtggcttcaaaacatgagccttatgggaagtagccttaaaaaaagaatgggtatacgcagtgacttccgatggaaatctccaaaacaatattcctaagtagcaatggggttggctcaagtctttattaacaaagaacattctctttcatctataaagaaattcttaaagatgcattgacagtgttgaattaccaacagcctgtgaagatcagtttgaccggtgtggacacgtgctggttaagcactcaggcctacgtgggccgagcgggatcttgatcatggggctggtgtatggatccaccgtcggattccgtctgcagaggaggacgtagggggccgtcacacccaccaggcctccctgctgtgctttaacacaggcagaagaggttcatggcaatataatagtcaatgaactttcagtttaaattgtgtacatttttaaattgtaagatttttactgtatattgatgcatagtgtgattcaataaattgcttgtaatttaaaaactatttaatattcaaaataaatatagttatatatttataaactctg

SEQ ID NO: 28246 - DNA, 2135 bp, Homo sapiens
aattgtgggagctacaattcaagatgagatttggatgggacacagccaaaccatatcaataggtattattttatcccccattttataaatgaggaaacggaggcttagttgagtgagctgaccaatatcacccagccagtatgtgataaaactgattctgacccacacagtttgattctagagcctgttctgactactgtgctaaggtgtgtataatgaacatggtaattctaaccagctttttaaaaatatgtagcgcttgtcatgagaggtactggggaaaagaatgtgcagtagagtgcaaatacattacaattactggaaaattggtggaaaatgctttttggggttacaattatatcatttttaagtgttgatgctttgtagtactacaaagctaaattgtgcaaacaaaacatatttaacagagtaattgggaggataaagcaataataaattcaaatatatttttctccaaactgccaaagggaaagtagaattgtggagggaaatgaaatatccatgtaccaggccaggcagatggtcagttaggatgacaatagtaagttcatctacagcataaaatgtgaaatgctttcatcctcattgcccatttccaactaccattctgtttctcctctattgttcatggtttttcaaacatatctttgatttttcaacccccctttttcattaatctgttcttaaaacttctttttactggctttcatacttagcattccagtgaaatgttcttagactcaccagtggacaaataataaggcctttttttattattatttcttgtcttttttgatctaatttatattttatattgttgaattctccctcctttggcttgtgggatcctttttctctaatatctgtctttctttttttagttgatctttccacccactcccctttctcctcttctccactgagaataatctccctgtcttttattcacttcattttctatactcctatttatccattttgattgtttatacctactatttgtattcgaatgacttcatttttcccaccctgtgggtcagtttgtgacttttggaattttccacaggtacctgtacaacttgatatttgaaaacaggattcatcaccatatatccccagcccccgttttctttttaaacaggcctcattgcgtaattcctttgccctgaaaagtgtcaccacctttatatttttaccccagccttggagttatctttttctgctctccattctccatgtccaaaaacttgctgtcagtccagtttttaatcagttttctccttgaggcttgatctcccatttctctcatcccattatagcttttcatgtagatctgaggcccaggttactgtaattcttttttttccaatttccttgctcccaggatccccatcttgtataaagtttctaaggtgctcctcctcaaactccatttttacaatatccgtattgtaaaattttcattttcagtaacacccagtagataatttttcaaagacgatcctcctcaaacacccatttttacaatatctctattgtaaaatttcattttcactaagtaacacccagtagataattcctatggagcagtggtgttccaaattctccattacctctatgcctaatattcatcagccttcattactctctagcatattcaccttgattcaacagattcaaacttcctacagccttctactgatgtcttacaagctcttgcctctgtgcctttctcatgctattctttttgcttagattgctctttggtcccagctcatgttcatcactcccttcaaagcctttcttcctttatatcttctgactgagctctccctgattgacatcacctcatgcgatgacctccctcattctgtgctgcctcagcacttatcttttgagtttgtactgtggtccatgtacttactaatatgttgctttgtaattattttctagcactctgtgttacagtttcatatttgtatttatttccaaaattaaattgtaagctccttgagggcaggaataataacttttacatttgtatctctgcacccccgagtgcctagtatagtgctgagcacatagtaggcgtttaataaatgcttgttgaagta

SEQ ID NO: 28247 - DNA, 2080 bp, Homo sapiens
aattgtgggagctacaattcaagatgagatttggatgggacacagccaaaccatatcaataggtattattttatcccccattttataaatgaggaaacggaggcttagttgagtgagctgaccaatatcacccagccagtatgtgataaaactgattctgacccacacagtttgattctagagcctgttctgactactgtgctaaggtgtgtataatgaacatggtaattctaaccagctttttaaaaatatgtagcgcttgtcatgagaggtactggggaaaagaatgtgcagtagagtgcaaatacattacaattactggaaaattggtggaaaatgctttttggggttacaattatatcatttttaagtgttgatgctttgtagtactacaaagctaaattgtgcaaacaaaacatatttaacagagtaattgggaggataaagcaataataaattcaaatatatttttctccaaactgccaaagggaaagtagaattgtggagggaaatgaaatatccatgtaccaggccaggcagatggtcagttaggatgacaatagtaagttcatctacagcataaaatgtgaaatgctttcatcctcattgcccatttccaactaccattctgtttctcctctattgttcatggtttttcaaacatatctttgatttttcaacccccctttttcattaatctgttcttaaaacttctttttactggctttcatacttagcattccagtgaaatgttcttagactcaccagtggacaaataataaggcctttttttattattatttcttgtcttttttgatctaatttatattttatattgttgaattctccctcctttggcttgtgggatcctttttctctaatatctgtctttctttttttagttgatctttccacccactcccctttctcctcttctccactgagaataatctccctgtcttttattcacttcattttctatactcctatttatccattttgattgtttatacctactatttgtattcgaatgacttcatttttcccaccctgtgggtcagtttgtgacttttggaattttccacaggtacctgtacaacttgatatttgaaaacaggattcatcaccatatatccccagcccccgttttctttttaaacaggcctcattgcgtaattcctttgccctgaaaagtgtcaccacctttatatttttaccccagccttggagttatctttttctgctctccattctccatgtccaaaaacttgctgtcagtccagtttttaatcagttttctccttgaggcttgatctcccatttctctcatcccattatagcttttcatgtagatctgaggcccaggttactgtaattcttttttttccaatttccttgctcccaggatccccatcttgtataaagtttctaaggtgctcctcctcaaactccatttttacaatatccgtattgtaaaatacccatttttacaatatctctattgtaaaatttcattttcactaagtaacacccagtagataattcctatggagcagtggtgttccaaattctccattacctctatgcctaatattcatcagccttcattactctctagcatattcaccttgattcaacagattcaaacttcctacagccttctactgatgtcttacaagctcttgcctctgtgcctttctcatgctattctttttgcttagattgctctttggtcccagctcatgttcatcactcccttcaaagcctttcttcctttatatcttctgactgagctctccctgattgacatcacctcatgcgatgacctccctcattctgtgctgcctcagcacttatcttttgagtttgtactgtggtccatgtacttactaatatgttgctttgtaattattttctagcactctgtgttacagtttcatatttgtatttatttccaaaattaaattgtaagctccttgagggcaggaataataacttttacatttgtatctctgcacccccgagtgcctagtatagtgctgagcacatagtaggcgtttaataaatgcttgttgaagta

SEQ ID NO: 28248 - DNA, 1035 bp, Homo sapiens
agtatttccaggaggctgtgagggggaggtccaacgcagtccagctgacaaggatggaatacgccatgaagtcccttagccttctctaccccaagtccctctccaggtccgggacactctgatgctggcagacaagcccttcttcctggtgctggaggaagatggcacaactgtagagacagaagagtacttccaagccctggcaggggatacagtgttcatggtcctccagaaggggcagaaatggcagcccccatcagaacaggggacaaggcacccactgtccctctcccataagcctgccaagaagattgatgtggcccgtgtaacgtttgatctgtacaagctgaacccacaggacttcattggctgcctgaacgtgaaggcgactttttatgatacatactccctttcctatgatctgcactgctgtggggccaagcgcatcatgaaggaagctttccgctgggccctcttcagcatgcaggccacaggccacgtactgcttggcacctcctgttacctgcagcagctcctcgatgctacggaggaagggcagccccccaagggcaaggcctcatcccttatcccgacctgtctgaagatactgcagtgaaagcccaagtccttggaagctttccccagtgaaggactgactgggggcctcacgcttaactggtagtggccacaagcctggcagctgtagagccgcgaacctccccacacctccctcaccgcgcaggaccctgagtgaggaggaggagctggaaacctggggtgggttggccaaaggagaacctcaagctcctggcctgatccagctccttcctgcccaaggcagcttagcccatccagactggtcctgaagtctgtccctccattggcatgaagtctgccccttagcaatccggcctcgcaggctgtactttcatggtgctctctaccttctggcccccatcccggaacattcctgagtgaattcgcaagcgcactagcatgtgatattagggagtttgcaataaattattgaggctg

SEQ ID NO: 28249 - DNA, 222 bp, Homo sapiens
atggaacagtgccctcaagagttgggaaatgattttgaacttagaattctatacccagccaaactatctcaagtatgagagcaaaatagaatgatgtgcaaggactcaagattttactcccagccaccatgctagtgggagttactagaagataaactctagcaaaggaagggaggaaacatctggcatgatatatttgatatgtgaatacctgaatatggc

SEQ ID NO: 28250 - DNA, 1047 bp, Homo sapiens
  misc_feature (125)..(125): n is a, c, g, or t
tgaattcaccattttgtccagggtgtctcaactcttcatctaatgaactgccaccttgcctcccagagtgctgggattgcagccatgagccactgcacccagcccaaagtaaatgcttttaaaanaaatatgtaatataatataaaatttttgaaaagcaaattatgatataattcaagtatcaaattacttcatgctgtttcattgttcctattcacatgtgaaagcatgtgatcaattattgctgcatcacatatagactcattaggtggaaattatggcctcttctgtaaaaaagtaaggacattaaaatgtaagatgcttgatgaaaatctaagtggagaggctctttgtggttaacttattgagtgatgtatgaggtcgatgttcagagtaatatgcctctgtattacagtgatagaaaatattttttagttaaaagtgaatttataataaaattgtaaatcattttagtgattgagcttttatgttataaaatgcagtatatttcaaaatttttaaattatatgtaaatttgattttatttgttaccatgttaagactattgtgcatttaatgaagcattattatgctatcaactttaacctatcccacgttactcaagggtgtagctaaatgaaggtagcagtatgctatttagtaacatagtggaatagcatctctagtaatctcttttgccagtagctttaactggcagataagttaatattgttcccataggttaaatatttatcctttttttgatatttaaatttttttcttatttttttgtgggtacataatatgtgtatatatttatgcaaatctggcatattttgatacaggcatacaatatgtaataattacatcaattacatcagggtaaattatgtagccattacttgtaacatttatcttttacaaacaactcaattatgcacttttagttattttaaagtgtacaattaaattgctattgactgcatggttatctttgtggtataaaaatttatatataagtataaataaactcatttctgagtctta

SEQ ID NO: 28251 - DNA, 1678 bp, Homo sapiens
ttttactttgtgtaactgattaattgttcatttgggtagtgatattatgactatggctaaatttgcattgtcttgcctaatagacctgagcactgatgagcactgtcttccctttagatatcatagaatacagtcatggttacttggtttccaatgtgtagccttgtttggggcttgctttccaaccaggggagtaagaaggcacaggcaagagtgccagggcttgctgtcatagactgagggctctgccaagacagggattgactctggctttggattatctcctaagctttggaggggaaaggggagagaagaggactacagaaggtctagtagttgggaaatgagggggcagcccccttgtgccactgccttgagagtttcaaacctgtggcccccgcaaaaggccaataagcactcttgtgtaagggaaagggccattcaggtgggtgctgggaaagatagctaaatttacccgcctctctattcttgggttttttcctctgtgcctgcagtactttgttttcttctcattgtgaatgacctggacttatttccttgaggtccagcctgacttgggctcagggctttcatcttcccttcacgggatctgggaaagggcatgagatctggagccagacaaacctagatccagtcccagctccaccaaatattagttgaatggcttcagacaagtcttttaacctctctattcctgaatttccccatctccaaaatgggatggtgatgattaaggtgaaagaaagatgcctggtttagcagcaagaacatagactttgggttcatagacctggatttaaagtctggccttgaggcaccgtggctcacgcctgtaatcccagcactttgggaagctgaggcacgcggatcacctgaggtcaggagtttgagaccagcctgaccagcatagcgaaaccccgtctctactaaaaatgaaaaaaaaaaaaaagccaggcgcggtggctcctgcctgtaatcccagccctttgggaggctgaggtgggtggatcatgaggtcaggagttcgagaccagcctggccaacatagtgaaaccctgtctctactaaaaaatacaaaaaaaaaaaaaatagctgggcgtggtggcaggcgccgtaatcccagctccttgggaggctgaggcaggagaattgcttgaacccaggaggcggaggttgtagtgaacccagatcgccccattgcactccagtctgggcaacagtgtgagattccgtctcaaaaagaaaaaaaaaaaagcaaaaaaaattagctgggcatggtggcacatgcctgtagtcccagctacttgggaggctgaggcaggagaatagcttgaacccaggaggtggaggttgcagtgagccaagatcatgccactgcactccagcctgggcgacagagcgagactccatcttaaaaaaaaaaaagtctggggctgggcgcggtggctcatgcctgtagtcccagcattttgggaggccgaggcgggtggatcacaaggtcaagagatcgagaccatcttggccagtggcgcgtgcctgtagtcccagctactcgggaggctgaggcaggagaatcgcttgaacccgcgaggtagaggttgcggtgagctgagatgctacagcactccagcccggcagcagagcgagactccatctc

SEQ ID NO: 28252 - DNA, 375 bp, Homo sapiens
gtcatacacagagaaaagtaatttataaattatgtgccccccatttgctgcaactctcagtggtgagaagaatgattcagtgcagctataggagactacttccattggcatgccacctgcctaacatacacaattttgttaagatatacaataaaattattatgctaatagcaaatattttatgtagctcactatgttccacatactcttgtaagtgcttcatgttagtccccagtaaacacctggttgggggaggtggctcatgcaagtaatcctagcattttggaaggctgaggcaggaggatctcttgagcccaggagttttagatcagccacagcaatataatgagaacctgtctttaaaaaataaataaa

SEQ ID NO: 28253 - DNA, 409 bp, Homo sapiens
caacagcatctcccctccccaatctcttccctctgtgacctagtagtccctcactgggaggtggcatctatctcttcccacatttgatctggggcggttctgtaactacttcaaccaaaactatgtggcacagagtggaaaacaggcggttcctcaaaaagttagacacagaatcaccatatgacccagcaattccacccctaggtacataccccaaagactgagagcaaggactgaaacagatacttatctgctgctgttcgttgcagcactacttattttttgtttgtttgttttttctttttgagacagagtttctccctattgcccaggctggagtgcagtggcgcaatcttggctcacttcaacctccacctccttggttcaagtgattcttgtgcctcagcct

SEQ ID NO: 28254 - DNA, 535 bp, Homo sapiens
ggcggaaggatcatttgaggtcgggagtttgagaccagcctgaccaacatggagagaaaccgtatctctactaaaaataaaagattaactgggcattgtggtgcatgcctgtaatcccagctaactcggaaggctgaggcagaagaattgcttgaacctgggaggcggaggttgtggtgagccgagatcaggccattgcactccagcctgggcagcaagagcgaaaatccatcacacacacacacaaaatattatccccctggttcctggtcctttgttttgtgtgctaggtgaagattaagtaaatacataagtagctaggaggtgtgcttatttttggatgccacttccttagggaatacgattgggaacagttttattttggctgtgacttagattgttacattcctaaagaaacagtacattttctttactggttggagtgccagggctcacacctgtagtccagcacttgaggctgaggggagaggttctcttgagatcttgaggctaggagtttgagatcaggctgggc

SEQ ID NO: 28255 - DNA, 329 bp, Homo sapiens
cagatatgtttgcctccttgccttcagttcatttcaagaatgagaaaagcagccaggcatggtggctcacgcctgtaatcccagtgctttggaagactgagacaggtgatcacttgaggccagcagttgaagaccagtctgggcaacaaagcaaggcccccatctctacaacaaatttaaaaactagccaggtgtggtggcatgcacctgtataccctgctacttgggaggctgagagaggaggaccacttaagcccaggtgtttgaggctacagtgagctatgatccactgtgctgcagcctgggtgacagagcaagacccagactct

SEQ ID NO: 28256 - DNA, 455 bp, Homo sapiens
taaaatgcccataaggggtttatttatttatttattttgagatggagtcttgctctgtcccccaggctgcgtgcagtggtgggattttggctcactgcaacacctgcctcctgggtttaagcaattctcctgcctcagtctgccaagtagctgggattacaggcacacgccactaggcctgggtaatttttgtatttttagtagagatggggtttcaccatgttggccaggctggtctggaactcttgacctcaggtgatctgcccgcctcagcccccaaagtgctgggattacaggcgtgagccactgcacccagtccacaaggggtttagaatagattgagtgctcaatagtggtgtttcaaatcaaactcatcatctccatttcacaagggaggaaagtgaggcccagaggggcttcgggactcaaagcctgggtgagctgactctggagcc

SEQ ID NO: 28257 - DNA, 263 bp, Homo sapiens
ggtgtctatcctggaaacataaaggagtcatcacacactttttttttggaacactgctatagggtaacctgggataccatattgcaataccaacctacctaggattgcaattctgattgccccagggagccgtataatttcttatgccctatgcatgtgcaggcatgcacacacacacaaatcaaaggtagaaacagccacaaaaggaatgatttaaggtagcctactctgctaaagacagcaaggtaactttctggttatag

SEQ ID NO: 28258 - DNA, 101 bp, Homo sapiens
agctgaggtggctatactaatgtcagataaaatgagtcttaagtaaaaaattgttacaagagacaaacaaggacattacatgttgataaatgtgttaattt

SEQ ID NO: 28259 - DNA, 448 bp, Homo sapiens
tttcttattttcaaaagggtgcttaaaatggtaggattgaattgccagaactcaactttaaaattgaatttaaagggaccacaataagggttataaacagtgataaacctccacagtacataaaaataagaaagcatcactcttaatggatgatctaaaagtggcatgaagcagtaggcattggtaagtacattagcatagagagagtcaatgaatcatgaatgaagagtaatagaagtctgtagttcaagaaaacagtcctataatctgtgcattaagccttagggagtaattttcacaggaacggttaattgtaagaggagatttgagagcatgcactgatatcaattctcttcctttcctctcttaagtgttgtaccattctctcccatgtcattcagatgaatatagttattatgcacccactgtgtgaaaaacatttcactag

SEQ ID NO: 28260 - DNA, 418 bp, Homo sapiens
ggtgtacctactgtactgcacatgtcaactgccttcagccaaatagacagaatctggttcaagcatttattttgctcctcatgtctcttgtctctttgccgtcactgctacttctttctctggaaaaagacggaaagagcagcagagaggctgaacatggccatgcaaacattttggtcttgtgagatattattatacttgaaaaaatcaatctggtttaaactaattttaaaaaaatctttagttaggttttagggaaaatacagattgtctcagggtgtttattatttcaaaggcaagggcagtttatatcctctgttttgctcataagaacccaaaataaactggacccaaaaagaatcaggccagagggtcataaatgcacattttatgttcatgggaattatggctcaattct

SEQ ID NO: 28261 - DNA, 585 bp, Homo sapiens
tagcattttcctgttctgaagacagcagcacctgtatctgttctggaacatctggtggccatttgcacagctactgctggacttccatctttatctctccaggcagacgagtcgaaccttccaataggaaattttgggtaaatgacaaaaacttatgagggttgtcctttgtgagcagactttgaagcagtaggaatgtagcctattgaaaagatggccagaggttcagaaataagcgtgacggataaaaatcagcaagacatttaatacatctgcaaacttgccttctttcaaagaacattgattgaaacagattcgtttgttcataatgtgggtgtgaaaatagttctgaaaagccattctaaacaaacttatgtttttaaaaagagtagatgaaatctgtttgcggaggaaggaaaagatgacattcaggaagcaatgttctggttaattctgtgttcttcaaaagccagctcattttcttgaaaagaatgctggccacaatccacaggtatagagaatatggagagaaagcatctcacgcctgaagagtccaataaaacatttatagataagaatttaaga

SEQ ID NO: 28262 - DNA, 483 bp, Homo sapiens
agaataaacttgataagttcgtcaaatttttattttattaaaaaaattctgtttgcaaatggcatatttacacaacttggtaataagtcattttctcttttttccattttactaacttaacaatctaaaagcaacaaccacaacatagaggattaaaattaatgtcattaattttaggtcagtttgccataaaattttagatgttttaccttgcacactaaggtaatcccatgaatttattttagattaggtctggcaagaagatttcaaggacattgtgctttgctttcagttctgaaaggtatgagtggatttataacagaagtgtttgactaattcctgttgtcttgtgggtacataagcttagtaagcagaacaaatgactgaaggaaagagggacaaaatttaagtctgcattgtgtaaatcattactgtctaagtggttaggggacttctgtttttttctttgtttttgagactgcg

SEQ ID NO: 28263 - DNA, 411 bp, Homo sapiens
ttgactttattcctagcagctgccagtgtcgttttgaatgcttgaaattacttagtgtctactgtgccactgggtggggattttaagctaaatgtaatgttctgtcttctgagtggagctacagaagactttttaaaagctgtagaataaagtctcatcataccagaattacagggcctgtcggaaaattctgaattggataacatttattttttaaaatgcagttgaaaaactcatgaatatatttagtgtagctagttctgggataatgccagcccaaatacattgattagataagaatattctgtaattaacgtattactcatgggctagcgagtgctactgggaaacagtttgaagttaaaacataaacatgtcctgtgtgatgtggcttgcgtgattcttttgctg

SEQ ID NO: 28264 - DNA, 530 bp, Homo sapiens
gacaagagaacagacgatgaggcccagcatttttagtgatactgcttctagctttcttttgccaaagcccccttaccacccctcttattctcccccaccaaccctgacctcttgtttcagaagccctggaatacccccccagcttgcagccccctgccaactactgctgcccagaagggtggcacagtgcctggacttcaggcagaatctatcaaatcacagaaccagagggtgtctggaagtcacctcatctagtcctctgttcacatccagccctgctcacgaggacaggggcagacaggttcagggtagtgggcagcagaaggatgaagtgcccatctcccttcagctgccctttctcctttcttacttcttacacaatttatattggaagtcctcactcagatctgactttgcagacatcatgcataatgagaattggccagaatcaggagtcctatggtcaatagactgacccagtcctagattctccaaaaaataaaacgagatttttggctaggtcctttcac

SEQ ID NO: 28265 - DNA, 201 bp, Homo sapiens
ggacagatcacttgtctagtcaacatttcttaatctataaagtaaaggggttgatagctgggcccggtggcctgtgcctgtatcccagctactctggaggctgaggtgggaggactgcttgagcccaggagttccaggctgcagtgggccatgactgcaccactgcgctccagcctgggcaacagagtaagactctgactc

SEQ ID NO: 28266 - DNA, 426 bp, Homo sapiens
tatttttatcaatatgtaaacctgtcttatctatttatttatgggtctattgtcttcctaccaccccgagtacaaagaatcttctttaggtcatagactatctagaacagtataagttgcatagaaaatgctcattaaatatctgtggactgacttattgattgaccagccaagctgccatccatcctcatctataaggctagtaatatgttgggtatcatcaggtaagacattatacataaatataaaacatcatacagaaccagcccggagctttgcatcctctatggtcatcaacattgtacttcacaaaaaattattggagatggttgggtccaggggagacgatcgaaataatcaagagaaggatgattggcagaggaggaagatagttgaggaactgctgtacaaaagcaaaaaaaaata

SEQ ID NO: 28267 - DNA, 865 bp, Homo sapiens
atcatagtcttgccgtggccaggtggggtggctcatgcctgtaatcccagcactttgggaggctgaggcgggtggatcacctgaggtcaggagtttgagaccagcctggccaacatggataaacccccatctctactaaaaatacaaaattagctgggcatggtggcacgtgcctgtaatcccagctacccgggaggctgaggcagaagaatcacttgaacccgggaggcggaggttgcagttagccaagatcgcgccatcgtactccagcctgggcaacaagaacgaaattctgtctcaaaacaaaaacaaaaacaaaaacaaaaacgcttgccataaatacctttcctccctccccacgcctaatggattaatttttagtcttataaattaggaaatttctcatatagggctgacataaagagtaagcgttattgttcatgtaaagccctgaaatagtttgcctttatcgaaagctctagggtattttcgcaattattttgttgtgttaaaaatatggagaactaccttctaccccaggtggtcctcagcagagcttctgtgtggagcagaaagttttctcctgggatatttttgcctattttaagccctgtcttatgcttatttctgttggtcatttctcccagcatttctcaaaggaaagatagtaacgtattgcttctattttagggattaaagaatgataaatgtatggggtttttaattcattttatattttaaattgaagctaccaagattcataagccatttgttcatctaattggatcacattgtgttcaagtttcttttcactgtttttgttttttaaaatacaatcttaaatagttaccctttctctcctcac

SEQ ID NO: 28268 - DNA, 250 bp, Homo sapiens
gaagaagaaacctcactgaatatcttggatataaaggttcaaaatagtgccccatatggcatcaattactgttttaaattttaacagtttggattgaggaagcatcggacccaaacttggtgtttcttaaaacataggctgcatcaaggccgggcgctgtggctcacgcctgtaatcccagcactttgggaggccgaggtgggcggatcgagaggtcaggagatagagaccatcctggctaacacggtga

SEQ ID NO: 28269 - DNA, 308 bp, Homo sapiens
tcttccttccttccagcctttccctgggcccctcaagtcacatcccttgtacagtcacccacaggcaccccttctctgtgggccttcattttgaccaagccctgaggtcacaacaccctgggaaggagacatgaaggattttccaaggacccagctgtggccacgcactttctgtcctctctgtcctgctggaagccaaagttcttaagcttctgtacagcaagtttttcataaaatgaacgatgacaacctagtcttttcaggctttctgtttgcagttgcaggaggcttcttagctggtgatgacc

SEQ ID NO: 28270 - DNA, 389 bp, Homo sapiens
gacattcatttatcacattaacttatattgattgacaaccgttatatggcatatgtcgtatcttttgtatttcattgtaatttgtcattaaaactttattttaacctttacctctaattaaatatatttagggcagactaaaatacttgctaattatactcaaatgaaaatacatttacaagaggagtgaaaaaattaacataaatgtggaaaatagcagggaataaaataaataatagtagtaataataataatggacagactgggcatgaagtacaggtggctcacacctgtaatcccagcaccatgggagacccaggtgggataatcacttgagcccaggagttcgagcccagcctgggcaacacaaggagacgtagtctcaacaa

SEQ ID NO: 28271 - DNA, 560 bp, Homo sapiens
cagcctgggcaatatggtgaaactgtctctacaaaaaatacaaaaattggcagagtgtggtggctcgtgactgtagtcctagctactcaggaggctgaggtgagaggatggcttgagcccaggaggtggagattgcagtgagccaacattgccccattgcacttcagcctgggcaacagagggagatcctgtctaaaaaaaaagttagtccattaaggatggttaaggttatatgagagagctattactatttttttgagaggttggggttctttatttttatcaatctaacaaacgttctaattgttaaaggagtatttagtgttctaggttatagaaatagaaagaggaataaccagtattgtgtgactatagtgaacaaagttcctgttgtttttctcttaactctgcatcagggaattatgtggtcactggccttgggttgtttgcagttgtccttgttgggtcaaggtgggcctttttacatcaaatctgggcaaggtgccctttattgtcattctgtttggcctttcagccagctttttgtgtataagtaatac

SEQ ID NO: 28272 - DNA, 489 bp, Homo sapiens
caggacaagacagggcaggcgcccacagcagccacgtgctgtccctcagtgtcccttggaccaggaccgtgaactgtggcaccgctcacccgaggccagatgagaacactggggcttccttgtctttctccttcgtgtcgggcatctcttgtgccctcttttattttgtgggctgtggctaaatgaggttgctgcattcgtcagctgagttgttggggttttgatattttgtggctgtaaaagatagtaacctgacatagttaccatttcctcgtacctcgctttgccagcaggcaggtgactcaagattcattaaaaaattttacaagttggccgggcacagcgggcacagcggctcacgcctgtaatcccagctactcaggaggctgaggcatgagagtcacttgaacccaggagccagaggttgcagtgaggcgagattgcaccgctgcactccagcatggacgacaggggtgagactgtctcaaa

SEQ ID NO: 28273 - DNA, 307 bp, Homo sapiens
caggacaagacagggcaggcgcccacagcagccacgtgctgtccctcagtgtcccttggaccaggaccgtgaactgtggcaccgctcacccgaggccagatgagaacactggggcttccttgtctttctccttcgtgtcgggcatctcttgtgccctcttttattttgtgggctgtcgggctagtcggggctgtcgggctagtcggggctgtcgggctagtcggggctgtcgggctagtcggggctgtcgggctagtcggggctgtcgggctagtcggggctgtcgggctagtcggggaggtaccga

SEQ ID NO: 28274 - DNA, 645 bp, Homo sapiens
cagtatgtcaaagagttatggtccctgaccgcaaagggcgaaagccacaatgtcataacagatgtgaaatgaaaagacagcggtgtcgacattaaatagtaatatacatagtgtaaagttaacatcgtgcaccaggaaaggcttaggtgagaggtagtaagggaaatgggtggttctcaaggctgccagtttcaagagctgtaggaagaatggaaaaggtttggctattgactttcttgtatgtggttcatgctaatacttcaaaataggtgtgagatgatcaagaatcagagcactatactataaatatacctgaacccacagtgcgaataaaagaggtaagaccctaagaaagtccagtgaagttggtcaaaagccttgaagcccatatactctacctgctttttctcggtttcttctaagtctggcaagcagtcagagggcagagccagttaagtcccccagctataagaatgccacaaaggtatgttgtgcgtgtatgtgtgtgtgtgtagctcagctagtgctttcttgagaatatttaacttttacttttgttccgattagtaaagttgtgcatgttatcactaacagaaatcagaaattcttcaaactgcatataacttagaacaaagttgtttttgc

SEQ ID NO: 28275 - DNA, 326 bp, Homo sapiens
aaaaaactctatatctccttaccgtctctacctcctcttcatgcccaccaaccaatttaacattctgctgtgtatatttctataccttttatcattctaatacaaacctctacaatcatttatgaaatataaaggattctttgctttgtttttatgtttttatgcagcatgcttctctcacttttgtggacattattccaggtcaaaagataatagatttaactcattaattttaataatcacccaaaaaaatgaatttaatggctgttactacaggtggggaattcttatagcctgggagctacaccatcaacacaggaaagtca

SEQ ID NO: 28276 - DNA, 870 bp, Homo sapiens
gtctaccaaaaaactacaaatcttagccaggcacagaggtacatgcctgtagtctgagccattcttgaggctgaggtgtgagaatcgcttgagcccaggaggtagagcctgcagtgagtagacattgtgacactgcgctccagcctggccaacagagcagaccctgtcttgaaacaaaagaaaacaaaacaaagaatcagttgcagacatgatagcctttatgcttaaatacctcagtatacatttcttatttatcttatgtaactaccatacaattctcaaaattaagaaattaacatgggtacattctattctcaaatccaaatacctgttcacattttgacagttgtctcagtaatgttctttatgacatgccactgtgcccggcccaggggattaattctatcttacctgttttcatatctgtaattttcttcttcaacagtgagaaaagtggcttcatttatctgcaacgtatttatttgagcctttttagaatacacagaaagttgtttcagaattaatagccagtgcttttgtagaaaagaaacctgtgtataaaattttttttgattatcaaattattaacatacagcaatagtcctcaacacaggacattttacctcccaggggacatttggcaatatctgaccaggaaaactaccaaacatcctacaattcatagggtagccccacagcaaagaatttattcagcccaaaatgtcagtagtgctgaggttgaaaaactcgatcacagagcaaggaaaatacctactcaaggaattaatgtcgatgtttttgtcaaaccacttgaatgtaagatgcaagcatcatgatgcttctcttctaaatactccttaaaaaaaaaaa

SEQ ID NO: 28277 - DNA, 489 bp, Homo sapiens
actcctaaataacatttatttccatgtgacttgcatgtctaaataaaatgaatttggcttagtaaggctttcatttatcttcatctaaacgcttttccaccagtactcatcacaagactccccaaggttatgaagcagattgatatagaaactccatttctaggacaaaaacgaggcaccttgagaatggacccaagccataataaactagtaatgcttttcccacacaaccatataaaatacagtgagcccttgatcaacctttgcacaaaaagaattgctcattaagtctttgattttttaaaaaatggcacttggttttctagaaagaggatctgcacactaactattcgatttgtttgaatatagtcagattattatgtctgtgtttattaggcttaatttgaaaagatttttggttagtatctccacttctatgatcaaacactatagagttcaagaccagcctgggcaacatagtgagaccct

SEQ ID NO: 28278 - DNA, 983 bp, Homo sapiens
actcctaaataacatttatttccatgtgacttgcatgtctaaataaaatgaatttggcttagtaaggctttcatttatcttcatctaaacgcttttccaccagtactcatcacaagactccccaaggttatgaagcagattgatatagaaactccatttctgtagtctgagccattcttgaggctgaggtgtgagaatcgcttgagcccaggaggtagagcctgcagtgagtagacattgtgacactgcgctccagcctggccaacagagcagaccctgtcttgaaacaaaagaaaacaaaacaaagaatcagttgcagacatgatagcctttatgcttaaatacctcagtatacatttcttatttatcttatgtaactaccatacaattctcaaaattaagaaattaacatgggtacattctattctcaaatccaaatacctgttcacattttgacagttgtctcagtaatgttctttatgacatgccactgtgcccggcccaggggattaattctatcttacctgttttcatatctgtaattttcttcttcaacagtgagaaaagtggcttcatttatctgcaacgtatttatttgagcctttttagaatacacagaaagttgtttcagaattaatagccagtgcttttgtagaaaagaaacctgtgtataaaattttttttgattatcaaattattaacatacagcaatagtcctcaacacaggacattttacctcccaggggacatttggcaatatctgaccaggaaaactaccaaacatcctacaattcatagggtagccccacagcaaagaatttattcagcccaaaatgtcagtagtgctgaggttgaaaaactcgatcacagagcaaggaaaatacctactcaaggaattaatgtcgatgtttttgtcaaaccacttgaatgtaagatgcaagcatcatgatgcttctcttctaaatactccttaaaaaaaaaaa

SEQ ID NO: 28279 - DNA, 408 bp, Homo sapiens
gaaatttcttatcaaatccaatgtgattacacacttactgctgtaaaggatgcgcattatgtagtttttaagtaaaaactatagtgagaattctataatcacattcacactcccctctctattgtatgaaaaatcttgttgttgttgattagataaggtggatattcactcatagttaatgtcaaatctctgcagttaaggattgaattaagccctctggtgcagtacctaatgatcaaaacattttttccaataagtttatataaccaaggataataatgatataaaaggtttttaatgttgtttttaagagcaggtactataacaaagaaggttaacactggtacagaaatatttcataaaagttatgaaaaccagataaatacagtattaaattttggagctttt

SEQ ID NO: 28280 - DNA, 472 bp, Homo sapiens
ttcagaagtttacacattacttagtcatgagctccagagtcaggattttgtgttttcaaacaccaagtagttttctccatcaaatcacttgccttgtgttcattctgtatacatattatttgtacacagatcttaaatttaaacacagatgttgaaagggatcccaaccactacggggtgtcttttccgaagctggatcttgggttcagggagatgccttaaggtcaccccttgaggaatgggagggcctccttgcacctctcctctgtggccagagcatctcagcttttgcctgtgctctgtattgggattccatttgcagaaagggttttgttgctgaaaactaaagattgaaaaccacttttctagtaaaaaccccttcattttacagacaaggaaatgcagaggcccaaggaagtgaaattttttttcatcagtaaggtgtttagaggcataaacaccttactgatga

SEQ ID NO: 28281 - DNA, 247 bp, Homo sapiens
accaggaaattgacatactacagtctttaggtttttaatttatttttatgtttcatatcaaaaagtttccattttgcagtaattcatttttattatatttgacttggcccttcctctcctaaattagcaaatgttaataagcttgtcctagtgctcatcttgaattacaagtttatttttaaaattatctgggtcaacacaattgaaagtgatttatttgtaaggtggttgctttctctggtcatac

SEQ ID NO: 28282 - DNA, 434 bp, Homo sapiens
aagatttaggggggccatgataaagaaccttataaacttctttctctttaataaagacttgtcttacatcttgctgtcattaaaggcagctgttcctagaatttaaatcacttaagtacacccacaaaacaagaatatggagatcttcatttctcctcgactttaatttgcccagttatacctcagtgttgtagcagtactttgatattacgatactttctgtactgacctgaaggagacctaacagtcctttctctttttgagtttgaatcacagccttgatgtggtatctggttttatgtccttgttcctgatgtaaaagtgattaactgcttcttggttgtgttgggtagcattgggataagattttaactgggtattcttgaattgtttttataataaaccaattttataatctttaaatttatcagctt

SEQ ID NO: 28283 - DNA, 416 bp, Homo sapiens
gcctggggccaagggctttgaatgttgactttgccacttgctagcactgtgaactttagaagcttaacttttttcttcctcggtttcttcatatttagactatggtcataatagtacttacctcttaaggtcattgtgtctcagggacactagattaattcatatatgtaaacagttagatcatgcctggacacagtggacactgggtgttggtgatcaccactattcacaatctgcagtggaatagaaaactacatgcacaaaaaccgggggctaaacatcatgtgttacagcagggaccacctctattttgttcaatcctctctcccctgtgcttatctgatgttagaacacaggagatcagcaaaaatcctgaataaatgcacatcaaatgtaaccattgactaagtgaacat

SEQ ID NO: 28284 - DNA, 850 bp, Homo sapiens
aatccccaagtttttgggaggtacatgattgtccatctagagatgacatatcccagcctcacttgcaactagttgtggccatatgactaagttcccaccaatggcatgtgagcctaagtgatgtatgtcacttctaggtcacatccttaaaagaaagttgcatgctctccctttcttctttcctctttcttgaggctggaatgcggacataatgttgggcatttaactcaatcatgtggataggacaacacccgagaggatggcaaagcaacaaaacagaaggcataagggtcctcagaccatcacaagaagcagagcagcccacctttcctgggctgcctaccagctggacttttatttgaaagacagaccatcttgtttaagccatggttacttggtacctgttacagcaactaaacaaatatcctaaatgatagatcacaaaatgcttctaaggcagttattaacggtgttcctggtgagtcttcttgggacagctgtgaattacatccttttaaaagagtacctgagaaagcaagcccaggtgatatcaccatttaagcccctcttaggctgtgtttgctgatgtcctcaaaatgcgttctcactagcttaagggtgtcttcttaggatgctgctatggaaaactccatcactgttttccagctttgcccatactcaggtaccaagaggatttcactcatgtgattcttcatttatttcactattttaggggctcttctcatgtggcagtcactgtgtcaggcgccagggaaacagcagacagcagaacagacacgagctttacactctcaggaagctgatattccagtaaggcaggaaagaccca

SEQ ID NO: 28285 - DNA, 374 bp, Homo sapiens
gagaatcacttgaacctgggaggcagaggttgcagtaagccgagatcacaccactggcactccagcctgggtgacagagtgagactccatctcaaaaaaaaaaaaacaactatcaggcataaaaagaaaccaaaaaataaaacacataagccagatatagtggtgtgtacctgtagtcccagctacttgaaagcctaagtgggaggattgcttgagcccaagagtgtaagaccagcctgggcaatatagtgagaccctatctcaaataaatagatgggtggaaagaaggaaggaaggatggatggatggatggatggatggatggatggatggatggatagatttaaaaaaataataatttaataattaattac

SEQ ID NO: 28286 - DNA, 629 bp, Homo sapiens
ggtcgactctacttcttcatgaagcagaaagcactacgagctgaaatggctgtagatttgggagagcaggaaggatctgaacgaaactacagccatttcagctcacagtgctttctacttcttcatgaagcattttctctctcaattcgactcttactctgctttgtatcatccaccctctttttatgtgtatttttaatctcatcaactggattatcaggagtaacgtatgttctcttttgcaactctcatgctctattcgtgataccttgtacatagtagcgatcaggaaaatgcaaagttgttgttgttattgttgttagagacagagtctcactgtcactcaggctggagtttagtggcatgatcatcgttcactgcagccttgaactcctgggctcaagccatccagagtagctggtagtaaggatgcgtacaaccatacctggcttatttaaaaaaaaaaatgtttgtagagatgaggtctcaccataatgaccaggttggtctcaaactcttggcctcaagtagtcctcctactttggcctcccgaagtgctagggttataggtatgagccaacacacctggctacaaagcttatatatatgtgcatacacacacacacaca

SEQ ID NO: 28287 - DNA, 716 bp, Homo sapiens
ggttcctgctcactatgcacaacatctcagaagatggcgtacaaaactatttttctaactatagcacaggtaatgtgggggtggggaggcttgggatatacctaaatgtggcaaatgatttatcttccaccttgagggatgaaaaggaaactatgcacttgaattttaattaaaattttaatttaattcattggatagcttgtgccagaaagaacagtcaatattcaagaagcaaaactgacgattagctcagtttcgggcctccctgtcgggggagttttcttgtctggaacacaaacacctacaagtagagtgtgagctggttcttgacaatcagatctcatcaaccctttgaaatgttctgggcagcacagctccttggtctgcatggttggtgtaagtataatcaagtagtgaaattgtatggtatatacctatatgccaacagtgtacacccgtatgtgcagaatttgctaatataaccatttcaataaaaacctattgaaaaagctgatttgaccacatggagtattgttggtggtgacgtgtatcactgaggactctcttggttacaaatgacagaaaacccagccaaaactggctaacacaaaagggaatgtcatggctcccaaaagccaaaatgcccaggggtgcctatgtcaggcttggtgtgatttcaccctcaaatgctgacaccaagacacatgccaactttg

SEQ ID NO: 28288 - DNA, 348 bp, Homo sapiens
caaaaaatttaaaagtgagctgggcatggtggcatgtgcccgtaatctcagctcttctgggggctgaggcgataggatggcttgagcccaggaattcagggctggagcaaactatgattgcaccactgcactccatccagcctgggcgacagagcaagcaagaccctatctctaaaaaggaaataaataaatacacataaaaaccattgcttttttttggccgggagtggtggctcatgcctgtaatcccaacactttgggaggccgaggcaggcagaacatctgaggtcaggagttcaagaccagcctggccaacatggtgaaatgtcgtctctaccaaaaatacaa

SEQ ID NO: 28289 - DNA, 344 bp, Homo sapiens
gtccatgtgctctagtactgttttcctattagggccaatttaaaaaatgaaagttatattccaaagggctgggattatgtaggagtcattgagaaaatggcatctgaggaaattgacaggtttataatggatccacatagcagagataatgttggcaggaggactgattcctgtattcccttctgcctctgctggggcttctgccagttgataagatgaggcaagattacttaataaggttcattaggtaactctacgtcacctgcctgccttgttgattgttgggatcctttgtaaccaagccaatcatttatcctgatttacttgggaccatctgaagctct

SEQ ID NO: 28290 - DNA, 463 bp, Homo sapiens
agtgataaaacatgttgaacgtaaagattcttacatattgtataggataactatgatattttcatttatgagaacgtatcctaattaggaaagtcataatgtaggtgaatgtattttaagctgccccataaaacacatcaaattggtgtataagcattgtgatttggggctaatcccattttagataatactttgtttacctaatcaagtactacacagttacacacatagttacatgtgtgtgttcatgtgtttgtgaattttcattttaatatacttgcctgtatttctggtcattcatttgcaaagcattgattgcataattatttattgtatgccacatagtcaagtcctagggacacaaatatgaagacagaagtcttcacttgtgaataactcacagtctggttggtgaaacatgtaactacttaataaaatattatgtaataaaaatggaattgtg

SEQ ID NO: 28291 - DNA, 815 bp, Homo sapiens
actcctctcatgccccacccaccacagagaagcctgcagttttgaaatgaggactccttgtcactttagaaattaagaagaattttctgggtatccatcattttacacattttgaggattcatgtttcatgcaatcccagctccctattaaaataagactcatttatagcacatagggcaacctatacttcatcacttcagcaaaaacctagtagtcaaacccaattaccatgcgtttttctggtaggacacaatttaccttttgattagagtttgaataaatccaacctttattgatgagaggcagtataatttaccttaaagcagacctatcttagctcaaattcccaccctaccatttactagcagtatggccttcggcaattttaataacttttcaaagccttagtttcctcattagtaaaaaatagtgacattaaaaaaaaatagtgacattaagagcatatatcttattaaggactaaatgaagttaatgcatataaatgacctgagacatagtaagtactgaatgaatgtcagataataacattcaaaatgaaaaaaggagctttttcctccttcgcctctttgggcatataaaaactgtttgataaatgaatgaatggaataaatgcatgtatgaatgaataaacatatgaatggtgctttcactcagagaagggcaaactatgtctgctggtgttatttatgtaacagactgtaacagcaaggtgtgctactctgtcccatcgatgtatatcctctgacagtagaaaccctgccctgtttatctttctgtatcctcacagtgctta

SEQ ID NO: 28292 - DNA, 1438 bp, Homo sapiens
tacactgatctactactgatgtcttctttcagctttgatctaaagatgtattttattaaaactataatttaaatgtaccatgaaaaatatgcagtaaaaattagttgttttctaagctagagtaggatttgtcttacaattattgtgctatgtagtttttgttttaaaaattccaatggtgtgctgctttctttggacattttattttcaattctataagagggatagatgacattgttctagaaacacatatacatcattaagagtgaatctctaaaaccaggatataaattatgctttatttctctgagaaaatcaaacaaatggaagctgttcacacctccccttctttaagcattatctaaattaatttttacttgcataatgttcttagaaaaaaaaacagaacatttaagcaggaaaaaaggaagaaacaagttgatttttaagtgcattttactataatgaatcaatgaagggaaaaggaactgcatatttcatgaaaataataagcattgtcttaatatactgttaatagaaaatgtgtcttaattctgtgcttgaatccctgcatgatatttgagactaagatctctcttatgattctaccaagaattatatctgtgtcacttaatttttttaaaagagagagatcaataactattcagagcaacatgttaaaggcaaagtttccaatcatttacatctgtatcaggtgcctcttacctttccttatttaagacaattatttgtacaagaaacacatgactcttttcatatcaatgggagggacttttctacaaagtattttccaggatgcaacccacatttaaacaatgtaaaattctttgtttcctgcaacaacttacaaaataaggtaaaagactaaaattcaaaaaaaaaaaaaaaaaaaaaaaaacaaaaaaaaaaaaaaaaaaaacaaaaaaaggaggggcacaccacataacagtgttccccacgcagggggcccccaccacatcacgacgccccccacatctactctgccaacagggggcacccactagtggaggccgcctccactccaacgacccacccccccggcgcccccgatcccacacaccccacgcccacgcgcaccccacccccaccacgccaccctcccgacgcaggaccccccacaccacgcgccgccacacaacaggcccaccacctccctcaccaacctcgaccccccccaaccggaccaccgaccaccccacaccgccacacgcgcccaccaccccacaactcgccccacgcaaaccccccgcaccgccaccccacacacctctacacaaggcccacacgcccaccccaccccacacgacccctgccccctcatcacccaaagcactcgccaccacacacccacccacccccgccacgaccaccacccgcccccgcccccccccgaacc

SEQ ID NO: 28293 - DNA, 3072 bp, Homo sapiens
  misc_feature (1541)..(1541): n is a, c, g, or t
tacactgatctactactgatgtcttctttcagctttgatctaaagatgtattttattaaaactataatttaaatgtaccatgaaaaatatgcagtaaaaattagttgttttctaagctagagtaggatttgtcttacaattattgtgctatgtagtttttgttttaaaaattccaatggtgtgctgctttctttggacattttattttcaattctataagagggatagatgacattgttctagaaacacatatacatcattaagagtgaatctctaaaaccaggatataaattatgctttatttctctgagaaaatcaaacaaatggaagctgttcacacctccccttctttaagcattatctaaattaatttttacttgcataatgttcttagaaaaaaaaacagaacatttaagcaggaaaaaaggaagaaacaagttgatttttaagtgcattttactataatgaatcaatgaagggaaaaggaactgcatatttcatgaaaataataagcattgtcttaatatactgttaatagaaaatgtgtcttaattctgtgcttgaatccctgcatgatatttgagactaagatctctcttatgattctaccaagaattatatctgtgtcacttaatttttttaaaagagagagatcaataactattcagagcaacatgttaaaggcaaagtttccaatcatttacatctgtatcaggtgcctcttacctttccttatttaagacaattatttgtacaagaaacacatgactcttttcatatcaatgggagggacttttctacaaagtattttccaggatgcaacccacatttaaacaatgtaaaattctttgtttcctgcaacaacttacaaaataaggtaaaagactaaaattcaagatttgcttccttcattgtcctaagacgattcgttgagaatcactgactttgagatatttaaaactttcagcattatactgtggtttcttttgcactgcactcacctattcaggactcctcccccaggttcctcatcatgcacaaaaatgcaaagaaaacatcttattagtaattaatgaagcaacattgaaattctaactctagctgtctttggattctaattaactcagcatcaatttctcacctcagactacagtgaatttttatttcctatcagctgaaatatttcacagatggaagctcatgtttcagttttaatgactgccttgaataaacaagttgttgccacttgtttcaaacaaaagcctaaaaataatctacattcaattttaggctccattgactaatatggtgttgcttttggaagtactgtatatcctcacatggaagccaaattgttaaattatttgaaggacacaccactgtacagaaagtagtgtttcaaatataaatcgaagaacaaagagtgctccaaaaaataggtcattcttttattttcataaagtatctaaactgtactaacattcagtgttgtgtttcattctaaatttgcagctgaaataaatttatttgcgatagcaganaatatcttattattcatcctcagaaataaaggatttgaagggatagagattatatgataaatttatagaagactttcagaatttgaatgcattttgtttagtgttatgaaatgacaataggaaaaaagtctcgacttcaattaaaagttacacaaacaaacaaatctacaggcatgtctttatataccatcaggtctaagttttcaaagaaaatggtagatataacttgcagataactcattacagtcataatctctgcccatgtgtattgagagggggcagtttgcacgaaaaagaattatgtggcccatttaataattcagctttaaatagacttgtgtcatatgcatgaatcatcagagatgaaactgtttgagagactcatgtgaccttacgaaaattacaacagcagtcttaaagtatgaaaaagatgcatcacagcagagacattatggcccagttgatatcaaatgtaaaatgtaaatgcatgtaaatgcacacttcattttatgtattatttagtaatttgcagtggtatgtgtttaatatttttgctacctacacattaggcaaaaaaaagatgtaaataatttgggagaaaaagaggaagaacagtgtaaaataaaactttctataagtactccatttcaatgtgttcaacatcatcctaaaaggcaagattttcccacgcaggtgacaaggtggtttatgtactatttaagggcggaaggtgcgtgcccgttcaataagcatgttttttgccaggtaggaaatatgttccatatctttacttatcattgcatttcagatgggaactagaaaaactggagagaaaaatgtaatgaaactgctgctgtaaattattccttttagcatgtattcacttgctaaatacacatttcttcaaaatatttgaattcagatgtctttactgttccctataacatatggtgttaaggaacataagctcataaaatgttgagaaccagagtcaggttgctacataattagctaacagatttcttcattgtagtcatctgtaaactgggttctatatttatggtgatgatgtgaatttttatgccctttaaattaagtattgttctttttaatgtcatacctaaaaaggaaatgtagggataaatttttataatgtgtcattttcataatcagtttggttttattcaggatccacaaagatgtcagatgactgttattgaaattgcttatcttaaaggtcacagacaagcattttattaatatggagccactagtataatatgttaaaatctttgttttattagctcattttaaaacacaatttccattcaatttaatgaaactgtatcaggtttcatggtttcaaagacagacttaaataggattcaacacccccgtatcgtgtaataacatgttaaactggtctaacaccaaggacatctatacttttaacttgatttgtaataattatttgaagtcaatgttaatgtttgcaaatacatgtttccataaagaagaaaacattattttt

SEQ ID NO: 28294 - DNA, 1475 bp, Homo sapiens
tacactgatctactactgatgtcttctttcagctttgatctaaagatgtattttattaaaactataatttaaatgtaccatgaaaaatatgcagtaaaaattagttgttttctaagctagagtaggatttgtcttacaattattgtgctatgtagtttttgttttaaaaattccaatggtgtgctgctttctttggacattttattttcaattctataagagggatagatgacattgttctagaaacacatatacatcattaagagtgaatctctaaaaccaggatataaattatgctttatttctctgagaaaatcaaacaaatggaagctgttcacacctccccttctttaagcattatctaaattaatttttacttgcataatgttcttagaaaaaaaaacagaacatttaagcaggaaaaaaggaagaaacaagttgatttttaagtgcattttactataatgaatcaatgaagggaaaaggaactgcatatttcatgaaaataataagcattgtcttaatatactgttaatagaaaatgtgtcttaattctgtgcttgaatccctgcatgatatttgagactaagatctctcttatgattctaccaagaattatatctgtgtcacttaatttttttaaaagagagagatcaataactattcagagcaacatgttaaaggcaaagtttccaatcatttacatctgtatcaggtgcctcttacctttccttatttaagacaattatttgtacaagaaacacatgactcttttcatatcaatgggagggacttttctacaaagtattttccaggatgcaacccacatttaaacaatgtaaaattctttgtttcctgcaacaacttacaaaataaggtaaaagactaaaattcaagatttgcttccttcattgtcctaagacgattcgttgagaatcactgactttgagatatttaaaactttcagcattatactgtggtttcttttgcactgcactcacctattcaggactcctcccccaggttcctcatcatgcacaaaaatgcaaagaaaacatcttattagtaattaatgaagcaacattgaaattctaactctagctgtctttggattctaattaactcagcatcaatttctcacctcagactacagtgaatttttatttcctatcagctgaaatatttcacagatggaagctcatgtttcagttttaatgactgccttgaataaacaagttgttgccacttgtttcaaacaaaagcctaaaaataatctacattcaattttaggctccattgactaatatggtgttgcttttggaagtactgtatatcctcacatggaagccaaattgttaaattatttgaaggacacaccactgtacagaaagtagtgtttcaaatataaatcgaagaacaaagagtgctccaaaaaataggtcattcttttattttcataaagtatctaaactgta

SEQ ID NO: 28295 - DNA, 1046 bp, Homo sapiens
ctcaccctcgacacccacctgcacagccactgtctgcccaaaggtacccactgagtctggggatcccgtgcgggacccgggtgcatgagatcagccagaatcagcaggtgtgcgctgtgcagaccaaaacacaatcagttacccctggagcaggaaggcagctctgccttcccttaggctttttgttgttgttgtttgagacggagtctggctctgtcattcaggctagaatgcagtggcatgatcttggctcactgcaacctccacttcctgggttcaagcgattgtcctgcctcagcctcctgagtacctggtattacaggcacccaccaccacgcctggctaatttttgtatttttagtagagacaggtttcgccatgttggccaggctggtctcgaacttctgacctcaagtgatctgtcctcagcctcccagagtgctgggattacaggcgtgagctacttgcccggcctattcccttgggcttttaaaaagcgtcttggatggaggtggtgcaggtgctcaccaagcccgcaggtaacccaagttgcatgtatccccagggcacttttgtgattcccctgcttgtgactgcacaccgggaccccactcaattcaaagacccagactgcttcaaccctaccaacttcctggacaagggcaagttccaggacaatgatgctttcatgccctttgcctcaggtgcaggcagaggaggaaggggaccagcctggactggctctggggtacctggtgctcactgtgcacctgtgtacccggcaaagcagatgtgcctgggcacaggcctggcccactcgggtatcttcctattccttacggccaccttacagaggttctgcctgctccctgtggtacgccctggcaccatcaacctcacctgcagtgcactggcctgggcagtgtccccccagacttccagctccagccagtggcctgctgaggtcaggctccactatggtgggctcactggccctcaaacctccataccctcctcggtcaataaaggccctaaattgcagatgg

SEQ ID NO: 28296 - DNA, 118 bp, Homo sapiens
ataattccctcacaaccagtgttaatacctcactgcgtatcttttacatgttcttttctctgtgtgtgcacacatggcatctatcatctgtttgaacaaaaatgagatcataataggt

SEQ ID NO: 28297 - DNA, 375 bp, Homo sapiens
tagaacccacagatacagagggccggctatcttatttgagatttgggattagttatatgcctgcaagctcatggcagcaaactggctgaagagtggcatggcttaggccccattctgtgcccatgagatccttccctcatctccctgtgctcagcactggcttctcaccatgggtagcaaaaggacctccaggatggcgctagaggaagcgcccctcagacaaccttccctcacatcccccatacagggagcaacaggcagatggggccattggcacacctcaggctgagctctggcagggccctgccaacctggggaaaccaacaaacaaaccaggcatgtgtgtgcctgcctggcagctccctctcacctgga

SEQ ID NO: 28298 - DNA, 431 bp, Homo sapiens
ctcccaacggacagggattacaggcgtgagtcactgtgcctgactacactttctttagtacaggatataaccaacatcttgcctcctaagagtcaggggcaggagtataggtgattgtacttcaggtagaggaaagatctcattcacagaggaggggagagtagattttgttggcatatagtggcaaattttattaaggctctgggaaaagtgctgatgacattgggaaaagattcagtttttacccagtaaaatattaaaaacttattttgcttaaggccatgtcctctaattactgaaggggctgatttttttttttttttaaatcatcagtcataatagcacctattgaagggcttactgtatgccaattactgattaggacactttacaagcacttatagtattaatttttatagcaaccatatgag

SEQ ID NO: 28299 - DNA, 262 bp, Homo sapiens
aggcttttactcctgagagacagaagactagaaatttagtcctgacttagagttctaaaacaatactttattgaacatcattttattgaccttggtcaggtcctttcgcctctcagaacatttgtctccccccgtctgttccagttcttagaacagtaaacacagaccacgagaaactactccagtatttaatagtaaagcaagcaatctgtcacgcagggctttgccttgccctgtctccctcttatctgacctcgttttc

SEQ ID NO: 28300 - DNA, 422 bp, Homo sapiens
aaactcctttcttgaggggaggaggggttggggaggctttgttggtagttacagtctttcataccttattaagcttaaaatcctgactctggatgacataggctggaaatacttctcttagggtccataataacaaagatgtgagtaacattgaaatctaaattaatttattttaaaacatagtactggccaggcgcagtgactcatgcctgtaatcccagcactttgggaggccgaggcaggcggatcacgaggtcgggagatcgagaccatggtgaaagcccgtctctactaaaaatacaaaaattagccgggtgtggtggtgggtgcctgtagtcccagctgcttgggaggctgaggcaggagaatggcgtgaacccaggaggcagagcttgcagtgagctgagatcgcgccactgcac

SEQ ID NO: 28301 - DNA, 439 bp, Homo sapiens
ccagcactttgggatgccaaggtgggtgaatcacgaggtcaggagatcgagaccatcctggctaacacagtgaaaccctgtctctactaaaaatacaaaaaattaagccacccgagtagctgggactactcggctggctgatttttaaatggtttgtacagatgggggtctcactatgttgcctaggctgatcccgaactcctgggctcaagtgatcctcctgcctcagcctcccaaagtgctggaatgaaccaccatgcccagcccatccataaatttctttttttcaaatatcaccctaggaggcctggcatggtggctcatgcctgtaatcccagcaccttgggaggccaaggcgggtggatcaccaggtcaggagatggagaccatcctggctaacacagtgaaaccccttctctactaaaaatacaaaaaaaaa

SEQ ID NO: 28302 - DNA, 329 bp, Homo sapiens
ttaaaaaatatatgctcattataagaattttaggtaatagagaaatgcataaacatagaaaaccattgtaaacagattttcatttagatgaacatgcatacattttaaatggaccaatcctctattggttgcgtttttgctatataatttataattaatgtctttcatcataaaactaggtcatcattattaagggttgcataatattgatctgtgtggatagaatgtaagttttttaaacaatcccataatgaacatttatgtccaattttttagacttaaaaaaattattgtggaaagaatatgtaacatgagatctatcctctgaa

SEQ ID NO: 28303 - DNA, 373 bp, Homo sapiens
cttcagcaatgtactcaagaacatgccaaagaaattccaaggtttttgctacagttagtttctccagcagctattttggataactcacctgcatttttaaatgtggtagagacaaatccttttaagcatcttacacacctctcactaaaacttttacctggaaatgatgtggagataaagaaatttctcgcaggctgtttgaaatgtagcaaggaagaaaaattatcattgatgcaatcactagatgatgctactaagcaactggactttacacgaaagacattagcagaaaaaaaacaagaattagataagttacggaatgaatgggcgtcacatacagcagccttgacaaacaagcattctcaggaactga

SEQ ID NO: 28304 - DNA, 849 bp, Homo sapiens
gacgcactactttctagttagtttaccgcacctgcctgttacctgcaggcccgagggtgtgtgcttctgtggcctgtgtgggatggcaccccttccagccttacccactcagctcagttggcctggttggaatgggccctgggaggagtgtttgcactgtggaaattggtaaatgcttcaaatcagggtggtttttaattttgcttttgttttcttctgaagagaaggttgttaaacaccagcacagtgctgcaccaggcagccagcatataatcatgagaaataagtagttgtttaagccactgcatttggggtggtttattacatagtaatgataaccatatcatggcccttgaaggcccagcatgtatgacccctgcctccacccctcagaaaacctcttctccctacctgcttctcctggagcccctcaggtgttcctctgcttctccaccgaaccagctaattctcacaaacagcccctcaggtaccagcccctccctctgcagcctctcctcattcagctcctgcagggctgcccccaccccgccagccagtctagtttccccccagcacctgtcactatcggaaaggaaacatctgtttaccgtttgtctccccctctcaaaaaaatagagcagggatcttgcctgtctgcccactgttgtttatttgtctgaaatgtttggccccagggcagcatctactgatcactgaccagttggctactgaacggtgaaggtctgatgagctgatgagccgtcccctgggcttgaaatctttcccgcggcacaaacaggcgccccttcctctgtcgctcacttttcacggttgtctccttctgaggcg

SEQ ID NO: 28305 - DNA, 525 bp, Homo sapiens
gagagtgcaggcgctgaggacagcgacgatcccgagacgagacccaacggcgagaaaggagagagcaagagatgccatggactacaaggtgatgaataccactatgagctcactacaagatctcaaagatttcaagccactggctgttacaaagcataaagccacccttctggagcagcggcgggaggcaggctgggaggaggccccaagttttggccagacgatagaccacctccttaggtgtccggggagctgctgaaacataatgaggaagatgctgctgatccaaaggataaaaacacagaaactagaaccaagaagcacctaaagtggactcatgcccagcatccctgcagactgactttctctgagctatagttctgcattggactgtttttcctttgctatcacctgcccaacacacaatcctggatgcttttgattggttggatttctttttttttttcctgccttttctttttctttccttgaccctgggaattataaacgagaaattgctttaaa

SEQ ID NO: 28306 - DNA, 1999 bp, Homo sapiens
atctcaaactcctgggctcaagcaatctgcccattttagcctcctaaaatgctgggattataggagtgtattagtctattctcatgctgctaataaagatacctaagactgggtaattcacaaaggaaagaggcttaactgacgcacatttccacgtggccagggaggcctcacaatcatggtggaaggcaaatgagaagcaaagtcatgtcttacatggcggcaggcaagagagcttgtgcagggaaactcccatttataaaaccaccagagctcatgaaacttattcactaccatgagaatagtatgggggaaatcgttcccatgactcaagtatctccacctggccctgcccttgtcacatgggggttattacaattcaaggtgacacttgtgtggagacacagccaaaccatatcacaggcatgagctaccacgcccgccagcatgtcttttttaaacattttaaaatctattctttatcttgtttcagagaggatttggagttacagaaacacattagactgggcatggtggctcacacttgtaatcccagcacttcaggaggtttctcctagtgtactctcacacttctgataccagatatgtgggggagggggtttcccccacacattaagcaagtgtgaaacatgatatagaaaaatgacttcactctgggccgggtgtagtggctcacgcctgtaatcctagcactttgggaagccgaggtgggcagatcacccgaggtcaggagttcgagaccagcctggccaacatggcaaaaccttgtctctactaaaaatagaaaaattagttgggggtagtggcagccgcctgtggtcccagctattcgagaggctgaggcaggagaactggttgaaccggggaggcagaggttgcagtgagccaagatcatgccactgcactctagcctgggtgacagagtgaaactctgcctcaaaaaataaaataaaggccaggcatggtggctcacgcctataatcccagcactttcagaggccaaggcaggtgggtcacaaggtcaagagtttgagactagccttagcaacatggtgaaggtgaaccccgactctactaaaaatacaaaaattggctgggcctggtggtgtgcacctgtaatcccagctacttaggaggctgaggcaggagaatcgcttggacccgggagacataggttgcagtgagccgagactgcaccactgcactccagcctaggtgacagagtgagactccatcttaaaaaataaataaataaaataaaataaatgacatcactttggttcagagctctaaaatggagggaggaagccattctaaaaaggactccctacatgacctgcaacttgaaaaaaaattaaaagctccaaaaaaaaaaacaatacaggagcttaccttgaacctttgaattgggccaaattgcgatgaccactgcatcctggaaaattttatttcaccagcactacaactcctcaacagcaccaaccaataaactatggatttttgtactaagccagttgcctctttcaaaacaacttgtcaacttgtctaatcaccctcagctttttttaaaaacccctcctctaccctctctcttcagaacacaagtggcttctagctgaatctgtctcccaaattgcaattcctaagacctcaataaaaacaccttgtcttgctaaaaaaaaaaaaaaaaaaaaaaaaaaaaaaaaaaaaaaaaaagctaacaaaaaaccaaaacaaaacaacaacacaaaacaaaaaaaaaagagagggggggcgggcataaaagatctgcccgggtggggcacagatgatgaaacacacccacatttttcgcagacaagaaggcccccacaagagaagacgcattaaagaaggacacgagaggcgcagtaaaaacacgcggcggacggcaacacagcgatcgaggacgattcaggggaacacaccaccgtcgggcggggcaccagggcaaacctga

SEQ ID NO: 28307 - DNA, 1547 bp, Homo sapiens
atctcaaactcctgggctcaagcaatctgcccattttagcctcctaaaatgctgggattataggagtgtattagtctattctcatgctgctaataaagatacctaagactgggtaattcacaaaggaaagaggcttaactgacgcacatttccacgtggccagggaggcctcacaatcatggtggaaggcaaatgagaagcaaagtcatgtcttacatggcggcaggcaagagagcttgtgcagggaaactcccatttataaaaccaccagagctcatgaaacttattcactaccatgagaatagtatgggggaaatcgttcccatgactcaagtatctccacctggccctgcccttgtcacatgggggttattacaattcaaggtgacacttgtgtggagacacagccaaaccatatcacaggcatgagctaccacgcccgccagcatgtcttttttaaacattttaaaatctattctttatcttgtttcagagaggatttggagttacagaaacacattagactgggcatggtggctcacgcctataatcccagcactttcagaggccaaggcaggtgggtcacaaggtcaagagtttgagactagccttagcaacatggtgaaggtgaaccccgactctactaaaaatacaaaaattggctgggcctggtggtgtgcacctgtaatcccagctacttaggaggctgaggcaggagaatcgcttggacccgggagacataggttgcagtgagccgagactgcaccactgcactccagcctaggtgacagagtgagactccatcttaaaaaataaataaataaaataaaataaatgacatcactttggttcagagctctaaaatggagggaggaagccattctaaaaaggactccctacatgacctgcaacttgaaaaaaaattaaaagctccaaaaaaaaaaacaatacaggagcttaccttgaacctttgaattgggccaaattgcgatgaccactgcatcctggaaaattttatttcaccagcactacaactcctcaacagcaccaaccaataaactatggatttttgtactaagccagttgcctctttcaaaacaacttgtcaacttgtctaatcaccctcagctttttttaaaaacccctcctctaccctctctcttcagaacacaagtggcttctagctgaatctgtctcccaaattgcaattcctaagacctcaataaaaacaccttgtcttgctaaaaaaaaaaaaaaaaaaaaaaaaaaaaaaaaaaaaaaaaaagctaacaaaaaaccaaaacaaaacaacaacacaaaacaaaaaaaaaagagagggggggcgggcataaaagatctgcccgggtggggcacagatgatgaaacacacccacatttttcgcagacaagaaggcccccacaagagaagacgcattaaagaaggacacgagaggcgcagtaaaaacacgcggcggacggcaacacagcgatcgaggacgattcaggggaacacaccaccgtcgggcggggcaccagggcaaacctga

SEQ ID NO: 28308 - DNA, 1707 bp, Homo sapiens
atctcaaactcctgggctcaagcaatctgcccattttagcctcctaaaatgctgggattataggagtgtattagtctattctcatgctgctaataaagatacctaagactgggtaattcacaaaggaaagaggcttaactgacgcacatttccacgtggccagggaggcctcacaatcatggtggaaggcaaatgagaagcaaagtcatgtcttacatggcggcaggcaagagagcttgtgcagggaaactcccatttataaaaccaccagagctcatgaaacttattcactaccatgagaatagtatgggggaaatcgttcccatgactcaagtatctccacctggccctgcccttgtcacatgggggttattacaattcaaggtgacacttgtgtggagacacagccaaaccatatcacaggcatgagctaccacgcccgccagcatgtcttttttaaacattttaaaatctattctttatcttgtttcagagaggatttggagttacagaaacacattagactgggcatggtggctcacacttgtaatcccagcacttcaggaggtttctcctagtgtactctcacacttctgataccagatatgtgggggagggggtttcccccacacattaagcaagtgtgaaacatgatcatggctcactgcagcctggacctcccaggctcaagtgatccttccacctcagcctcccgaatagctgggattgcagatgcgctccatcctgcccagctaatttttttttggttggtttttggttttttgagacaagtctccttctgtcgcccaggctggagtgcaatggcacaatcttggctccctgcaacctctgcctcctggaggaggctgaggcaggagaatcgcttggacccgggagacataggttgcagtgagccgagactgcaccactgcactccagcctaggtgacagagtgagactccatcttaaaaaataaataaataaaataaaataaatgacatcactttggttcagagctctaaaatggagggaggaagccattctaaaaaggactccctacatgacctgcaacttgaaaaaaaattaaaagctccaaaaaaaaaaacaatacaggagcttaccttgaacctttgaattgggccaaattgcgatgaccactgcatcctggaaaattttatttcaccagcactacaactcctcaacagcaccaaccaataaactatggatttttgtactaagccagttgcctctttcaaaacaacttgtcaacttgtctaatcaccctcagctttttttaaaaacccctcctctaccctctctcttcagaacacaagtggcttctagctgaatctgtctcccaaattgcaattcctaagacctcaataaaaacaccttgtcttgctaaaaaaaaaaaaaaaaaaaaaaaaaaaaaaaaaaaaaaaaaagctaacaaaaaaccaaaacaaaacaacaacacaaaacaaaaaaaaaagagagggggggcgggcataaaagatctgcccgggtggggcacagatgatgaaacacacccacatttttcgcagacaagaaggcccccacaagagaagacgcattaaagaaggacacgagaggcgcagtaaaaacacgcggcggacggcaacacagcgatcgaggacgattcaggggaacacaccaccgtcgggcggggcaccagggcaaacctga

SEQ ID NO: 28309 - DNA, 955 bp, Homo sapiens
gttttttgagacaagtctccttctatcgcccaggctggagtgcaatggcacaatcttggctccctgcaacctctgcctcctgggttgaagagattctcctgcctcagcaggaggctgaggcaggagaatcgcttggacccgggagacataggttgcagtgagccgagactgcaccactgcactccagcctaggtgacagagtgagactccatcttaaaaaataaataaataaaataaaataaatgacatcactttggttcagagctctaaaatggagggaggaagccattctaaaaaggactccctacatgacctgcaacttgaaaaaaaattaaaagctccaaaaaaaaaaacaatacaggagcttaccttgaacctttgaattgggccaaattgcgatgaccactgcatcctggaaaattttatttcaccagcactacaactcctcaacagcaccaaccaataaactatggatttttgtactaagccagttgcctctttcaaaacaacttgtcaacttgtctaatcaccctcagctttttttaaaaacccctcctctaccctctctcttcagaacacaagtggcttctagctgaatctgtctcccaaattgcaattcctaagacctcaataaaaacaccttgtcttgctaaaaaaaaaaaaaaaaaaaaaaaaaaaaaaaaaaaaaaaaaagctaacaaaaaaccaaaacaaaacaacaacacaaaacaaaaaaaaaagagagggggggcgggcataaaagatctgcccgggtggggcacagatgatgaaacacacccacatttttcgcagacaagaaggcccccacaagagaagacgcattaaagaaggacacgagaggcgcagtaaaaacacgcggcggacggcaacacagcgatcgaggacgattcaggggaacacaccaccgtcgggcggggcaccagggcaaacctga

SEQ ID NO: 28310 - DNA, 471 bp, Homo sapiens
cccttttaaagatggatgaggcctcggttcaatgagggccccaggcaggggacggccacacccaggtaaacgctgcatttctacaacagccacctgtgcaggccctgcatgctctgtaacctggggatttggtcttctgaaaagggcaccagagaaaaactgctcttaagcctctgttaactgacacagcagtagaactccaaggtgttgatccttggattcatgtttctcaacttcagagacacacatcactccttcctgaccactgggcatccatcccaccaggagctcctaatctgagagctgttagaaatcctccaaaagtgctgactgcagaagttggtagcttctgctcaagatgacagaacaagattaacttttgtattcttcagcaccttttttattttccattatcacactttgataccctctaaaacattaaaacaccttctagaatgcttatgtgatcaa

SEQ ID NO: 28311 - DNA, 485 bp, Homo sapiens
atgacacagcaagaaggccctcaccagatgctgagcagatgccggcaccatgcctgtggacttcccagcctccagaactgtaaacgctgcatttctacaacagccacctgtgcaggccctgcatgctctgtaacctggggatttggtcttctgaaaagggcaccagagaaaaactgctcttaagcctctgttaactgacacagcagtagaactccaaggtgttgatccttggattcatgtttctcaacttcagagacacacatcactccttcctgaccactgggcatccatcccaccaggagctcctaatctgagagctgttagaaatcctccaaaagtgctgactgcagaagttggtagcttctgctcaagatgacagaacaagattaacttttgtattcttcagcaccttttttattttccattatcacactttgataccctctaaaacattaaaacaccttctagaatgcttatgtgatcaa

SEQ ID NO: 28312 - DNA, 438 bp, Homo sapiens
ttttgtaggttcatccacataaaacttatttcacagtagctgaaaaagggagttttccagatattatcatctatgaatatccttctctgagaccatacagagtccttcgaggtgagtccagaagcatatttaaatatttcatgttcaaggataacaacattctgaagaaggtgtgacattatttcataagtcaaggttctccagagaaacagaactagtggaagacagaaaagagatttattcaaattcacacacaacaatactaaccttaaatgtaaatgggctaaatgccccaattaaaagacacagactggcaaattggataaggagtcaagacccattggtgtgctgtaattctggagacccatcttacctgcaaagacacacacaggctcaaaacaaaggaatggaggaaaatttaccaagtaaatggaaagg

SEQ ID NO: 28313 - DNA, 379 bp, Homo sapiens
gggatgtcaagatcattgacagacttgtgaggtgaaagaaagttttagtgaaactgaaaggacgggacgcagattggattgggtgcaaaatacagtaatgagataaagtggaaacaatgggtttgactggctttttagagaagtattgtaaaaagagggtaaatgaatctatgtacttgtaatcccagcactttgagaggctaaggtgggtggtttgcttgagcccaggagttcaagaccagcctgggcaacatggcgaaaccccatctctaccaaaaatagatgaaaattagccaggcatggtggtgcacacctgtagttccagctgcttgggaagctgaggtaggattgcttaactctgggaggtggaggtctcagc

SEQ ID NO: 28314 - DNA, 1715 bp, Homo sapiens
atgtatttgaggacctgctttggttccggtactgtcaagactcagggataccagaatgaatgataccttgtctgaaatagctcacaatctagtggggaaaatgaacatatgaaaataacaaagaaatattacttaaagtgcatttctaggcatacaccagatgttacgagaatacagtgaagcgtcacccaacacagtaagggaggagggccataagatcattccaagctgagagcctggtgtaaacaaaggcacagagggaagaaatcttagagtggaggtgaggaactgaaagtggtttccagtctcctaaatgtttagaggatcccaagaagtagtaagagattaagctaaagaggcagtcagagggcagaacacagatataacgttgcctaggaggctgacaaatgtgactttatcctaaggatagcaaggagttattgaagagtgctcagtagaaaagtggcatatatttgcttttataagaatacacttttcaggtattatgtaaaagatgatttgggatggagaccagggacctaaaaagacagtccaggcaaaagattagacctgaactagaggagtcatagtagggatagaggggaagaaaaatgtttaagaaacatattggaagtagaactggaaaaactgtgattgatcccaagtagaagatgagggacagagaagaaataggatgattcccaggtttcttttttaggcatctaggtagctgatgatgccatcatcttaggcaaggtttactttaggaggaacagagttggagatgttgagctccgttagggatataatgagttttaggagcctgtggacatccagttaaagaataaatgagagaacattcacatagaacaaaggtgtggtggaggctctcaccagcttaacctagagtccattccaacctgcaaactgctggttgtccccagtccagatgatgctgaactctttggcctggctgaactcttttgtccagtcacatgtcacactggacaggaagtggcttggaactcgaaaccttgttgatacacttttcctcccaaagaggtgatccaaattcctgagatggcccgacctaggatgtactgaaagaggctttgggcagtaacttctaaactgagaatgacttgtggctaaacttgaacccttgccttccagtagatgaaaggtgaagcaatttatctctcgaaagaaaaaatatggtatgattccacttatttgaggtaacagcaagacactgtctcaaaaaaaaaaaaaagaagaaaagaaaggaaggagaggaggagaggggaggggattattattattaataataataccattgttatgcataaataatataatttattgagtattcactatatgcaaagtactgtgctaaatactttacaataattccatataattctctcaacagccctgtgaggttgggctacttattatccccattttacaaaaagcacctccagatagtgtaacttgccagaagtcccatagctagtagctgaaggacagagcatttgaaccaagaccatctgattccagatctcttgttcctagcagtttactaaagcttcccaatccatgtgctggggcacactgatgggttagggataggttacagataggctactgacctcttcagtccttgggggagccgcagcccacagtgagtgacctctgccagccttacccatttt

SEQ ID NO: 28315 - DNA, 477 bp, Homo sapiens
ctaccatgcagggctccttcctccccgccccaccaccgccagtggcaattctcacacacatactccatcctgcattctttcatcgcagtcctgtgggccggttctcaccttcacatctttgctttcctgctttcctcaccttggaatgccccctaggtcctgtccaccaggaagctctggcctcatttggccacagcctagagtcttgggccttcttgcagttactccctcctaaagtgctctcctgtgttctgtggtctcaggcacttccttttttgtcacaaggcctcagtttcgtcatctgagaaatgggaagggttagacacaaatctctctcgtggtggaaaaagcttgtgctttggagtcatatggagctgaattccatccaatccacttagttccttaacttttatgagcctcaccttcctcatctgttagatggggtcttataaaaacagacagcacacactgcggtga

SEQ ID NO: 28316 - DNA, 276 bp, Homo sapiens
tgaataggaagggtggagcatatcagtgttcatgtcctgtttctgattttatactatagctttgtaagatgttaccattgagagaaactgcataaagaacacacaggaatcttaaaacttaaaactgcataggaatctataattatctcaaagaggtttaattttaaaaggagggagcccttaaaattactgtatctcctctaaagtgtgatttaatggctgcgtttttcataatattatttaaagatagtaaagcatctttaaaaaattaatcca

SEQ ID NO: 28317 - DNA, 486 bp, Homo sapiens
caggacatgggttctgagtgtataaaggacacaattcctgagtgatccctgtgggcgagtccggaaaaagtcatttgtcctggggcgccccctgctggccacagacaaaaacggcgtccccagagctcaggcctgcctgggtagacagaggctcagagagcctgcgcagacctgcctctttaggcctggggacctccatgctggccagcattcctcgggggcatggtcagatggcagcccagaggagaggtcaagtcctgcagcctctgacggcacccagctgctgtacacagaaatgtgtccaagatattttctcttctccctcttggcatcaggctccaagggttggagccttggcccaccgcaaaatgactggaactgtctgggcaaatcccttcacttcctcaaggtgctgcttggccctgtaaaatagggttgaagtgcttgctgacttcgcaggtagcctgcgacagatcgtaataggtg

SEQ ID NO: 28318 - DNA, 353 bp, Homo sapiens
tcgaccatgatcataggtcattgcagcctcgacatcctggtctcgagtgatcttcccacgtcagcttcccaggtagctgggactacaggcgcacgccaccatgcttggctaatttttgtatttttagtagagacagggtttcaccatgttggccaggatggtctcgatttcttgacatcatgatccaccagtctcagcctcccaaagtgctgggattacaggcgtgagccacggcacctggcttgaatctggcctttgaatcagatccctcctgaagctggcattgccctttccagaacttcagagcaacgtgatgcctaaagtcctcgtcgacgcggccgcgaatttagtag

SEQ ID NO: 28319 - DNA, 366 bp, Homo sapiens
gtctctgtattcagagggtgaaaagctaaaaattcatttttcagattcccttgcaactagagtgctggggtatgacctgggcctgccggttcacatgccatgtatgagacagggaggcataagtgcacaacatggggcagaaactgaatttggggagatgaatgttctgccaaacagagcagctgaagtatctggtcctgacacagctgtggcagagtttttggctccaggctcaagttaaaagtgcaaggcaggaggtagcagtggtagtctttccactattaccatcctgagttatggctgggcatttctttttgctgcatcattgcttctggctatttggcatccaagcctggttgctggcac

SEQ ID NO: 28320 - DNA, 2055 bp, Homo sapiens
gcggccgcgagtaaagtttgcaaagaggcgcgggaggcggcagccgcagcgaggaggcggcggggaagaagcgcagtctccgggttgggggcgggggcggggggggcgccaaggagccgggtggggggcggcggccagcatgcggccccgcagcgccctgccccgcctgctgctgccgctgctgctgctgcccgccgccgggccggcccagttccacggggagaagggcatctccatcccggaccacggcttctgccagcccatctccatcccgctgtgcacggacatcgcctacaaccagaccatcatgcccaaccttctgggccacacgaaccaggaggacgcaggcctagaggtgcaccagttctatccgctggtgaaggtgcagtgctcgcccgaactgcgcttcttcctgtgctccatgtacgcacccgtgtgcaccgtgctggaacaggccatcccgccgtgccgctctatctgtgagcgcgcgcgccagggctgcgaagccctcatgaacaagttcggttttcagtggcccgagcgcctgcgctgcgagcacttcccgcgccacggcgccgagcagatctgcgtcggccagaaccactccgaggacggagctcccgcgctactcaccaccgcgccgccgccgggactgcagccgggtgccgggggcaccccgggtggcccgggcggcggcggcgctcccccgcgctacgccacgctggagcaccccttccactgcccgcgcgtcctcaaggtgccatcctatctcagctacaagtttctgggcgagcgtgattgtgctgcgccctgcgaacctgcgcggcccgatggttccatgttcttctcacaggaggagacgcgtttcgcgcgcctctggatcctcacctggtcggtgctgtgctgcgcttccaccttcttcactgtcaccacgtacttggtagacatgcagcgcttccgctacccagagcggcctatcatttttctgtcgggctgctacaccatggtgtcggtggcctacatcgcgggcttcgtgctccaggagcgcgtggtgtgcaacgagcgcttctccgaggacggttaccgcacggtggtgcagggcaccaagaaggagggctgcaccatcctcttcatgatgctctacttcttcagcatggccagctccatctggtgggtcatcctgtcgctcacctggttcctggcagccggcatgaagtggggccacgaggccatcgaggccaactctcagtacttccacctggccgcctgggccgtgccggccgtcaagaccatcaccatcctggccatgggccagatcgacggcgacctgctgagcggcgtgtgcttcgtaggcctcaacagcctggacccgctgcggggcttcgtgctagcgccgctcttcgtgtacctgttcatcggcacgtccttcctcctggccggcttcgtgtcgctcttccgcatccgcaccatcatgaagcacgacggcaccaagaccgaaaagctggagcggctcatggtgcgcatcggcgtcttctccgtgctctacacagtgcccgccaccatcgtcatcgcttgctacttctacgagcaggccttccgcgagcactgggagcgctcgtgggtgagccagcactgcaagagcctggccatcccgtgcccggcgcactacacgccgcgcatgtcgcccgacttcacggtctacatgatcaaatacctcatgacgctcatcgtgggcatcacgtcgggcttctggatctggtcgggcaagacgctgcactcgtggaggaagttctacactcgcctcaccaacagccgacacggtgagaccaccgtgtgagggacgcccccaggccggaaccgcgcggcgctttcctccgcccggggtggggcccctacagactccgtattttatttttttaaataaaaaacgatcgaaaccatttcacttttaggttgctttttaaaagagaactctctgcccaacacccccacaaggtttgtaattaaaactgtaaatagtcaaaaaaaaaataattatatatattttctatttaa

SEQ ID NO: 28321 - DNA, 1939 bp, Homo sapiens
gcggccgcgagtaaagtttgcaaagaggcgcgggaggcggcagccgcagcgaggaggcggcggggaagaagcgcagtctccgggttgggggcgggggcggggggggcgccaaggagccgggtggggggcggcggccagcatgcggccccgcagcgccctgccccgcctgctgctgccgctgctgctgctgcccgccgccgggccggcccagttccacggggagaagggcatctccatcccggaccacggcttctgccagcccatctccatcccgctgtgcacggacatcgcctacaaccagaccatcatgcccaaccttctgggccacacgaaccaggaggacgcaggcctagaggtgcaccagttctatccgctggtgaaggtgcagtgctcgcccgaactgcgcttcttcctgtgctccatgtacgcacccgtgtgcaccgtgctggaacaggccatcccgccgtgccgctctatctgtgagcgcgcgcgccagggctgcgaagccctcatgaacaagttcggttttcagtggcccgagcgcctgcgctgcgagcacttcccgcgccacggcgccgagcagatctgcgtcggccagaaccactccgaggacggagctcccgcgctactcaccaccgcgccgccgccgggactgcagccgggtgccgggggcaccccgggtggcccgggcggcggcggcgctcccccgcgctacgccacgctggagcaccccttccactgcccgcgcgtcctcaaggtgccatcctatctcagctacaagtttctgggcgagcgtgattgtgctgcgccctgcgaacctgcgcggcccgatggttccatgttcttctcacaggaggagacgcgtttcgcgcgcctctggatcctcacctggtcggtgctgtgctgcgcttccaccttcttcactgtcaccacgtacttggtagacatgcagcgcttccgctacccagagcggcctatcatttttctgtcgggctgctacaccatggtgtcggtggcctacatcgcgggcttcgtgctccaggagcgcgtggtgtgcaacgagcgcttctccgaggacggttaccgcacggtggtgcagggcaccaagaaggagggctgcaccatcctcttcatgatgctctacttcttcagcatggccagctccatctggtgggtcatcctgtcgctcacctggttcctggcagccggcatgaagtggggccacgaggccatcgaggccaactctcagtacttccacctggccgcctgggccgtgccggccgtcaagaccatcaccatcctggccatgggccagatcgacggcgacctgctgagcggcgtgtgcttcgtaggcctcaacagcctggacccgctgcggggcttcgtgctagcgccgctcttcgtgtacctgttcatcggcacgtccttcctcctggccggcttcgtgtcgctcttccgcatccgcaccatcatgaagcacgacggcaccaagaccgaaaagctggagcggctcatggtgcgcatcggcgtcttctccgtgctctacacagtgcccgccaccatcgtcatcgcttgctacttctacgagcaggccttccgcgagcactgggagcgctcgtgggtgagccagcactgcaagagcctggccatcccgtgcccggcgcactacacgccgcgcatgtcgcccgacttcacggtctacatgatcaaatacctcatgacgctcatcgtgggcatcacgtcgggcttctggatctggtcgggcaagacgctgcactcgtggaggaagttctacactcgcctcaccaacagccgacacggtgagaccaccgtgtgagggacgcccccaggccggaaccgcgcggcgctttcctccgcccggggtggggcccctacagactccgtattttatttttttaaataaaaaacgatcgaaacc

SEQ ID NO: 28322 - DNA, 908 bp, Homo sapiens
gcggccgcgagtaaagtttgcaaagaggcgcgggaggcggcagccgggccggcccagttccacggggagaagggcatctccatcccggaccacggcttctgccagcccatctccatcccgctgtgcacggacatcgcctacaaccagaccatcctggccatgggccagatcgacggcgacctgctgagcggcgtgtgcttcgtaggcctcaacagcctggacccgctgcggggcttcgtgctagcgccgctcttcgtgtacctgttcatcggcacgtccttcctcctggccggcttcgtgtcgctcttccgcatccgcaccatcatgaagcacgacggcaccaagaccgaaaagctggagcggctcatggtgcgcatcggcgtcttctccgtgctctacacagtgcccgccaccatcgtcatcgcttgctacttctacgagcaggccttccgcgagcactgggagcgctcgtgggtgagccagcactgcaagagcctggccatcccgtgcccggcgcactacacgccgcgcatgtcgcccgacttcacggtctacatgatcaaatacctcatgacgctcatcgtgggcatcacgtcgggcttctggatctggtcgggcaagacgctgcactcgtggaggaagttctacactcgcctcaccaacagccgacacggtgagaccaccgtgtgagggacgcccccaggccggaaccgcgcggcgctttcctccgcccggggtggggcccctacagactccgtattttatttttttaaataaaaaacgatcgaaaccatttcacttttaggttgctttttaaaagagaactctctgcccaacacccccacaaggtttgtaattaaaactgtaaatagtcaaaaaaaaaataattatatatattttctatttaa

SEQ ID NO: 28323 - DNA, 747 bp, Homo sapiens
agggtataagggggcttggcaaaagaaagctagaagcagtatcactaaaaatgctttggcctcatcgtctgttctcttgtctacctatctttctttttctgcatccattcaggcaataaacctgtgccaggcctggagtaggctcagaggctctagaggagaatctgttccttgtctctttcagcttctagtggctactagcattcctttgcttgtggccccatcactgcagtttctgcctctgtcttcacatcaccttctactctttgatatatgtataatttctctctctctctctctttcataaggacacttgtgttggcatttagggcccacctggataatccagaataatctccccatctcaagattcttaatcacatcctcaaagatgaacccattttccagttaaggtaacattcacaggttctggggattagaacatggacatatctttagaagctatcagactaccaaaataagcaaagacattttaaaatttaccatttattaagtaccatatgccagacacctacatacatttttctcacctcaattaagttttacaataaccctgaaatgtaggtattaatgcctgtattctatagacgaggaaactgaggctcagggagattgagtcacgtgcccaatgtcacgtagctgggtaaatggacaggaactagggatttgaaaccaggtggaggctggggctccaaagccaacatgctttttgcctcaccaacagcc

SEQ ID NO: 28324 - DNA, 478 bp, Homo sapiens
gtcttaaaacaactgaagtttattctcttacacttctggagatcagaggttcaacatccattttattataccaaaatcaaagtgttggcaggggtatgctctttctggaggctctagaggagaatctgttccttgtctctttcagcttctagtggctactagcattcctttgcttgtggccccatcactgcagtttctgcctctgtcttcacatcaccttctactctttgatatatgtataatttctctctctctctctctttcataaggacacttgtgttggcatttagggcccacctggataatccagaataatctccccatctcaagattcttaatcacatcctcaaagatgaacccattttccagttaaggtaacattcacaggttctggggattagaacatggacatatctttagaagctatcagactaccaaaataagcaaagacattttaaaatttaccatttattaagta

SEQ ID NO: 28325 - DNA, 387 bp, Homo sapiens
acgtccaatactttctgccactgttactaaaaggaaggccacctgtaccagagaaaaccaaactgagattaataaaccaaaagcaaaaagatgtctcaacagtgcagtgggtgaacatgaaaaagtaataaataatcaaaaggaaaaagaagattttcattcttatcttccaattatagatccaatattaagtaaatctaagagttataaaaacgaggtaacaccctcttcgacaacagcttcagttgctcggaaaagaaagagcgatggaagcatggaagatgcaaatgtgagagttgcaattacagaacatacagaagtgcgagaaatcaaaagaatccatttttctccctcagagcctaaaacatcagctgttaagaaaacaaa

SEQ ID NO: 28326 - DNA, 362 bp, Homo sapiens
gttatgagaacatcgtgtgcctgggcatggccctcagaccagtggtgctggcctcatctgtgagcctgttagaaattcagattcaggtcaggtgcagtggctcacacctgtaatcccagcactttgagaggctgaggctagtggatcacttgggcccaggagttcgagaccagcctgggaaacatggtgaaacctcatctaccaaaaatgggccaggcatggtggtgcacatctgtggtcccagctacttgagaggttgaagtggaaagatggcttgagcccaggaggtggaggctgcagtgagccatgattgtgccactgcattccagcccgggcaacaagcaagaccctgtctcaaaaaa

SEQ ID NO: 28327 - DNA, 401 bp, Homo sapiens
aaggtctcactctgttgcccaggttggagtacagtggtcctatcatagaccactgcagccttgacctccggactcaatgctcccccttcggcctcctgagtagctaggactacagaaacgtgttaccacaccagaaataattaaaccctccaccacacacaaaacaaataacaagaaacccaaacataatatatatcttgaatgcctgagctcaacagatcctcctgcctcagcctctcaaattgctgggattaggccgggcacagcagttcatgcctgtaatcccagcactttgggaggctgaggcgggcagatcacttgaggtcatgagtttgaaaccatcctggccaacatgatgaaaccccgtctctactaaaaatacacaaattagccaggcatgg

SEQ ID NO: 28328 - DNA, 1092 bp, Homo sapiens
gaatatgttagtgcctctgagctaacaataatgttgatgctgaaagaagaagaaaggccactacttttaataaaaattaaatgtttaaatgtgaagtgtacttaaatgattaggtattatagcaataccctttgtaagtggaattgcctccacagcttggccttattagccctaagtatactaagttccttctgaaactcctgtcacccaccaaattatctgagaattctttccaccaacaccttaatcaaaccatcttctaccaagtgtgttcagaactggagtaaagtctgatcagttcattaccgctgtttctctttgctgtgtgggaattaaaaaacccatgcttttaacagtccaacagtagctggctgttcctggttgttaaatataaaacttaagtagggcaagcacttggggttccttgcagcaagacagctctacttctgtgctgctaggctccaacagaggactgcttctctgcttctggtgctcagcccttccaatccatacacagagccacttcccaggggtcagtgagcccaaacctttgtcccccttacttccccaggggcttatatctaggggttgggtaacttttctttttgaatttcaaactgcaaggggtctgatttctctcctgctttgacagtagagccaaccatttaccccaccacccttctgaaagtgactgcatgtaaacaaagctttgattagatgggccactttcagtgattctaaaatgattttctggcatctctttgagtaaagaaaatgtaggccttctcagtgcacttagagttaaaaaagaaaataaaacaaaaccaacttgattgctgacattcttgcaggaaaaaaatttttaatcatgcatctggaactctctagcccctaactctgtccatggaagggagagggaagtttataaaatgtaaaatttagaatctttaaaaaccatggcattccttaagattgcagatctcaaattatagtaaaataagttgagtttaagaaaatgaagagtataagtttgattagggatggagggtgagaggagcttgccagatgggccatatcataataggctttata

SEQ ID NO: 28329 - DNA, 2132 bp, Homo sapiens
ggcggaaacgggaacgtgcagccgcgggtgcaggagtcctggggcatggcgggggcggggcagggggaggcgcgcacagaacaggctggggcatccctcgccctggctctttgagcccggaccagacagagatgtgataatggatcatcatgtttctaccatcaagcctcgaagaatccaaaaccaaaatgtcattcaccgcttggaacgccggcggatcagttcaggcaagaccagacatctcttgaaatctatgagtaccagggctgccaggcagcagaggacctactgcagggatacgaaggagaaatcctgtccaatggcaatgaccagcggtcagtgaatatccggggccggctctttgaacgcttttttgtcctgctgcacattaccaatgttgcggccaatggtgagcacctgaaccgggagtgtagtctcttcactgatgactgccgctgtgtcatcgtgggctcagctgcctacctcccagatgagcctcaccctccattttttgaggtatatcggaacagtgaatcagtgacccccaacccacggtcccctctagaagactattccctccatatcattgaccttcacaccggccgcttatgtgatacacgcacgttcaagtgtgacaaggtggtcttgtcacacaaccaagggctgtacttgtacaaaaacatcctggccatcttgtctgtgcaacaacagaccatccatgtcttccaggtgactcctgaaggcactttcattgatgtgcggaccattggccgcttttgctatgaggatgacctgctcactgtgtcagctgttttccctgaggtacagcgggacagtcagacaggcatggccaatccctttagggatcctttcatcaattccctcaaacaccggttgctggtatatttgtggcgccgggcagaacaggatggtagtgcaatggccaagaggcgcttcttccagtattttgaccaactgcggcagctgcgaatgtggaaaatgcagcttctggatgaaaaccacctgtttatcaagtacactagtgaggatgtagtaacactgcgagtcacagatccatcacaggcatctttctttgtggtgtacaatatggtgacgacagaggtgattgctgtgtttgagaatacatcagatgagcttttggagctctttgagaacttctgtgacctttttcgtaatgctaccctgcacagtgaagttcagtttccctgctcagcttctagcaacaattttgcaaggcagatccagcgccggttcaaagacactattataaatgccaagtatggagggcacacagaggcagtacgccggctgctgggtcagctccccatcagtgctcagtcttacagcggtagcccctatctggatttgtctctcttcagttatgatgacaagtgggtatctgtcatggagcggcccaagacttgtggagatcacccaatcaggttctatgcccgggactcgggcctgctcaagtttgagatccaggcggggttattgggccgccccatcaaccacacagtgcgacgccttgttgccttcacctttcacccttttgagcctttcgctatttctgtgcagaggactaatgctgagtatgttgtcaacttccatatgcgacactgctgcacgtaggtgcctcaccagagccagattatctggtcttccaagactttgccactcacttatctcagtggactccaaagcaaaagctcccgactactagctctgttagttccagcctgctatacctcagatgggagagagccagagagaggagtgagggtggctcaacctaatggaatttttaaattgtatacaatactgctactgattgttataatatcctcttgcgttttccctgtgggaatgcccagcattaattaagtccatttcatttttgctttactttgcatttgattgctgtgaagatgaaagcattagacttttatccccttcatgtcacttcttcggcattatggtttgcatctgaaagcagttaaatcttgtttactgatgagaatgacatacatcctttccatttagctcataagcacggctatctttttaagagaaaaataaagccatggtattttcatacttaaaaaaaaaag

SEQ ID NO: 28330 - DNA, 2271 bp, Homo sapiens
ggcggaaacgggaacgtgcagccgcgggtgcaggagtcctggggcatggcgggggcggggcagggggaggcgcgcacagaacaggctggggcatccctcgccctggctctttgagcccggaccagacagagatgtgataatggatcatcatgtttctaccatcaagcctcgaagaatccaaaaccaaaatgtcattcaccgcttggaacgccggcggatcagttcaggcaaggcaggtacccactggcaccaagtccgagtgttccatcagaatgtcttccccaacttcacagttgtcaacgttgaaaagcctccttgtttcttgcgtaaattctcacctgatggacgctactttattgctttttcttcagaccagacatctcttgaaatctatgagtaccagggctgccaggcagcagaggacctactgcagggatacgaaggagaaatcctgtccaatggcaatgaccagcggtcagtgaatatccggggccggctctttgaacgcttttttgtcctgctgcacattaccaatgttgcggccaatggtgagcacctgaaccgggagtgtagtctcttcactgatgactgccgctgtgtcatcgtgggctcagctgcctacctcccagatgagcctcaccctccattttttgaggtatatcggaacagtgaatcagtgacccccaacccacggtcccctctagaagactattccctccatatcattgaccttcacaccggccgcttatgtgatacacgcacgttcaagtgtgacaaggtggtcttgtcacacaaccaagggctgtacttgtacaaaaacatcctggccatcttgtctgtgcaacaacagaccatccatgtcttccaggtgactcctgaaggcactttcattgatgtgcggaccattggccgcttttgctatgaggatgacctgctcactgtgtcagctgttttccctgaggtacagcgggacagtcagacaggcatggccaatccctttagggatcctttcatcaattccctcaaacaccggttgctggtatatttgtggcgccgggcagaacaggatggtagtgcaatggccaagaggcgcttcttccagtattttgaccaactgcggcagctgcgaatgtggaaaatgcagcttctggatgaaaaccacctgtttatcaagtacactagtgaggatgtagtaacactgcgagtcacagatccatcacaggcatctttctttgtggtgtacaatatggtgacgacagaggtgattgctgtgtttgagaatacatcagatgagcttttggagctctttgagaacttctgtgacctttttcgtaatgctaccctgcacagtgaagttcagtttccctgctcagcttctagcaacaattttgcaaggcagatccagcgccggttcaaagacactattataaatgccaagtatggagggcacacagaggcagtacgccggctgctgggtcagctccccatcagtgctcagtcttacagcggtagcccctatctggatttgtctctcttcagttatgatgacaagtgggtatctgtcatggagcggcccaagacttgtggagatcacccaatcaggttctatgcccgggactcgggcctgctcaagtttgagatccaggcggggttattgggccgccccatcaaccacacagtgcgacgccttgttgccttcacctttcacccttttgagcctttcgctatttctgtgcagaggactaatgctgagtatgttgtcaacttccatatgcgacactgctgcacgtaggtgcctcaccagagccagattatctggtcttccaagactttgccactcacttatctcagtggactccaaagcaaaagctcccgactactagctctgttagttccagcctgctatacctcagatgggagagagccagagagaggagtgagggtggctcaacctaatggaatttttaaattgtatacaatactgctactgattgttataatatcctcttgcgttttccctgtgggaatgcccagcattaattaagtccatttcatttttgctttactttgcatttgattgctgtgaagatgaaagcattagacttttatccccttcatgtcacttcttcggcattatggtttgcatctgaaagcagttaaatcttgtttactgatgagaatgacatacatcctttccatttagctcataagcacggctatctttttaagagaaaaataaagccatggtattttcatacttaaaaaaaaaag

SEQ ID NO: 28331 - DNA, 1598 bp, Homo sapiens
ggcggaaacgggaacgtgcagccgcgggtgcaggagtcctggggcatggcgggggcggggcagggggaggcgcgcacagaacaggctggggcatccctcgccctggctctttgagcccggaccagacagagatgtgataatggatcatcatgtttctaccatcaagcctcgaagaatccaaaaccaaaatgtcattcaccgcttggaacgccggcggatcagttcaggcaaggcaggtacccactggcaccaagtccgagtgttccatcagaatgtcttccccaacttcacagttgtcaacgttgaaaagcctccttgtttcttgcgtaaattctcacctgatggacgctactttattgctttttcttcagaccagacatctcttgaaatctatgagtaccagggctgccaggcagcagaggacctactgcagggatacgaaggagaaatcctgtccaatggcaatgaccagcggtcagtgaatatccggggccggctctttgaacgcttttttgtcctgctgcacattaccaatgttgcggccaatggtgagcacctgaaccgggagtgtagtctcttcactgatgactgccgctgtgtcatcgtgggctcagctgcctacctcccagatgagcctcaccctccattttttgaggtatatcggaacagtgaatcagtgacccccaacccacggtcccctctagaagactattccctccatatcattgaccttcacaccggccgcttatgtgatacacgcacgttcaagtgtgacaaggtggtcttgtcacacaaccaagggctgtacttgtacaaaaacatcctggccatcttgtctgtgcaacaacagaccatccatgtcttccaggtgactcctgaaggcactttcattgatgtcggcccaagacttgtggagatcacccaatcaggttctatgcccgggactcgggcctgctcaagtttgagatccaggcggggttattgggccgccccatcaaccacacagtgcgacgccttgttgccttcacctttcacccttttgagcctttcgctatttctgtgcagaggactaatgctgagtatgttgtcaacttccatatgcgacactgctgcacgtaggtgcctcaccagagccagattatctggtcttccaagactttgccactcacttatctcagtggactccaaagcaaaagctcccgactactagctctgttagttccagcctgctatacctcagatgggagagagccagagagaggagtgagggtggctcaacctaatggaatttttaaattgtatacaatactgctactgattgttataatatcctcttgcgttttccctgtgggaatgcccagcattaattaagtccatttcatttttgctttactttgcatttgattgctgtgaagatgaaagcattagacttttatccccttcatgtcacttcttcggcattatggtttgcatctgaaagcagttaaatcttgtttactgatgagaatgacatacatcctttccatttagctcataagcacggctatctttttaagagaaaaataaagccatggtattttcatacttaaaaaaaaaag

SEQ ID NO: 28332 - DNA, 1581 bp, Homo sapiens
gacccacgcgtccgcggacgcgtgggtcgacccacgcgtccgagaacaggctggggcatccctcgccctggctctttgagcccggaccagacaggtgctgggaatacagcaaggaattagaccagttccctgctctctggtatggtgggacagatactaaaaagagatgtgataatggatcatcatgtttctaccatcaagcctcgaagaatccaaaaccaaaatgtcattcaccgcttggaacgccggcggatcagttcaggcaagaccagacatctcttgaaatctatgagtaccagggctgccaggcagcagaggacctactgcagggatacgaaggagaaatcctgtccaatggcaatgaccagcggcatctttctttgtggtgtacaatatggtgacgacagaggtgattgctgtgtttgagaatacatcagatgagcttttggagctctttgagaacttctgtgacctttttcgtaatgctaccctgcacagtgaagttcagtttccctgctcagcttctagcaacaattttgcaaggcagatccagcgccggttagagcccaattgattaatggaggatggtctatgggccatgaaagaacaaagtcaaagataattctaatgtttctggattgaacagcttgcaagagagagttgccattaaactgtaaacctgtgggtagagcaggtttaggggagaagatcaaaagttctgttcaaagacactattataaatgccaagtatggagggcacacagaggcagtacgccggctgctgggtcagctccccatcagtgctcagtcttacagcggtagcccctatctggatttgtctctcttcagttatgatgacaagtgggtatctgtcatggagcggcccaagacttgtggagatcacccaatcaggttctatgcccgggactcgggcctgctcaagtttgagatccaggcggggttattgggccgccccatcaaccacacagtgcgacgccttgttgccttcacctttcacccttttgagcctttcgctatttctgtgcagaggactaatgctgagtatgttgtcaacttccatatgcgacactgctgcacgtaggtgcctcaccagagccagattatctggtcttccaagactttgccactcacttatctcagtggactccaaagcaaaagctcccgactactagctctgttagttccagcctgctatacctcagatgggagagagccagagagaggagtgagggtggctcaacctaatggaatttttaaattgtatacaatactgctactgattgttataatatcctcttgcgttttccctgtgggaatgcccagcattaattaagtccatttcatttttgctttactttgcatttgattgctgtgaagatgaaagcattagacttttatccccttcatgtcacttcttcggcattatggtttgcatctgaaagcagttaaatcttgtttactgatgagaatgacatacatcctttccatttagctcataagcacggctatctttttaagagaaaaataaagccatggtattttcatacttaaaaaaaaaag

SEQ ID NO: 28333 - DNA, 494 bp, Homo sapiens
gacctccctgcctcagcctcccaaagtgctggtattacaggcgtgagccactgcacccggccagtttgttcctcttttactttgtttagtgtattcttattcttcaaggctcataccaattgttgctccattaattattttaacatatttatgagcgcttaactgtcccttctcctaggtgctgggaatacagcaaggaattagaccagttccctgctctctggtatggtgggacagatactaaaaaggtaaacaacttaatttcaggaagagataaagaccattaataatatagggtgtatcagtaaattcatgtgggcagacgtaaggtgcctggggaagatttctgaggaggtactattttagctgagacttgaatgatgaaacagaggcagatctttcagcacttaaataatgttgttccacttctttctaacttccatggtttctgatgagaaatctacagacatttgaattgttgcacctctataggt

SEQ ID NO: 28334 - DNA, 2306 bp, Homo sapiens
gacccacgcgtccgcggacgcgtgggtcgacccacgcgtccgagaacaggctggggcatccctcgccctggctctttgagcccggaccagacaggtgctgggaatacagcaaggaattagaccagttccctgctctctggtatggtgggacagatactaaaaagagatgtgataatggatcatcatgtttctaccatcaagcctcgaagaatccaaaaccaaaatgtcattcaccgcttggaacgccggcggatcagttcaggcaaggcaggtacccactggcaccaagtccgagtgttccatcagaatgtcttccccaacttcacagttgtcaacgttgaaaagcctccttgtttcttgcgtaaattctcacctgatggacgctactttattgctttttcttcagaccagacatctcttgaaatctatgagtaccagggctgccaggcagcagaggacctactgcagggatacgaaggagaaatcctgtccaatggcaatgaccagcggtcagtgaatatccggggccggctctttgaacgcttttttgtcctgctgcacattaccaatgttgcggccaatggtgagcacctgaaccgggagtgtagtctcttcactgatgactgccgctgtgtcatcgtgggctcagctgcctacctcccagatgagcctcaccctccattttttgaggtatatcggaacagtgaatcagtgacccccaacccacggtcccctctagaagactattccctccatatcattgaccttcacaccggccgcttatgtgatacacgcacgttcaagtgtgacaaggtggtcttgtcacacaaccaagggctgtacttgtacaaaaacatcctggccatcttgtctgtgcaacaacagaccatccatgtcttccaggtgactcctgaaggcactttcattgatgtgcggaccattggccgcttttgctatgaggatgacctgctcactgtgtcagctgttttccctgaggtacagcgggacagtcagacaggcatggccaatccctttagggatcctttcatcaattccctcaaacaccggttgctggtatatttgtggcgccgggcagaacaggatggtagtgcaatggccaagaggcgcttcttccagtattttgaccaactgcggcagctgcgaatgtggaaaatgcagcttctggatgaaaaccacctgtttatcaagtacactagtgaggatgtagtaacactgcgagtcacagatccatcacaggcatctttctttgtggtgtacaatatggtgacgacagaggtgattgctgtgtttgagaatacatcagatgagcttttggagctctttgagaacttctgtgacctttttcgtaatgctaccctgcacagtgaagttcagtttccctgctcagcttctagcaacaattttgcaaggcagatccagcgccggttcaaagacactattataaatgccaagtatggagggcacacagaggcagtacgccggctgctgggtcagctccccatcagtgctcagtcttacagcggtagcccctatctggatttgtctctcttcagttatgatgacaagtgggtatctgtcatggagcggcccaagacttgtggagatcacccaatcaggttctatgcccgggactcgggcctgctcaagtttgagatccaggcggggttattgggccgccccatcaaccacacagtgcgacgccttgttgccttcacctttcacccttttgagcctttcgctatttctgtgcagaggactaatgctgagtatgttgtcaacttccatatgcgacactgctgcacgtaggtgcctcaccagagccagattatctggtcttccaagactttgccactcacttatctcagtggactccaaagcaaaagctcccgactactagctctgttagttccagcctgctatacctcagatgggagagagccagagagaggagtgagggtggctcaacctaatggaatttttaaattgtatacaatactgctactgattgttataatatcctcttgcgttttccctgtgggaatgcccagcattaattaagtccatttcatttttgctttactttgcatttgattgctgtgaagatgaaagcattagacttttatccccttcatgtcacttcttcggcattatggtttgcatctgaaagcagttaaatcttgtttactgatgagaatgacatacatcctttccatttagctcataagcacggctatctttttaagagaaaaataaagccatggtattttcatacttaaaaaaaaaag

SEQ ID NO: 28335 - DNA, 1316 bp, Homo sapiens
gacccacgcgtccgcggacgcgtgggtcgacccacgcgtccgagaacaggctggggcatccctcgccctggctctttgagcccggaccagacaggtgctgggaatacagcaaggaattagaccagttccctgctctctggtatggtgggacagatactaaaaagagatgtgataatggatcatcatgtttctaccatcaagcctcgaagaatccaaaaccaaaatgtcattcaccgcttggaacgccggcggatcagttcaggcaaggcatctttctttgtggtgtacaatatggtgacgacagaggtgattgctgtgtttgagaatacatcagatgagcttttggagctctttgagaacttctgtgacctttttcgtaatgctaccctgcacagtgaagttcagtttccctgctcagcttctagcaacaattttgcaaggcagatccagcgccggttcaaagacactattataaatgccaagtatggagggcacacagaggcagtacgccggctgctgggtcagctccccatcagtgctcagtcttacagcggtagcccctatctggatttgtctctcttcagttatgatgacaagtgggtatctgtcatggagcggcccaagacttgtggagatcacccaatcaggttctatgcccgggactcgggcctgctcaagtttgagatccaggcggggttattgggccgccccatcaaccacacagtgcgacgccttgttgccttcacctttcacccttttgagcctttcgctatttctgtgcagaggactaatgctgagtatgttgtcaacttccatatgcgacactgctgcacgtaggtgcctcaccagagccagattatctggtcttccaagactttgccactcacttatctcagtggactccaaagcaaaagctcccgactactagctctgttagttccagcctgctatacctcagatgggagagagccagagagaggagtgagggtggctcaacctaatggaatttttaaattgtatacaatactgctactgattgttataatatcctcttgcgttttccctgtgggaatgcccagcattaattaagtccatttcatttttgctttactttgcatttgattgctgtgaagatgaaagcattagacttttatccccttcatgtcacttcttcggcattatggtttgcatctgaaagcagttaaatcttgtttactgatgagaatgacatacatcctttccatttagctcataagcacggctatctttttaagagaaaaataaagccatggtattttcatacttaaaaaaaaaag

SEQ ID NO: 28336 - DNA, 999 bp, Homo sapiens
ttttagatggaattgcactgtcatccagtctagagtgcagtggcgtgatctaagcttacagcagcctccacctcctgggttcaagtgattcttgtgcctcagcctcctgagctgggactacaggcacacgccaccacgcctggctagtttttgaatttttagcagagatggggtttcaccatgttggccaggctggtctcgaattcctgacctcaagtgatcctgcctcggcctcccaaagtactgggatcaggggtgagccactatgcctggccaagggcttagtcttaaatataacctctagtcaaaatgtttaaacaaatttgtacataaatgtgatttaaaaaaatttttttaatagtaccaaaggatattcagtgaaagtgagtttcctgcccactccctgatccacccagttctttaggcaaccactgatagcattttcttaagtattcttccagatatcgtctatgcatatgtaaaagtatctgtctttctccttttaaaaacacaattggtaatatatcatacttgctggtttgcaccttgctttttttgcttaatatatctagtttataatgacctaatgtgcaaatttttgcatctgccctaaatatctactggtttatttttataatttttgtgtctatactatttgcaagcagtatgtgtcagtagactttattattaataaataaaaagccaatttggatagaatcactttataaattggtagtgctggttttttactaaaaatatttttaagttcttcaaaagaagttttatgagtgcatcttacagatctggtgaagatcttggcacattattgtatgctgtttgttgacttgtgtccgcatcggtgtccctgaggctctagcaattatgtcttgactgataaggctctaatttcttctactgtgttaacttgcttctggcaagattgaacagatctactgaaaccttgaaaggttttctgggtactcttaataaaattgcaaa

SEQ ID NO: 28337 - DNA, 716 bp, Homo sapiens
ttttagatggaattgcactgtcatccagtctagagtgcagtggcgtgatctaagcttacagcagcctccacctcctgggttcaagtgattcttgtgcctcagcctcctgagctgggactacaggcacacgccaccacgcctggctagtttttgaatttttagcagagatggggtttcaccatgttggccaggctggtctcgaattcctgacctcaagtgatcctgcctcggcctcccaaagtactgggatcaggggtgagccactatgcctggccaagggcttagtcttaaatataacctctagtcaaaatgtttaaacaaatttgtacataaatgtgatttaaaaaaatttttttaatagtaccaaaggatattcagtgaaagtgagtttcctgcccactccctgatccacccagttctttaggcaaccactgatagcattttcttaagtattcttccagatatcgtctatgcatatgtaaaagtatctgtctttctccttttaaaaacacaattggtaatatatcatacttgctggtttgcaccttgctttttttgcttaatatatctagtttataatgacctaatgtgcaaatttttgcatctgccctaaatatctactggtttatttttataatttttgtgtctatactatttgcaagcagtatgtgtcagtagactttattattaataaataaaaagccaatttggataga

SEQ ID NO: 28338 - DNA, 462 bp, Homo sapiens
ttttttttccctccagagccaaggccaaatgtcagggatgccccagcatggccccgagcagggactatgaggagggggccgtgcattcttcgctctttgggggcctgggcggaggaccctgctgagacgcccctctgggaggcccgaaggctccctgagtctcttgtcctgtggtgactgtgggtctctgccgtgcatctgcttcagtccgccagttccatggcccgcccaccagtgccgtcgcaaccccgtcctttggactgggcttttcaggacatccggagagccttggtgtgagaagcaggccccgaggctaccttctggtcccccgtcctggggttggtcccctaagcgaacgaaagcgtgctttcagccctgtgtggacggagcgtggcgcctccagcctcactcagttctgtgtgtcctaagccgtgtcctggcactttctcttggaaactgagg

SEQ ID NO: 28339 - DNA, 423 bp, Homo sapiens
ttaaaggcagtcttgctatgttgcccaggctagtctcaaactcttggcctcaagtgaccctaccacgttaggctcctaacatgctgggattatagacatgagccaccccatctgccgtagttttggcaaagttctttattaaagtaatagttgctcctacaaaaacagtattcatttttagggtaatactatactgatttttttatggaaatctttttgatatcctgtaatttataattgtcatagtatctatccatttgcatagtttttcttgtatctgtcacatctttctaagtatttatttcattttttctcaagtgctctagcagatctgtcaaatgcttagcagtatcttttccatatgttcaaacccatcactttaagttattaattttttttgacttagaaaacttcctctcacag

SEQ ID NO: 28340 - DNA, 357 bp, Homo sapiens
ggatttatgttggggaataattgatgtgtagattacaatcaaagccatgaatgataacacctgtggagggtgttgaagaacagaggacaaaatcagagatccttgtctgggtgcagtggctcacacctgtagtcccagcactttgagaggctgatgcagggggattgcatgagcccaggagttcgagaccagcctcagtaacatagtgagaaccctgtctctacaaaaaataaaaaatcagccaagtgtgatggtgcacgtgtagtctcagctactcgagaagctaagatgggaggaacgcttgagcccaggagatcaaggctgcagtaagctatgatctgcttactacaccccaac

SEQ ID NO: 28341 - DNA, 757 bp, Homo sapiens
taccacgtatctctaacattactgtgaagagactaaataggaagaaagataataggtgaggtgatgaggcacaaataccaggatggggtagatcaaatagaaaagaaacctggaaagatacagcagaggctgggcaccgtggctcatgcctgtaatcccagcactttgggaggccaaggtgggcagatcacctgagatcaagtatttgagaacagcctggctaacatggcgaatcctcgttttgaccaaaatatagaaattagcctggtgtggtggcgagtgcctgtaatcccagctattcaggagggtgaggcagaagaatggcttgaattcgggaggcggaggttgcagtgagctgagatcctgcaactgcactctggctgggcaagagcgagactccatctctaaaataaaattaaagtaatataaaaaactgcttctcatgaaagctttggtataatcttacgaggtaacatcattgttttgcaactacggtatgtgttcaaaatgttcttctttgaccccacatttcattagatatatttttaagccattttaaaattgtttttctctgaaatttattgtgtttagtttacattgaggactgcatgctttctagtctgtatcatacattggaaacattttctagtacctgataaatgattttaggttgtttcgatgtgtacttgataaagatatcaaggaactttttctttatgctaacattaaaatttagttgaagtagcctattattcca

SEQ ID NO: 28342 - DNA, 491 bp, Homo sapiens
agagaccacaccactaaccatccccaactccatggggttcgagactccatcttggtagttctgtgcctccccccagaccccgcccctggggaaatagcctcacggggttggctgttccagactcaggttccagaacagccctcggcctccgaggctccccgcctccactctagttctagatgagtgggaggcgtgcccccctcctccagtacgtcccgctgctgtgctctggggatttctgggatatatggaggattctttccccagaggctcccaatcagcttttgttctagacttccccatcccgaagccatcacttctccccgcagcccgcctgccgtgcatggctcctgtctggctcggacccaccccaactctccccagtgcctgccactctctgggactctcctcctcccctcctcttcccttagcctctcccacccggccacagctgctggagaataaatttgggatgctgatgctgaagtgtt

SEQ ID NO: 28343 - DNA, 360 bp, Homo sapiens
gagctacagtcatctgaaggatgtatgggtggtagagatttgcttccaagatggcttactcatggctcactcacacgactcttggaaggaaaccctagttcatagccatgtggatctctccatgaagctatttgagtgtccttaaaatgcagcctatacttaaggggagggaaattaaactccatctcctgaagggagtactgtcgaagagtttgaggacatacagtcacaccttacttaacagcaggagaatcacttgaacctgggaggcagaggtagcagtgagccaagatttgccactgcactccaccctgggtgacagagtgagactccatctcaaaacagacaaacgaaaagaac

SEQ ID NO: 28344 - DNA, 619 bp, Homo sapiens
ccaccttggcctcccaaagtgctgggattacaggcgtgcacatgcacctggcctctgcttttttattttaaaagcacaactaactggtagataaagtgatttgtctttagtatttgataactaatgggttttagagtgttatttataagatgtagtaaattatcctcatcattatttttaagacaaatttataagacaagtgtaatagaaatagatcaacagcacaatagaaaaagatggcagaaaacatgaatacgtaattcacagatgaaagcaaaacaaatggtccttttattaagggaatgcaaagttaaaaatcaactagacccttttttgtttgtttcttcttggattggcaaagaggagcacttaaaagctgtattttgttttggaggattagtttggttatgtctactaatgactaaatgtgtacatacattttgacccattagttacacttcaaagaattttatccaacaaaaatgtactgagacacattgcttagtataataagccattgaagcttacccaaatattcatcaatgagaaataggttaagaaaattatagtacaaccatacatgaaactgatgtagctgtaaaagaaatgagatcgattt

SEQ ID NO: 28345 - DNA, 705 bp, Homo sapiens
  misc_feature (253)..(254): n is a, c, g, or t
  misc_feature (256)..(256): n is a, c, g, or t
  misc_feature (261)..(261): n is a, c, g, or t
atgagatgggctgccccaggaaagaagacatctggtctgcaacagaaaaatattgaagtgaaaacaaaaaagaacaaacagaaaacacctggaaatggagatggtggcagtaccagtgagactccccagcctcctcgaaagaaaagggcccaggtagatcctactgttgaaaatgaggaaacattcatgaacagagttgaagttaaagtaaagattcctgaagagctaaaaccatggcttgttgatgactggnncntaaancaggcaaaacagctcttctatcttcctgccgagaagaatgtggattccattcttgaggactatgcaaattacaagaaatctcatggaaacacagataataaggagtatgcagttaatgaagttgtggcagggataaaagaatacttcaacctaatgttgggcacccagctactcaacaaatttgagagaccacagtatgccgaaattcttgcagattgtcccgatgcacccatgtcccaggtgtatggagtgccacatctcctgagattatctgtacaaattggagcaatgttggcctatacacctctgaatgagaagagccttgctttattactcaattatcttcacgatttcctaaagtacctggcaaagaattctgcaactttgtttagtgccagcgattatgaagtggctcttcctgagtaccatcggaaagctgtgtga

SEQ ID NO: 28346 - DNA, 466 bp, Homo sapiens
cctgggttcaagtgattttcctgcctcagcctcctgagtagctgggattaccggcacgcaccactgtgcctggctagttttgtatttttagtagagacggggtttctccatgttggtcaggctggtctcgaactcccgacctcaggtgatccgcctgccttggcctcccaaagtgttgggattacaggtgtgagccaccacgcctggccatatttctagttttgagcatgcctgtttacttaaaggttatgtgtctagttttgatgggtgggaaattagaatttcatcggggtgatgaaatgagcaatttgatcttgtgtttttcagaatatagtaatcccctccccgccaaattatttgtttgtagtgtgaaaatcaggtatactggattataaaccagtatcttccgtcccaaaaggcttaatttggttcagacactgctttattgttagaggcagagatttag

SEQ ID NO: 28347 - DNA, 253 bp, Homo sapiens
tggagaaatccattttattcttgtaagaaataggaataactataacaggaagtatgcaagactttaatgaaggaaactataaaacagtaccatagaggggccgggcgtggtggtttctgcctgtaatcccagcactttgggaggccaaggcaggtggatctcctgaggtcaagagttcaagaccagcctggccaacatggtgaaaccccgtttctactgaaagtacaaaaattagcagggcgtggtggtgtgc

SEQ ID NO: 28348 - DNA, 474 bp, Homo sapiens
ccattaactgatggatgggtaaataaattgtggtatgtacatataatggaatactcagccatatagtatattagaagtatcagtacttctaatatactagtaaatggtggatgagcctccaaaatattatgttagtgaaaggagccaagcacaagtgattagatactatatgattcaatttatgtgaaatactaaaatagataaatccatagtgacagaatgcagatgcaaggggctaggggcagggaggagagaatggggagcaactgcttaatgggtatgggttttattttggagttgattaaaatgtttcacaacaagatagaagggggtggttgcgcaacattctgaatgcactgaatgccactgaattgtttacttgataggtgcagcaaaccaccatggcacatgtatacttatgtaacaaacctgcacattctgcacatgtatcctggaacttaaagtaaaataaaa

SEQ ID NO: 28349 - DNA, 369 bp, Homo sapiens
aaatctctgtgacttttggtttaaagatttcttagacagtacatataaaattaactatataaggaaaaaatggacaaatttgactttatcaacattaaaaatttctgctcattgaaagactcaaaatgaaaaggcaagcagttttggagaaaatatttgcaatacatatatctgaaaaaggacttgaatgtataatatatacataaagatgctcttacaacttcataatgagaaaataaccccataaagagaagggcaggccgggtgcagtggctcatgcctataatgccagcacttttggaggctgaggtgggtgaattgcttgagcccaggagtttgagaccagcctgggcaacatggtgaaaccca

SEQ ID NO: 28350 - DNA, 414 bp, Homo sapiens
gaggaggggtgaattacctgaagctcgctgttattgtctgtgagtcacatggtgaatatgtgagggggctcaagttaaagggtaactggttagggaagattttccctctggccccacacaattactcaggcttcccctggaagctatcacttctctttggtaggaggttctcttccagctctgtgccttaaattaaccgaacatggccatggttccagaaatttgcctgccctgatctgttcactatgatgattatgtacatgattccctggttccagatctgcactcactccatagtccatctggcttctgactctggctccattcccattttatagttctgctcctgtccttcgtactagactttagtatttggtttcctatttctgactctctgcctgctgccacaaaaaa

SEQ ID NO: 28351 - DNA, 456 bp, Homo sapiens
gctgagattacaggtgtgagccaccacacctgggctaaaactactgatataatttgaggaagctatttttttcccaataaaatttccactactcaaatttggctacattattgagcacttaatgcatctttatgaccttattggatacttttctctatgttttcttatttaattcctgtaagagctccaaaaagtattacatttttcttttcttttttaaaaaaaaataaagatgggataattgtctttcctgtcagggatcatgtaccttctcggcccaaaagctttccaataagattctcaattctcctggtttagagtgtccaaggtgcctgtcacaattctgtgcactatgcttgaagtgctaggttcgtgctctatgctctttgccaaaaacaaactgagtagccagctattggagcccccttcattcatgggtggcaaccagtggcttat

SEQ ID NO: 28352 - DNA, 735 bp, Homo sapiens
cttctgcaaatcccatcctggctcagtgaaaggcaccaccatcttgctggtcaccaagcaaacacctgggagacatccctgcctccatctccctctcctgccatcagatcaaaggcccatcacttcagcttcctctgaaaatccctctcttcttctctggccccacaatcaatcatctctcccttggcctgcgtttcctgcctgaggcatcgaactcgaggtcttcctgcctggaatcctccaagctaccttccatttggccacggcataatcttaggatgcaggtgtgaccaagtgcatgctttgattaaaaccctcagtgacttctctcaccggtaggataaagccacagctcttccgcagggcctcagaggccctccctcaacaacactgtccatcctgcctctcttctgctcagttttggctgtcaagctgctgtggaatgtgccgtgcctgctgccaggagggccctcctgaggagtctgtactcacagtcagcctcttgtaaagccatttccaggcaggatgggggacttccctcatcccagtacttgtcacatgctaatatgcttgtccagttttgtgtcagtctccccactggacagcttcttctgggtgagaacttaactgtgtcacactttggctgccagtatttgtagaagtgtttgctgaatgaataaatgactgactgaagcaagtcctcagcttggaggaatccagcaagcaacttctcag

SEQ ID NO: 28353 - DNA, 404 bp, Homo sapiens
agttttgctcttgttgcccaggctggagtgcaatggtgtgatcttggctcacgacaacctgcacctccagggttcaagcaattctcctgcctcagcctcctgagtagctgggattacaggcatgtgacatcatgcttggcaaattttgtatttttgggagagacggggtttctccattttggtcaggctggtctcgaactcctgaccttaggtgatcctcccacagtgctgggattacaggtgtgagccaccgtgcccagctgccttttcttatttataaaatgagcagagtaacattgtttcttcctctctcaaaaggaagatgaaagtggtgattgctcaaacactcagaacataaaatgctctacaaatgtaacaagttacaattagtgtgctatatttgt

SEQ ID NO: 28354 - DNA, 363 bp, Homo sapiens
cagctagtacatgacagaactgagattcactctgcagtctgtagacttccagtaactccaaacctcatactttttcttttatgttacacggactctgtttttaatggcatatttaaatgagatatttaagtgggaaagtaatagacaaccactcttacctgttaaaatccaaagtaattctctagtttttaaatggagcacatttaaaaaactttgtgcaccagtttgaactaccactgcaacagagaaatactagaacatcagagtattctctaaaccagatcattacttcattcactttgattgaatggagttgcatattttaaaaagacttctggatgcatggaaaacatatatagtttg

SEQ ID NO: 28355 - DNA, 216 bp, Homo sapiens
agactccagcattagtcaactaagggatgttgtaggtcatccctgagaacgagggctgcttgctctggggaagctgggaaatggcaccaggtgtcaggccctactgcccaggatgggatgacagctgctggtgttaattacgtttctgggcagaacagggtaaagtccttgggggtgagagtttttgtttaggcactgtgttccctgtacctgttg

SEQ ID NO: 28356 - DNA, 687 bp, Homo sapiens
ggcatgatcccttctggaattgaattctgcattcttcttctatcactaatcaaacaaaacactatcagaagaaaacatttccataactggatccggagtgaaggaaaatttcagatacttagacatgcatatacaataaacagtgtttcctgacaggctcattaaaaaagaatgactccactatgtgtcaactgcacaaatagaatccattataagactatggactcttacttctgaagtctgcctttgtgcccacctaagattaggaaaactaaatcttccactagaatttaaatatcacagaagcagaaacgattgcaatctctttccccagtgccttccttcctctttctctcagtcttgggtaggtcctggtacatatgaggcacttgcttaaaaaaataactgaaggaacgaatgaagttgcttaaggccgggagcagtagtctgtagatgagtcgactctcacctgtagtcccagtactttgggaggctgaggcaggaggatcgcttgaggccaggagttcgagactagcctgggcaacattgtgagatcccatctttacaaagaaattttaaaaattagccaggtgttgtgacatgtacctgtagtcccagccaattgggaggctgaaacagtaggatcacttgagcccaggagtttgaggctgagcaagatcttgtctt

SEQ ID NO: 28357 - DNA, 323 bp, Homo sapiens
gcaaattccttgaaaacagggccgtgtcttgttaatctctgatccctacttatatcaagcatagtaccctgcataaagtttccatattgtttatttggtttctcaacagttcctatgtataactcttgtttctctaatcaggtcaaaaaagtcaagtctctgaaggagggcctgtggtttctccttttctcaaatcctccgcagcttttagcaccaggttttgcagacagaatatgattaatacatacccaatagatgtcagaatgtaatcgactttaaaaaatgacccaagcaacatttttcaaaacacatttttgaaagta

SEQ ID NO: 28358 - DNA, 452 bp, Homo sapiens
gaaggatggcatccccaatgtcactcttgtttcttcctctgcctctctactagtatttatgtctgtgttcctaaactttgctgttcatcagaattactaggaggtttcattataccaatttctggatctcatcatagacctactggagcgtagcacctggaaatcccatttttaaagtgttttttgggtgattctttcgcaactagtcttagacttttggatttgttacacaggtcagttttcaaatccttttgacacatgaaccctttttagtataatagataagtaatgaaccttgggaattgaaaatcatttcatgaataattacatagtgttggaagtattttcaactaaaaatcacttagattagtaatgttcattaaaaatggtatgttgtaaagttgaaacacagtttttaataataattaaagaaaaactaattttttccccat

SEQ ID NO: 28359 - DNA, 124 bp, Homo sapiens
ttcagatttctaaatatcatccccacattggcaattatgcctgctttagagacaaaggaactatgctcaagaaaagtatctgttcagggctatacagtttttcagtgtcagaggtaagttttta

SEQ ID NO: 28360 - DNA, 339 bp, Homo sapiens
ctgggcaactgagtgagactccatctcaaaaaaagaaaattagcagttagagctgaggttacatcgaagattttttactatgctttaaaagacttggacagcatgtcctggaacacaatctaacaacaaagtgaagtatgcattttatacatgttcacttaaaagcagtagctctggaaggaatcaattctttttttgtgtgccccccaaaattaaaaagagtgataaattactggaggatgtgtgaactggtcatgttttgattcactttccataagagtggcaatttgaaaataaaaagtggagagagaaatatttgttctactttggaaattataa

SEQ ID NO: 28361 - DNA, 2292 bp, Homo sapiens
ggagtatgttccttcagggagaagttctggcccattgcacaaacacttggaaattaacttttccctaaattcaagatagtgtggtgtcggaaggaaatgggacagtaaattaggagacgcgggctccacctttaccttactacgtggcctttgatgagctggcttaacatccctgagtgattccatgatagagatctatactccaaactttattcctggtatctagttggcttcactgccacagacactgtactctctctttttagaagtttttttccttttttttccccctcaattggcttatttagtaaatttaggtctgaatgaattggtacctaaaagcttccaaatctatacatttcagaatatgggaattttcttcctcttcttcccccatatcccaacatggaattctggaaaactgtgcctcttcccctgttctgccttcatgggggagagactggatgaaatctacaaaaacagccaaaagtgccaccctggcttcatgtcttgaatttctaacttgctcttggcaaaggtcgctttattttttaatttttttccttgcattttcttttttattctattgctgctgcaaaaattaaggcaaaagtagctttcgatctttcatatttcatcctggtttcacaaggagtcacttatcttaggaggtctgtaagtcaggttacaaggccgggagcggtggctcacacctgtaatcccaacactttgagcggctgaggtgggtgtatcacctgaagtccggagtttgagaccagcctggccaacatggtgaaaccccgtctctactaaaaatacaaaaaattggctgggcatggtggtgggtgcctgtaatcccagctacttgggaagctgaagcaggagaatcacttaaacccaggtggcggaggttgcagtgagccgacatcgcgccattgcactccagcctgggtgacgagtgaaactccatctcaaaaataaaaattgaaaaatcaggttacaaaacaccatttttcccgaaataagacaataagaggcttttctctgaattcctttatattgagcctttcagaattctccctgggtgggcaatttctttaaatagtatttgaccctcagatcaatcctgggaatttttttcatttgggtagcaaaagctagagtattgctgtggcgattataatacttttaaaaagttttaccattttaaagttgccaacatttaattaaggttttcctttgaagcctcctttaatttagggagtaaaatgttagctaaaccaattatatactatatactatacactgtatctcctgtggccatgagaggtgtggctataccgaacagaaacatgcctactgttcaggaaagatgtcagttctggtaacacctctctgtattgggatctgttaattttgtaaatctaaattcttctgctcttggccaggtgcagtagttcatgccctgtaatcctagaactttgggaggctgaagggggggcggatcatttgaggtcaggagtttgagaccagcctggccaacatggtgaaaccccatctctactaaaaagtacaaaaattagctgggtgtggtggtgcgtgcctgtaatcccaactacttgggaggctgaggcaggagaatcgcttgaacctgggaggcagcggttgcagtaagccaagactatgccactgcactcccgcctgggtgacaaagcaatattctgtgtcaaataaataaattcattcttctgctctcctgacttagagaaatggtttgcttaaaatgctagtaacaaacatcacagtcaacaggagcttgcttcatgcgaaggatcaatgtgatttgtggatggagatgatagtgatgaaattcctgtttcatggggctgtttttcttttcatctcactgggcagcaggtttagtgaggcagtgagatgctgctgctgtggattcttgtagctatgcctcggcttcttggcatatcaggtaggaacctgttacaagtgaaatacttgaaacctctctgaccaagagcctctgatggagtgggaggtgagctaattctctgaccagcttggggcactgtttcagccactggtcacattccttgcttcaaactgaaattcagtttggctttgagtatagggatacatggtggattcatgtacttcagtgtttgttttgaccaaagtttatttttctagtgcattttctaagtcaaagtggtgaaaatatgtaataattttagtatgcatgactcagtctgaaacaataaaaatctctgaaaaatg

SEQ ID NO: 28362 - DNA, 2793 bp, Homo sapiens
ggagtatgttccttcagggagaagttctggcccattgcacaaacacttggaaattaacttttccctaaattcaagatagtgtggtgtcggaaggaaatgggacagtaaattaggagacgcgggctccacctttaccttactacgtggcctttgatgagctggcttaacatccctgagtgattccatgatagagatctatactccaaactttattcctggtatctagttggcttcactgccacagacactgtactctctctttttagaagtttttttccttttttttccccctcaattggcttatttagtaaatttaggtctgaatgaattggtacctaaaagcttccaaatctatacatttcagaatatgggaattttcttcctcttcttcccccatatcccaacatggaattctggaaaactgtgcctcttcccctgttctgccttcatgggggagagactggatgaaatctacaaaaacagccaaaagtgccaccctggcttcatgtcttgaatttctaacttgctcttggcaaaggtcgctttattttttaatttttttccttgcattttcttttttattctattgctgctgcaaaaattaaggcaaaagtagctttcgatctttcatatttcatcctggtttcacaaggagtcacttatcttaggaggtctgtaagtcaggttacaaggccgggagcggtggctcacacctgtaatcccaacactttgagcggctgaggtgggtgtatcacctgaagtccggagtttgagaccagcctggccaacatggtgaaaccccgtctctactaaaaatacaaaaaattggctgggcatggtggtgggtgcctgtaatcccagctacttgggaagctgaagcaggagaatcacttaaacccaggtggcggaggttgcagtgagccgacatcgcgccattgcactccagcctgggtgacgagtgaaactccatctcaaaaataaaaattgaaaaatcaggttacaaaacaccatttttcccgaaataagacaataagaggcttttctctgaattcctttatattgagcctttcagaattctccctgggtgggcaatttctttaaatagtatttgaccctcagatcaatcctgggaatttttttcatttgggtagcaaaagctagagtattgctgtggcgattataatacttttaaaaagttttaccattttaaagttgccaacatttaattaaggttttcctttgaagcctcctttaatttagggagtaaaatgttagctaaaccaattatatactatatactatacactgtatctcctgtggccatgagaggtgtggctataccgaacagaaacatgcctactgttcaggaaagatgtcagttctggtaacacctctctgtattgggatctgttaattttgtaaatctaaattcttctgctcttggccaggtgcagtagttcatgccctgtaatcctagaactttgggaggctgaagggggggcggatcatttgaggtcaggagtttgagaccagcctggccaacatggtgaaaccccatctctactaaaaagtacaaaaattagctgggtgtggtggtgcgtgcctgtaatcccaactacttgggaggctgaggcaggagaatcgcttgaacctgggaggcagcggttgcagtaagccaagactatgccactgcactcccgcctgggtgacaaagcaatattctgtgtcaaataaataaattcattcttctgctctcctgacttagagaaatggtttgcttaaaatgctagtaacaaacatcacagtcaacaggagcttgcttcatgcgaaggatcaatgtgatttgtggatggagatgatagtgatgaaattcctgtttcatggggctgtttttcttttcatctcactgggcagcaggtttagtgaggcagtgagatgctgctgctgtggattcttgtagctatgcctcggcttcttggcatatcaggtaggaacctgttacaagtgaaatacttgaaacctctctgaccaagagcctctgatggagtgggaggtgagctaattctctgaccagcttggggcactgtttcagccactggtcacattccttgcttcaaactgaaattcagtttggctttgagtatagggatacatggtggattcatgtacttcagtgtttgttttgaccaaagtttatttttctagtgcattttctaagtcaaagtggtgaaaatatgtaataattttagtatgcatgactcagtctgaaacaataaaaatctctgaaaaatgtgcatggggttcttttgtgatgatgacagtttggataaaggttccaaggttcattattcacagcccgggtagaccacctcctctgcaggtgagggagggaggggcactgtgataggacagtgcattctgtagatgcgctggctgcctctgaagatcatacacaattagactgctgcagtatggagaggagaatgcagctagctacacagagcagtagaggtgatatgcaaatttttacattcttgaggcccagctatacttcttggactggccttgagtctttccagtgatagccagcgatttcctcaatgtgcgcatgtgggctgggcacacatgtgttaaggacactcataaataatgtattttaaccttcagctacccttaatgaagctgcattactgttcctgttggcaaaatgtagcttgcccagtgacacacaactagccaaatactaaggatgggattcaaacccaggaagtatgacaagcccactgttttctc

SEQ ID NO: 28363 - DNA, 2564 bp, Homo sapiens
ggagtatgttccttcagggagaagttctggcccattgcacaaacacttggaaattaacttttccctaaattcaagatagtgtggtgtcggaaggaaatgggacagtaaattaggagacgcgggctccacctttaccttactacgtggcctttgatgagctggcttaacatccctgagtgattccatgatagagatctatactccaaactttattcctggtatctagttggcttcactgccacagacactgtactctctctttttagaagtttttttccttttttttccccctcaattggcttatttagtaaatttaggtctgaatgaattggtacctaaaagcttccaaatctatacatttcagaatatgggaattttcttcctcttcttcccccatatcccaacatggaattctggaaaactgtgcctcttcccctgttctgccttcatgggggagagactggatgaaatctacaaaaacagccaaaagtgccaccctggcttcatgtcttgaatttctaacttgctcttggcaaaggtcgctttattttttaatttttttccttgcattttcttttttattctattgctgctgcaaaaattaaggcaaaagtagctttcgatctttcatatttcatcctggtttcacaaggagtcacttatcttaggaggtctgtaagtcaggttacaaggccgggagcggtggctcacacctgtaatcccaacactttgagcggctgaggtgggtgtatcacctgaagtccggagtttgagaccagcctggccaacatggtgaaaccccgtctctactaaaaatacaaaaaattggctgggcatggtggtgggtgcctgtaatcccagctacttgggaagctgaagcaggagaatcacttaaacccaggtggcggaggttgcagtgagccgacatcgcgccattgcactccagcctgggtgacgagtgaaactccatctcaaaaataaaaattgaaaaatcaggttacaaaacaccatttttcccgaaataagacaataagaggcttttctctgaattcctttatattgagcctttcagaattctccctgggtgggcaatttctttaaatagtatttgaccctcagatcaatcctgggaatttttttcatttgggtagcaaaagctagagtattgctgtggcgattataatacttttaaaaagttttaccattttaaagttgccaacatttaattaaggttttcctttgaagcctcctttaatttagggagtaaaatgttagctaaaccaattatatactatatactatacactgtatctcctgtggccatgagaggtgtggctataccgaacagaaacatgcctactgttcaggaaagatgtcagttctggtaacacctctctgtattgggatctgttaattttgtaaatctaaattcttctgctcttggccaggtgcagtagttcatgccctgtaatcctagaactttgggaggctgaagggggggcggatcatttgaggtcaggagtttgagaccagcctggccaacatggtgaaaccccatctctactaaaaagtacaaaaattagctgggtgtggtggtgcgtgcctgtaatcccaactacttgggaggctgaggcaggagaatcgcttgaacctgggaggcagcggttgcagtaagccaagactatgccactgcactcccgcctgggtgacaaagcaatattctgtgtcaaataaataaattcattcttctgctctcctgacttagagaaatggtttgcttaaaatgctagtaacaaacatcacagtcaacaggagcttgcttcatgcgaaggatcaatgtgatttgtggatggagatgatagtgatgaaattcctgtttcatggggctgtttttcttttcatctcactgggcagcaggtttagtgaggcagtgagatgctgctgctgtggattcttgtagctatgcctcggcttcttggcatatcaggtaggaacctgttacaagtgaaatacttgaaacctctctgaccaagagcctctgatggagtgggaggtgagctaattctctgaccagcttggggcactgtttcagccactggtcacattccttgcttcaaactgaaattcagtttggctttgagtatagggatacatggtggattcatgtacttcagtgtttgttttgaccaaagtttatttttctagtgcattttctaagtcaaagtggtgaaaatatgtaataattttagtatgcatgactcagtctgaaacaataaaaatctctgaaaaatgtgcatggggttcttttgtgatgatgacagtttggataaaggttccaaggttcattattcacagcccgggtagaccacctcctctgcaggtgagggagggaggggcactgtgataggacagtgcattctgtagatgcgctggctgcctctgaagatcatacactaacttgtctttgtcagtgatgggtagaggagcaaacactctgtgcctgagagtagacaaaaactaggttcccatggtagatctggtgagttggtgatgagtcattagtg

SEQ ID NO: 28364 - DNA, 677 bp, Homo sapiens
  misc_feature (51)..(51): n is a, c, g, or t
  misc_feature (53)..(54): n is a, c, g, or t
  misc_feature (78)..(78): n is a, c, g, or t
  misc_feature (93)..(93): n is a, c, g, or t
tgccgtttttttttgagacggagttttgctgttgttgcccaggctggagtncnntggcatgatctcagctcaccgcancctcgcctcccaggntcaaagcaatattctgtgtcaaataaataaattcattcttctgctctcctgacttagagaaatggtttgcttaaaatgctagtaacaaacatcacagtcaacaggagcttgcttcatgcgaaggatcaatgtgatttgtggatggagatgatagtgatgaaattcctgtttcatggggctgtttttcttttcatctcactgggcagcaggtttagtgaggcagtgagatgctgctgctgtggattcttgtagctatgcctcggcttcttggcatatcaggtaggaacctgttacaagtgaaatacttgaaacctctctgaccaagagcctctgatggagtgggaggtgagctaattctctgaccagcttggggcactgtttcagccactggtcacattccttgcttcaaactgaaattcagtttggctttgagtatagggatacatggtggattcatgtacttcagtgtttgttttgaccaaagtttatttttctagtgcattttctaagtcaaagtggtgaaaatatgtaataattttagtatgcatgactcagtctgaaacaataaaaatctctgaaaaatg

SEQ ID NO: 28365 - DNA, 375 bp, Homo sapiens
atgtctcttgagcagaagagtcagcactgcaagcctgaggaaggccttgacacccaagaagaggccctgggcctggtgggtgtgcaggctgccactactgaggagcaggaggctgtgtcctcctcctctcctctggtcccaggcaccctgggggaggtgcctgctgctgggtcaccaggtcctctcaagagtcctcagggagcctccgccatccccactgccatcgatttcactctatggaggcaatccattaagggctccagcaaccaagaagaggaggggccaagcacctcccctgacccagagtctgtgttccgagcagcactcagtaagaaggtggctgacttgattcattttctgctcctcaagtattaa

SEQ ID NO: 28366 - DNA, 736 bp, Homo sapiens
tgtgtgtgtgtgtacttttgttttctagaatattgtaaattgatagatttagggtataaatatatgtgttttcagagattaactcagtttgctgccagtgcttctactgtgctcttactggctattttcatttatacctgctgctgagtcatgaccacccaaaatctacatgttgaagctctaactcccagtaactcagaatgtgactgtttatttggggattgggcttttagtggggtgattaggttaaagtgaggctgttagggtcggccctaatgcaatctgtctggtgtctttataagaagagggaatttggacacacagagacaccagactagtgtgtgcacagaggaaacgaagacacagcaagaaggcggccaccctgcaggccatgaagagagggctcaggagaaaccagacccaccaacagtttgatcttgaactctgagcctccagaactgtgagaaaataatcgtctgttgttgaagccacccagtctgtggtactttgttacggcagccccagcaatggatacacgtgctgtaatgcagaagcttatgccagactctgtcttcttctgaccagacactaaagagatttgtaaaactgtaaaacagtgccactctcttactaatttgggggagcggtagagacggttgtttttcataaaatattctgttaatatgaaatgggtacatttattattttaaaataaatttaaattcttaatttgatt

SEQ ID NO: 28367 - DNA, 3215 bp, Homo sapiens
agattttaattaatgcaagttctgggaccttttggggcacatgtatcattttacaaatgagctttcaagaccatttaaggaaacagatgcttcatttgctcttatctcatatttcatgacttaagaattttttagtgataataaacatagacttaattccaataattagggaaaattgataaatatctgtcaccaaaccacaagaaatccaaaatcattttaggtttaccaaacattggtggaattccatctttctgagaaaaagggaagatcatagctaatttataatagctcaaattactaatttaataactgggtcaccagtgtttcttgagccatttcagatgtatgtaaaacacaaaatatgccaaatatatattgctataatacactcaagcagtattaatcaatatggtatcacaatgcctattaagaggctttttacaaattacttacttagtaatatctgttaaattaagcattatcttctaagaccttttttggatagtcaaatataagagataaatagtttaattttttcagaccttttttggatagtccaatattagagataaatagtttaattttttcagatataatgccagtcgatgtgatctgaattttagtactagtttacacgtataaatacagtcttaaacctttatgtctgagtctgaaatgaacctgttcacttagactagattttatagtaacaaaatgtgcttttaaatgtctatgaatgaaattcttattcatggtttttattctctccatgattttattacaattttgacactagacaagaaaaaaaaatattatttgtctttcctgccccctatctgtttgctgtgatagtgcaaagaagcacaggaaaatgtttaattatccatttttctgtgatttgtaattgaaaattgttctgtggggttctgaaagtattatctttcttaagtagtaaaaatgacagtggtaatgtagatgtttttataacatactatgtactttcattttagaccaaactagagtcagaacgaatactagcatcagtggggaagaaacctccccaggaaattggaattaaagtgaaaaatcattctggaggtggcatgtccttgactcacaataaaaattttagaaaactattgaaagaaatcacaggggaaactgcacttagactgacagaattgaacaccaaagaatttgctggcttccaaattgggctcttaaacaaggatttgaaacctcagacatacagaaatgcttatgatattccccgtagaggtcttttagaccagctgaccagaatgagatccaatctgctgaaaacgcacaagtttattgttggacaagatgaagattcccttcatagtgttccagttgcacaaatgggtaactatcaggaatatctgaagacattggcttctccactgcgagagattgatccagaccaacccaaaagactgcatacttttggcaatccgtttaaacaagataagaagggaatgatgattgatgaagcagatgagtttgtagcagggccacaaaacaaagtgaaacgtccaggggaacccaacagtcctatgtcatctaagagaaggcggagtatgtccctgctgttgaggaaaccacaaacaccacctactgtaactaaccatgtgggcggaaagggaccaccctcagcctcgtggttcccatcttatccaaacctcataaaacccacccttgtacatacagatgctactatcattcacgatggccatgaggagaagatggaaaatggtcagatcacacctgatggcttcctgtcaaaatctgctccatcagagcttataaatatgacaggagatcttatgccacccaaccaagtggattctctgtctgacgacttcacaagtctcagcaaagatgggctgattcaaaaacctggtagtaacgcatttgtaggaggagccaaaaactgcagtctctccgtagatgaccaaaaagacccagtagcatctactttgggagctatgccaaatacattacaaatcactcctgctatggcacaaggaatcaatgctgatataaaacatcaattaatgaaggaagttcgaaagtttggtcgaaaatatgaaagaattttcattttgcttgaagaagtgcaaggacctctggagatgaagaaacagtttgttgaatttaccatcaaggaagccgcaaggtttaaaagacgagtcctaattcagtaccttgagaaggtactagaaaaaataaattcccaccaccttcacaacaacattagtcacatcaacagcagatcatcatgttagtgcaaagaccagtgagaaaaaaatgacaagttttctgtgctgtaggatggaacaggatattgttgaagcctcctggaatgtttgagtcaagggaattgctttccagatgctaagaagcagcagtggggcttttgaattttatgattatctggcagtgaaagctgggcttttgccttaataattttttaaagtatgaattgttttgttttgttttcctcaattgaggaagctgatgttattaattcacaggctaaattcggtaaacaccactgcccctaccacgggtaatgagaggtcactcacttgaactttgccattccaggcattctcagagtggcgaggggccacctgcaagtggagcacaacttggtgctcttactgtgtccttcagaaagaataggtgtacagaaaggaaatggcaatcttatgtgtgctgaacaaagttttcaacaattcctagttgtgccttttaaaccatgcaatattcaggatagtttgaatcaaagaagtaagaagctgctatttgggtaacttatttctctgtgggaaggggcagggagagtcaccaaacaatctacctccaactctcttctcttttgtctagagacattacaaagtgcacttgaggctgcccccaacctctgacatttgttcttgcatgtgatgatagaaagtcttcagatggacttatacattctgtgctttggaagcacaagaagaacaaaatatgtgtatatttcctttaatgtttatacaaaagtttatatggagcagtattgttatgtttgtatgaatttgcaaaaattaaagtgtacaaagagattttgattttgcatatataaaataaatcattttattgattttcacaagttcattaatgctggataaatttctacttatatg

SEQ ID NO: 28368 - DNA, 2591 bp, Homo sapiens
ggtcgcgggtcggagctcggtcctgctggaggccacgggtgccacacactcggtcccgacatgatggcgagcatgcgagtggtgaaggagctggaggatcttcagaagaagcctcccccatacctgcggaacctgtccagcgatgatgccaatgtcctggtgtggcacgctctcctcctacccatgacttgtttaaagttcacaagcttaagccaaatctgaagtggcgacaggcttttgacagctacttaaaaactctgcctccatactacctattaccattaaagaaagcactaaggatgatgggagctccaaatctgatatcagataatttagattgtggacttagttacagtgttatctcttaccttaaaaaactcagccaacagaccaaactagagtcagaacgaatactagcatcagtggggaagaaacctccccaggaaattggaattaaagtgaaaaatcattctggaggtggcatgtccttgactcacaataaaaattttagaaaactattgaaagaaatcacaggggaaactgcacttagactgacagaattgaacaccaaagaatttgctggcttccaaattgggctcttaaacaaggatttgaaacctcagacatacagaaatgcttatgatattccccgtagaggtcttttagaccagctgaccagaatgagatccaatctgctgaaaacgcacaagtttattgttggacaagatgaagattcccttcatagtgttccagttgcacaaatgggtaactatcaggaatatctgaagacattggcttctccactgcgagagattgatccagaccaacccaaaagactgcatacttttggcaatccgtttaaacaagataagaagggaatgatgattgatgaagcagatgagtttgtagcagggccacaaaacaaagtgaaacgtccaggggaacccaacagtcctatgtcatctaagagaaggcggagtatgtccctgctgttgaggaaaccacaaacaccacctactgtaactaaccatgtgggcggaaagggaccaccctcagcctcgtggttcccatcttatccaaacctcataaaacccacccttgtacatacagatgctactatcattcacgatggccatgaggagaagatggaaaatggtcagatcacacctgatggcttcctgtcaaaatctgctccatcagagcttataaatatgacaggagatcttatgccacccaaccaagtggattctctgtctgacgacttcacaagtctcagcaaagatgggctgattcaaaaacctggtagtaacgcatttgtaggaggagccaaaaactgcagtctctccgtagatgaccaaaaagacccagtagcatctactttgggagctatgccaaatacattacaaatcactcctgctatggcacaaggaatcaatgctgatataaaacatcaattaatgaaggaagttcgaaagtttggtcgaaaatatgaaagaattttcattttgcttgaagaagtgcaaggacctctggagatgaagaaacagtttgttgaatttaccatcaaggaagccgcaaggtttaaaagacgagtcctaattcagtaccttgagaaggtactagaaaaaataaattcccaccaccttcacaacaacattagtcacatcaacagcagatcatcatgttagtgcaaagaccagtgagaaaaaaatgacaagttttctgtgctgtaggatggaacaggatattgttgaagcctcctggaatgtttgagtcaagggaattgctttccagatgctaagaagcagcagtggggcttttgaattttatgattatctggcagtgaaagctgggcttttgccttaataattttttaaagtatgaattgttttgttttgttttcctcaattgaggaagctgatgttattaattcacaggctaaattcggtaaacaccactgcccctaccacgggtaatgagaggtcactcacttgaactttgccattccaggcattctcagagtggcgaggggccacctgcaagtggagcacaacttggtgctcttactgtgtccttcagaaagaataggtgtacagaaaggaaatggcaatcttatgtgtgctgaacaaagttttcaacaattcctagttgtgccttttaaaccatgcaatattcaggatagtttgaatcaaagaagtaagaagctgctatttgggtaacttatttctctgtgggaaggggcagggagagtcaccaaacaatctacctccaactctcttctcttttgtctagagacattacaaagtgcacttgaggctgcccccaacctctgacatttgttcttgcatgtgatgatagaaagtcttcagatggacttatacattctgtgctttggaagcacaagaagaacaaaatatgtgtatatttcctttaatgtttatacaaaagtttatatggagcagtattgttatgtttgtatgaatttgcaaaaattaaagtgtacaaagagattttgattttgcatatataaaataaatcattttattgattttcacaagttcattaatgctggataaatttctacttatatg

SEQ ID NO: 28369 - DNA, 3029 bp, Homo sapiens
agattttaattaatgcaagttctgggaccttttggggcacatgtatcattttacaaatgagctttcaagaccatttaaggaaacagatgcttcatttgctcttatctcatatttcatgacttaagaattttttagtgataataaacatagacttaattccaataattagggaaaattgataaatatctgtcaccaaaccacaagaaatccaaaatcattttaggtttaccaaacattggtggaattccatctttctgagaaaaagggaagatcatagctaatttataatagctcaaattactaatttaataactgggtcaccagtgtttcttgagccatttcagatgtatgtaaaacacaaaatatgccaaatatatattgctataatacactcaagcagtattaatcaatatggtatcacaatgcctattaagaggctttttacaaattacttacttagtaatatctgttaaattaagcattatcttctaagaccttttttggatagtcaaatataagagataaatagtttaattttttcagaccttttttggatagtccaatattagagataaatagtttaattttttcagatataatgccagtcgatgtgatctgaattttagtactagtttacacgtataaatacagtcttaaacctttatgtctgagtctgaaatgaacctgttcacttagactagattttatagtaacaaaatgtgcttttaaatgtctatgaatgaaattcttattcatggtttttattctctccatgattttattacaattttgacactagacaagaaaaaaaaatattatttgtctttcctgccccctatctgtttgctgtgatagtgcaaagaagcacaggaaaatgtttaattatccatttttctgtgatttgtaattgaaaattgttctgtggggttctgaaagtattatctttcttaagtagtaaaaatgacagtggtaatgtagatgtttttataacatactatgtactttcattttagaccaaactagagtcagaacgaatactagcatcagtggggaagaaacctccccaggaaattggaattaaagtgaaaaatcattctggaggtggcatgtccttgactcacaataaaaattttagaaaactattgaaagaaatcacaggggaaactgcacttagactgacagaattgaacaccaaagaatttgctggcttccaaattgggctcttaaacaaggatttgaaacctcagacatacagaaatgcttatgatattccccgtagaggtcttttagaccagctgaccagaatgagatccaatctgctgaaaacgcacaagtttattgttggacaagatgaagattcccttcatagtgttccagttgcacaaatgggtaactatcaggaatatctgaagacattggcttctccactgcgagagattgatccagaccaacccaaaagactgcatacttttggcaatccgtttaaacaagataagaagggaatgatgattgatgaagcagatgagtttgtagcagggccacaaaacaaagtgaaacgtccaggggaacccaacagtcctatgtcatctaagagaaggcggaatgctactatcattcacgatggccatgaggagaagatggaaaatggtcagatcacacctgatggcttcctgtcaaaatctgctccatcagagcttataaatatgacaggagatcttatgccacccaaccaagtggattctctgtctgacgacttcacaagtctcagcaaagatgggctgattcaaaaacctggtagtaacgcatttgtaggaggagccaaaaactgcagtctctccgtagatgaccatcctgctatggcacaaggaatcaatgctgatataaaacatcaattaatgaaggaagttcgaaagtttggtcgaaaatatgaaagaattttcattttgcttgaagaagtgcaaggacctctggagatgaagaaacagtttgttgaatttaccatcaaggaagccgcaaggtttaaaagacgagtcctaattcagtaccttgagaaggtactagaaaaaataaattcccaccaccttcacaacaacattagtcacatcaacagcagatcatcatgttagtgcaaagaccagtgagaaaaaaatgacaagttttctgtgctgtaggatggaacaggatattgttgaagcctcctggaatgtttgagtcaagggaattgctttccagatgctaagaagcagcagtggggcttttgaattttatgattatctggcagtgaaagctgggcttttgccttaataattttttaaagtatgaattgttttgttttgttttcctcaattgaggaagctgatgttattaattcacaggctaaattcggtaaacaccactgcccctaccacgggtaatgagaggtcactcacttgaactttgccattccaggcattctcagagtggcgaggggccacctgcaagtggagcacaacttggtgctcttactgtgtccttcagaaagaataggtgtacagaaaggaaatggcaatcttatgtgtgctgaacaaagttttcaacaattcctagttgtgccttttaaaccatgcaatattcaggatagtttgaatcaaagaagtaagaagctgctatttgggtaacttatttctctgtgggaaggggcagggagagtcaccaaacaatctacctccaactctcttctcttttgtctagagacattacaaagtgcacttgaggctgcccccaacctctgacatttgttcttgcatgtgatgatagaaagtcttcagatggacttatacattctgtgctttggaagcacaagaagaacaaaatatgtgtatatttcctttaatgtttatacaaaagtttatatggagcagtattgttatgtttgtatgaatttgcaaaaattaaagtgtacaaagagattttgattttgcatatataaaataaatcattttattgattttcacaagttcattaatgctggataaatttctacttatatg

SEQ ID NO: 28370 - DNA, 2539 bp, Homo sapiens
agattttaattaatgcaagttctgggaccttttggggcacatgtatcattttacaaatgagctttcaagaccatttaaggaaacagatgcttcatttgctcttatctcatatttcatgacttaagaattttttagtgataataaacatagacttaattccaataattagggaaaattgataaatatctgtcaccaaaccacaagaaatccaaaatcattttaggtttaccaaacattggtggaattccatctttctgagaaaaagggaagatcatagctaatttataatagctcaaattactaatttaataactgggtcaccagtgtttcttgagccatttcagatgtatgtaaaacacaaaatatgccaaatatatattgctataatacactcaagcagtattaatcaatatggtatcacaatgcctattaagaggctttttacaaattacttacttagtaatatctgttaaattaagcattatcttctaagaccttttttggatagtcaaatataagagataaatagtttaattttttcagaccttttttggatagtccaatattagagataaatagtttaattttttcagatataatgccagtcgatgtgatctgaattttagtactagtttacacgtataaatacagtcttaaacctttatgtctgagtctgaaatgaacctgttcacttagactagattttatagtaacaaaatgtgcttttaaatgtctatgaatgaaattcttattcatggtttttattctctccatgattttattacaattttgacactagacaagaaaaaaaaatattatttgtctttcctgccccctatctgtttgctgtgatagtgcaaagaagcacaggaaaatgtttaattatccatttttctgtgatttgtaattgaaaattgttctgtggggttctgaaagtattatctttcttaagtagtaaaaatgacagtggtaatgtagatgtttttataacatactatgtactttcattttagaccaaactagagtcagaacgaatactagcatcagtggggaagaaacctccccaggaaattggaattaaagtgaaaaatcattctggaggtggcatgtccttgactcacaataaaaattttagaaaactattgaaagaaatcacaggggaaactgcacttagactgacagaattgaacaccaaagaatttgctggcttccaaattgggctcttaaacaaggatttgaaacctcagacatacagaaatgcttatgatattccccgtagaggtcttttagaccagctgaccagaatgagatccaatctgctgaaaacgcacaagtttattgttggacaagatgaagattcccttcatagtgttccagttgcacaaatgggtaactatcaggaatatctgaagacattggcttctccactgcgagagattgatccagaccaacccaaaagactgcatacttttggcaatccgtttaaacaagataagaagggaatgatgattgatgaagcagatgagtttgtagcagggccacaaaacaaagtgaaacgtccaggggaacccaacagtcctatgtcatctaagagaaggcggagtatgtccctgctgttgaggaaaccacaaacaccacctactgtaactaaccatgtgggcggaaagggaccaccctcagcctcgtggttcccatcttatccaaacctcataaaacccacccttgtacatacagatgctactatcattcacgatggccatgaggagaagatggaaaatggtcagatcacacctgatggcttcctgtcaaaatctgctccatcagagcttataaatatgacaggagatcttatgccacccaaccaagtggattctctgtctgacgacttcacaagtctcagcaaagatgggctgattcaaaaacctggtagtaacgcatttgtaggaggagccaaaaactgcagtctctccgtagatgaccaaaaagacccagtagcatctactttgggagctatgccaaatacattacaaatcactcctgctatggcacaaggaatcaatgctgatataaaacatcaattaatgaaggaagttcgaaagtttggtcgaaaatatgaaagaattttcattttgcttgaagaagtgcaaggacctctggagatgaagaaacagtttgttgaatttaccatcaaggaagccgcaaggtttaaaagacgagtcctaattcagtaccttgagaagagacattacaaagtgcacttgaggctgcccccaacctctgacatttgttcttgcatgtgatgatagaaagtcttcagatggacttatacattctgtgctttggaagcacaagaagaacaaaatatgtgtatatttcctttaatgtttatacaaaagtttatatggagcagtattgttatgtttgtatgaatttgcaaaaattaaagtgtacaaagagattttgattttgcatatataaaataaatcattttattgattttcacaagttcattaatgctggataaatttctacttatatg

SEQ ID NO: 28371 - DNA, 1836 bp, Homo sapiens
agattttaattaatgcaagttctgggaccttttggggcacatgtatcattttacaaatgagctttcaagaccatttaaggaaacagatgcttcatttgctcttatctcatatttcatgacttaagaattttttagtgataataaacatagacttaattccaataattagggaaaattgataaatatctgtcaccaaaccacaagaaatccaaaatcattttaggtttaccaaacattggtggaattccatctttctgagaaaaagggaagatcatagctaatttataatagctcaaattactaatttaataactgggtcaccagtgtttcttgagccatttcagatgtatgtaaaacacaaaatatgccaaatatatattgctataatacactcaagcagtattaatcaatatggtatcacaatgcctattaagaggctttttacaaattacttacttagtaatatctgttaaattaagcattatcttctaagaccttttttggatagtcaaatataagagataaatagtttaattttttcagaccttttttggatagtccaatattagagataaatagtttaattttttcagatataatgccagtcgatgtgatctgaattttagtactagtttacacgtataaatacagtcttaaacctttatgtctgagtctgaaatgaacctgttcacttagactagattttatagtaacaaaatgtgcttttaaatgtctatgaatgaaattcttattcatggtttttattctctccatgattttattacaattttgacactagacaagaaaaaaaaatattatttgtctttcctgccccctatctgtttgctgtgatagtgcaaagaagcacaggaaaatgtttaattatccatttttctgtgatttgtaattgaaaattgttctgtggggttctgaaagtattatctttcttaagtagtaaaaatgacagtggtaatgtagatgtttttataacatactatgtactttcattttagaccaaactagagtcagaacgaatactagcatcagtggggaagaaacctccccaggaaattggaattaaagtgaaaaatcattctggaggtggcatgtccttgactcacaataaaaattttagaaaactattgaaagaaatcacaggggaaactgcacttagactgacagaattgaacaccaaagaatttgctggcttccaaattgggctcttaaacaaggatttgaaacctcagacatacagaaatgcttatgatattccccgtagaggtcttttagaccagctgaccagaatgagatccaatctgctgaaaacgcacaagtttattgttggacaagatgaagattcccttcatagtgttccagttgcacaaatgggtaactatcaggaatatctgaagacattggcttctccactgcgagagattgatccagaccaacccaaaagactgcatacttttggcaatccgtttaaacaagataagaagggaatgatgattgatgaagcagatgagtttgtagcagggccacaaaacaaagtgaaacgtccaggggaacccaacagtcctatgtcatctaagagaaggcggagtatgtccctgctgttgaggaaaccacaaacaccacctactgtaactaaccatgtgggcggaaagggaccaccctcagcctcgtggttcccatcttatccaaacctcataaaacccacccttgtacatacaggtatagagtagtggttgtgatttccttatggctcctagaggactaagacgctaaacaattttatttccctttttgtgttccttcctttgtgttcagtttgtg

SEQ ID NO: 28372 - DNA, 2234 bp, Homo sapiens
  misc_feature (1321)..(1321): n is a, c, g, or t
ctatttttatcaggacagattgaaattataagagtgtacatagagaacatgtttgtttagctaaattagctctataatcagatgagatcacctagagggtcagaggatgagagtgaaagagagaaagagaaaaagaagagcagaggcttggagctgacttatctgaaggttccgtcctcaggtctctttctacccttcacttttcatgccatttttcttagagattctcaccctttcctacaacttcagccattttgccgatgacacccagatgactctaaatctgctgttttcctaagtcctattctagaatcttcatgctgggacatttttaacttggatatcttgctattcaagttgtatcggatttgtatcaaatttagcatgcttgcaacctaagcacactccattctatagtcagttccactcttgactttaatatttatggtacggttagtctccacatcttccaagttcaagcttcataaccaaagatcatcttcaccttccttctcactctgcattccattggtcagcttctgttaaaatggccttcctaaggcaggcctctgaacgatcatttatttttaggaaaacttataaaaagtcactgagatttaaaaacacccacacatatatttgcaatcatatttgtgtgcttggttaaacatgtcaacatttaacagatttgagccttctaaatttaatccagcatgaatgtcgtttttactaaaatatttgctattttactcacttagctggttccttacacaagtccagttaaatttcacatgtgaaaaaaatgactgaaaacactgaatggaatgtgatactccttgtgtagtagaaatgagttgactttcatatttaagagctgatcctatgaatgagtagacaataagctgaatagctgttacgatctgagttttaaaaatggaaaatgtttcatgttttagagaatgtaaacttccacaagggcagagattgttaatacgttgtccccccagtgacttaaaacagtactggcacatagtaagcactcaataaatagttgttgaatgagtgaatgtaggaaccatactggaatcaatattgaagctacatagaaagcaccacactgtggagttcaaacaatgtctttaagttgttctcttgaaaactatttaatttgtctgttactgccacttcttccatgcccagaggaacagccaaagttactcaagtctggaacacatgatttaaaaaataattctgggataggcttttggcttttggaaagtagcgcaaataaaactttttaaaatactgtattctgacttcnggtcttgacaagagagtgtagatttatttctccctgctcctccctgaaaagtgtaattataaactctgggtaagtataattataaaataatgcaagaggaatcagaaggagaattctgaaaggtgggaccaggaagacacactgcggagggaccccaagactagaggaacaacatggttccaagacatctgacccctcacccaacagaggaaggttacccaggcttgatgtttcccgacctacaaccacacaatagaagacagcccagagaggctcgttcctacagaagagggaactgaagtctggtcggtaataccagatgagtctggctctaccagcacgggggtatatcaggaatcccactgacaaacatccagacctgagacttgtcttttgtgctgagagatgagcatccaggggcctctggcaaaaagcatctaacccaggaagattttttattaccctgagcctgagactcccttctcccagagataccatgggacctggcttgggagaaaatccttctttccctaaagtagcatcatgaaggaccattcgggaaccccagcagcaccagataaaccaagcagaccaaaataacactgcaaaggctttaaaaactaaattaccactggactcatagcccacaaaaactaagccagggcttgcatgctaaacacaaatggagtgactgcctactaaaaataaaagattaaaataatagacaaaaggttcaggatacgatgtaaaatagcctgtcataccaagaaccagaaaaatcacaacttgaataagaaatgacagtcaacagatgacaacactgagacaaatcagatgttggaattacttgacaaggattttaagcaactctcataaaaatgcttcaacaggtaattacaagttgtcttgccac

SEQ ID NO: 28373 - DNA, 1266 bp, Homo sapiens
tgcgcagggccggccgccggcggccgaggcgatgagggtgttggtgcggcgctgttggggtcctccgctggctcatggcgccaggcgtgggaggccgagtccccagtggcgagcactggcccgactcggctgggaggactgccgggactccagagtccgcgagaagcctccctggcgggtgctcttcttcggcacggaccagttcgcccgcgaggcgctgcgggcgctgcacgccgccagggaaaacaaagaagaagagttaatcgacaaactggaggtggtcacaatgccttccccatcaccaaaaggactgccagtgaagcaatatgctgtgcagtctcagcttcccgtatatgagtggccggatgtgggatctggagaatatgatgttggagtagtggcttcgtttggccgacttttgaatgaggctcttattcttaaatttccctatggcatattgaatgttcatcccagttgcctcccgagatggcgtggcccagcccctgtaatccatacagtgcttcacggagacacagttactggagtaacaattatgcaaattagacctaaaaggtttgatgtaggcccaattctcaaacaagaaactgttcctgtgccacccaagagcactgcaaaggaattggaagcagtgttgtcaagactgggtgccaacatgctcatttcagttttgaaaaatttgcctgaaagtctgagcaatggaaggcagcagccaatggagggggcgacttacgcccctaagatttctgctggtaccagttgtataaaatgggaggaacaaacttcagaacaaatattcagactttaccgtgccattggaaatataattccgttgcagacgctctggatggcgaataccattaaacttctggatttggtagaagttaacagttcagtccttgctgatccaaaattaacgggacaggctcttattccaggatcagtaatataccacaaacagtcacaaatactattggtttattgcaaggatggttggattggtgttcgatcagtgatgctcaagaaatcactaacagctactgacttctacaatggatatttgcacccctggtaccagaaaaattcccaagctcaaccaagccaatgcagatttcagactctcagacttccaacaaagaagaagcagaaaaaaactgttgctatgcaacaatgcattgagtagttaggaagaagatggataaaaacctattacatatttgtaatttattaaaaaccttatttacaagg

SEQ ID NO: 28374 - DNA, 532 bp, Homo sapiens
tgcgcagggccggccgccggcggccgaggcgatgagggtgttggtgcggcgctgttggggtcctccgctggctcatggcgccaggcgtgggaggccgagtccccagtggcgagcactggcccgactcggctgggaggactgccgggactccagagtccgcgagaagcctccctggcgggtgctcttcttcggcacggaccagttcgcccgcgaggcgctgcgggcgctgcacgccgccagggaaaacaaagaagaagagttaatcgacaaactggaggtggtcacaatgccttccccatcaccaaaaggactgccagtgaagcaatatgctgtgcagtctcagcttcccgtatatgagtggccggatgtgggatctggagaatatgatgttggagtagtggcttcgtttggccgacttttgaatgaggctcttattcttaaatttccctagtaagttttatttgtaaggaaatacagtatagaaaccttggtctttataaatggaccttgtatataaaatgtgataatttga

SEQ ID NO: 28375 - DNA, 396 bp, Homo sapiens
  misc_feature (13)..(13): n is a, c, g, or t
  misc_feature (22)..(22): n is a, c, g, or t
  misc_feature (42)..(42): n is a, c, g, or t
ttcgacacgtttnattttattntcacacctttcaacaatcanctcaccttactatccaaaattaacgggacaggctcttattccaggatcagtaatataccacaaacagtcacaaatactattggtttattgcaaggatggttggattggtgttcgatcagtgatgctcaagaaatcactaacagctactgacttctacaatggatatttgcacccctggtaccagaaaaattcccaagctcaaccaagccaatgcagatttcagactctcagacttccaacaaagaagaagcagaaaaaaactgttgctatgcaacaatgcattgagtagttaggaagaagatggataaaaacctattacatatttgtaatttattaaaaaccttatttacaagg

SEQ ID NO: 28376 - DNA, 948 bp, Homo sapiens
tgcgcagggccggccgccggcggccgaggcgatgagggtgttggtgcggcgctgttggggtcctccgctggctcatggcgccaggcgtgggaggccgagtccccagtggcgagcactggcccgactcggctgggaggactgccgggactccagagtccgcgagaagcctccctggcgggtgctcttcttcggcacggaccagttcgcccgcgaggcgctgcgggcgctgcacgccgccagggaaaacaaagaagaagagttaatcgacaaactggaggtggtcacaatgccttccccatcaccaaaaggactgccagtgaagcaatatgctgtgcagtctcagcttcccgtatatgagtggccggatgtgggatctggagaatatgatgttggagtagtggcttcgtttggccgacttttgaatgaggctcttattcttaaatttccctatggcatattgaatgttcatcccagttgcctcccgagatggcgtggcccagcccctgtaatccatacagtgcttcacggagacacagttactggagtaacaattatgcaaattagacctaaaaggtttgatgtaggcccaattctcaaacaagaaactgttcctgtgccacccaagagcactgcaaaggaattggaagcagtgttgtcaagactgggtgccaacatgctcatttcagttttgaaaaatttgcctgaaagtctgagcaatggaaggcagcagccaatggagggggcgacttacgcccctaagatttctgctggtaccagttgtataaaatgggaggaacaaacttcagaacaaatattcagactttaccgtgccattggaaatatagtaagttgggaagtcaggttgcagttctacctagttggttttctatgtgtgtaatttgctttctaaatatttttatttaggaataatcccaaataaaaatatcc

SEQ ID NO: 28377 - DNA, 1038 bp, Homo sapiens
tgcgcagggccggccgccggcggccgaggcgatgagggtgttggtgcggcgctgttggggtcctccgctggctcatggcgccaggcgtgggaggccgagtccccagtggcgagcactggcccgactcggctgggaggactgccgggactccagagtccgcgagaagcctccctggcgggtgctcttcttcggcacggaccagttcgcccgcgaggcgctgcgggcgctgcacgccgccagggaaaacaaagaagaagagttaatcgacaaactggaggtggtcacaatgccttccccatcaccaaaaggactgccagtgaagcaatatgctgtgcagtctcagcttcccgtatatgagtggccggatgtgggatctggagaatatgatgttggagtagtggcttcgtttggccgacttttgaatgaggctcttattcttaaatttccctatggcatattgaatgttcatcccagttgcctcccgagatggcgtggcccagcccctgtaatccatacagtgcttcacggagacacagttactggagtaacaattatgcaaattagacctaaaaggtttgatgtaggcccaattctcaaacaagaaactgttcctgtgccacccaagagcactgcaaaggaattggaagcagtgttgtcaagactgggtgccaacatgctcatttcagtccttgctgatccaaaattaacgggacaggctcttattccaggatcagtaatataccacaaacagtcacaaatactattggtttattgcaaggatggttggattggtgttcgatcagtgatgctcaagaaatcactaacagctactgacttctacaatggatatttgcacccctggtaccagaaaaattcccaagctcaaccaagccaatgcagatttcagactctcagacttccaacaaagaagaagcagaaaaaaactgttgctatgcaacaatgcattgagtagttaggaagaagatggataaaaacctattacatatttgtaatttattaaaaaccttatttacaagg

SEQ ID NO: 28378 - DNA, 182 bp, Homo sapiens
agcgatatgtgaagtagttttagctttgagtcattgccttaacactgtcacatttttcttcctatctaatttagggaaaacaaagaagaagagttaatcgacaaactggaggtggtcacaatgccttccccatcaccaaaaggactgccagtgaagcaatatgctgtgcagtctcagcttcc

SEQ ID NO: 28379 - DNA, 388 bp, Homo sapiens
ccaattcctctaattgaaagaaaagtccagattaacacaaaatagtagttgaaaagggtttgggagttgagtgtattcctttatcataccttctttaattttacttgcagattccgttgcagacgctctggatggcgaataccattaaacttctggatttggtagaagttaacagttcagtccttgctggtactaacttttgaatagctaacatggaagctgttttcactgtagtgtatctggaaatacgtctgttttatcatatgtcacaattactaaaaataacttttagtttgtttcagttcagtaattataatactttacattcacttattgtcttattctttgcaacactcattctcatatattttctcatttaatcattaca

SEQ ID NO: 28380 - DNA, 560 bp, Homo sapiens
gacattttaaggcaagtgccaagagatgtcaccaattaatgttaagaataaaaagagggtaaccgtttttttttttctagagtcagtaaatataagcttgagttgaaagactttacttattcctgctgctacaatttaattctctaataataatattatattcagagtatggcttattaagtacagggcccacatattgaaccaagttcatgcagatttggattgaagttaatactaacccaattacaggttgactataacttgactcttaaatttgatattatcttcaaaattataaatagattacagagatttagaactggttataatttagtaagattaactttgcagtgttagaatttttagcaacaaatttttagaatttttttagcaaaaagaggaaatacacattaacaataaaatatgctagactgcctctgttgcctaaacagagcatcatgtggttaaagaactgtagaaccgggcttacaaaggtctgaattctagccactgctctccggtgatgtagctgtgtaaccctctctgctgtattctcgggt

SEQ ID NO: 28381 - DNA, 511 bp, Homo sapiens
ccactaaaaatagcatccccccaaagtgtctgtgctctgcccttctccctctgctttctgcactgtatttcatgtctggcgaggcagcccctggtttctaatttggagccgtgtggaaatgacacccagcacggtctctagtcctcactcctctttttggcttcggagtagcatttccacctctagcctggtggtcacttgggcattctgcagtcgccttggatttaccatacccctaactgaaataatcatttccatgtccttctaacccctcctcctccatctggctctgctgcttctttactgttaacctgttttccttttctctttggcgtcatctgtgacatgcctccctctgtgttgtccctcactcccttactgttgtacagtcttgagattcctcacgcacagtgctctgcctttgttctcaagggctctatctcttttttttataataaaagtcaatgcttattgttgaaaatttactatattcagaaaaataccaaaaaaa

SEQ ID NO: 28382 - DNA, 555 bp, Homo sapiens
tttcacctatgaatactgtcaaagcattataaatgccttaatattacctatatatttttttacaaaccattaagcagtaaccttcctaaaataaaagtatttccccccctataggttaaggtctccctaagtatcccttatagatcatcatttaagctgactattcattgagtgacataaactgaaagctgctagagtagaatgacatgagaaaggaaacacagctgtagatggaatggaagggacacctgtggagctccatcccatggatctcagtccaaatccaaacttcacagctgaggcccaggggaagggaagacaggttttccttactgaaaagacttcactttttcagtcacacaaacattttagaccacaatagatttaatagcataaatatattttatgaaggtaacccaatcgatcataaaccaaaaaaaaaaaaagaaagagaaaaaggcaaatctactagagtgcttttttaatacaacaaagactgtaaaatattgaaaatatcagggatatcacattttcctcttcactgacaaataataa

SEQ ID NO: 28383 - DNA, 604 bp, Homo sapiens
tttttttttttcagacagggtcttactagtcactcaggatggagtgcagtgctgcgatcgtgatcactgctcactgcagtcttcagctccccaggcttaggcgatcctcccatctgtctcctgaataatagggactacaggtgttaggcaccacgcctagctaatttttgtattttttgtagagatgaagttttgccatgttgcccaggctggtttcaaacttctggactcaagtgattcgactgcctcagccttccaaattgctaggattacaggatgaggcaccacttccggccttatatccatttatagtaaacacaagccaacactatgacccaacattttactcctagattatatagttaagagtgtgtatgtcaatcaaaagtatatgttagagtgctcatagcagcttctcataattccaaaatgtggaaacaactttaaaaactagtaactaaagaatgtttaggtgacgtgtaatagatttacataatagagttctatataaaaataaaaataaacaagctactgataacacacaacaacattgctgaatctcacagatacgttgaatgaaacaacaggtcgacacaaagagaat

SEQ ID NO: 28384 - DNA, 480 bp, Homo sapiens
cgtgttcttatatcagcaagcagaaactatggggagttggttttcaattattgagttttatttttgcttgttttaatcctgatttgtttcataattttctttcccattagattgctaataagtgtattctgctggccagctcttactcttaacttaccaagagagctccctaaggggaaagacgtattttacttgtcttctcttgttctctctggacaaggaccagtgcttatcaagtgcctactacttgcttagcagacattttctccatattttatgaatgaatgactgaagaaaggacatttacttataattcaccaaaaatatgtatattatatacgtacaatggtgaattataagtttttcatccaggaaagagcctgcctttctgtgctacagatattggaatggttcttacttccagctttctcccaacagacattttatttccttcctacagggagttctcctttctctttg

SEQ ID NO: 28385 - DNA, 465 bp, Homo sapiens
ttttataatctagcacctgttgtaacatctagcattttatggatatgtttgaaacctgtaatctaaatgacgatagaaatatggttcttgttttgtgcaggaagtgaagaagtaactgttgctgtgttaagttctagctgaattcaaagagtgcaaggccagaggcaggctttgtttatagcctcctatctgatttccaaaagtgaaataactatttttcagaaaacctcttgggttctcaggcaactgacctacaaacagaaggtcagacttcaataactctaggattccttttaaatgctgaagatgaaatattcaatgatcaataattaagcaaaaacttccccacaaaagatcccttttatagagtgcttgatttttaaagacgttttactgttcaacttggacacatgagattataaaagccagtgtgatatgaaataaatctatacacaactacttagc

SEQ ID NO: 28386 - DNA, 486 bp, Homo sapiens
gactccaactgggttcaagagatcctcccacctcagcctttcaagtagctgggactataagcatgtgctaccatactcagctgttttcagttttcgaatattgaacatgatgctgtcatgaacatcgttgggcatcataatactttatttagaggtgagtgggcagagtttgacaggcagatcagaaaatggggtaggaggctgggcgcggtggctcacgcctgtaatcccagcactttgggaggctgaggtgggcagatcacgaggtcaagagattgaggccatcctggccaacattgtgcaaccccatctctactaaaaatacaaaaattagctgggtgtggtggcacacacctgtagtcccagctactcaggagggtaaggcaggagaattgcttgaacccaggaggtggaggttgcagtgagccgagattgcatcattgcattccagcctggcgacagagtgtgactccacctcaaaaaata

SEQ ID NO: 28387 - DNA, 369 bp, Homo sapiens
ccattcacgccctttacactttgtaacttcacattcatcctctccatttacacagaccacacactccaagaaacatcctctccatttatactttgtaacttcacattcatcctctcccaccaagtaacatcctctccatttgcacatcctctccatttgcaatagggcacattctgagtaaatgactctgtgacttcacttcattctcttcatttacatagaatattcaccaagtaaccaatgggaaacctctagagtattgagaccctagaaaattctgtaagcagagctcttgagcctctacgctcaagcctgctcccaaactgtggggtggacttttcgttctcagtaaatccttgcttttgcttt

SEQ ID NO: 28388 - DNA, 346 bp, Homo sapiens
ccaagaccggcctggtcaacatggtgaaacgccgtctctcctaaaaatacaaaaattagccgggtatggtggcaggtgcctataatcccagctactcgggaggctgaggcaggagaatagcttgaacccaggctacggaggttgcagtgagccgaaatcacgtcacttcactccagcctgggcgaaagagccaaactccatctcaaaaacaaacaaaaacaaaaacaaaaaaacagaaaaagaaacagtgctttgtggtatgtataaagcttacatttgtgtttataaataaattgaataaagcttacatttgtgtttataaataaagttttattgcatgcattaa

SEQ ID NO: 28389 - DNA, 519 bp, Homo sapiens
tttttagtgattccatgtcagaaaggtggaagaaaatttgaaatgttagttttaagaggtttgcaaagtcttagccaaatattagaagaattcggggtcagttaaagtttacaggtagatcgcaaaacctcaaagacaataaacaggagtagagtctaataacaggtgtactatagttttctattggaacataatttttctctctacagccacccctacttctgccaaagatagttgcagtaagaatagtttacaaaataagtctactgtcatcatgtcctgattatttacataagtgtagcaatagtagtgattaaccataaaggctctttttaagttggcttcactggaactttaataagaaatatcagattggactttttaaagcatcataaggctaagatgccaacctaagaacttgtcatcagatattgtagcatgataaattttttttcctctcactcctttgtctgtactctgcccatttctgtgaaaacagagagttgattgaaaaaaaaa

SEQ ID NO: 28390 - DNA, 1118 bp, Homo sapiens
aggttttccagataaaagattatacaggtttggaatcttaatatccaacccccaactccaagccctgccccaacaacaacagctaattattttacatcttgatgatggtaaatttttcatgattaaccaattttgggcacctattccgccatatatggttttatttaattttcacagcaacacttcaaagttgatattcatattctaaatttatagatgaacgaagaggctcaaagattaaacaacttgctaataagtgatttttacccatgctttttccattatattatgttttggatttttccagagtacccaaacccagcagatgcatactgctccaaaataaatggaactcaatactggctctgtcaagtgtctcttgccaatcaattgtccttctaatcttttgaggggcagttctctcagttgtaccaagtcactgtcatccccaaacttttcaatgattccaggcctttaacaactcccctccacctccaaaccctctctcaccaaattgtgtaatttctttgtttactgctggcttcatcatgcacttttccttcatagcctattttaagaagttgacttgctgaactgctttttagccaagctatttgtaaatcaagctacacaaagtatgtggccataatttccaaaaggcaaatgatcattgttcaattgctgttgctctgcagtgtgcattcatgcagttaaaaattgtactgcattgatagtacggcatcagagaatagatcacttaggttcaaatcccagtgcatgatcctgagcaagattatcatatctagatacattagtttttatctgtgaaatgggaatgatagcacaatcttcatagaattgttggtaaggattaagtgagttgatatgctcaaagtgtgcatgctggcatagaacaagtcactgtttacaagcctttaaagaaggagctgttctggcactgtaaacttgaaccttttttccccaaatctaatggatataggcaaggaaattatatttatataaaataaatgtttgactacctttgatcataaactttattctcatcttgacctgttcctttgaaaagataataaatactgatatgtgaaaaatgtatg

SEQ ID NO: 28391 - DNA, 465 bp, Homo sapiens
ttaattgctcatcctatcactgcttagtcttgccatctgacccttggttgttttattcttgtaaaatgaagtcactggagtaagtagattaatgattcataacccaaaggtaaattgcaagctgatatatccccagcagtgacgcagagtattgcgggaagcaagggataaaggagctgagttcctgccaggaaggagggctcacacacaagacaatgcagtgtgcctggcaaaacacttgactagatcatctctacagtcctctgtaggttttaactgttcgtgctgttgcgatttcatgtttcacctcaaccttctctttgagaagcttagcatcctttagatataatcagtttcggaataaagaatgtttgggattttaagatgccttagcagttatctcatactgtatttctcagctctactcacagcctactttatcagtagcactgataatatgattgc

SEQ ID NO: 28392 - DNA, 405 bp, Homo sapiens
tttccattatagttctcattgtcatctgatacattgtatttttacttattatatgatttaaaagaaaaacaacaaggcaaaataagagattttgtctgagcacagtggctcacacctgtaatcacagcactttgggaagatgaggtgggaggattgcttgagaccaggagttcgaggctgcaatgagctatgatcacaccactgtactccagactgggtgatagtgcaaggccctgtctctaaaaaaaatgaagaagaagccagtggaggaaggggggagatttttgtctattttgcatatttctgtatacaagtgcctagaatatagtactaagaacactcagaatggtgtctggaatatagtaggtgctcaaaaagtagtagttgcagaataaataaataaag

SEQ ID NO: 28393 - DNA, 1221 bp, Homo sapiens
ccaatcaaaagtaacagctgccacctttttctatgagacttgattataattttctatggccaagggtttgctgtgacacttccacatcattcttcagtatgtagtccagagattagctacagattcaagaaacacagactgtaaactattatatacagacatatctcaaaataagcatacccattagtgccagctgccctgaaagactgaatgaccccagctattttccaaatgttttttcagaaagccatgaacacacctttctgggatcctatctatttcaaagacaggcaaagctctgtggttcagttccaccacccagtaccaagcccacagtatgcagaccatacgccttacacatggccttttctctttatgtaattgctgtaccatattcagcagatctagactgactcaaagcatgttccctcaagaagctccacagaaaaaaaggtttctgtgatcaaaaatcatttgggaaatgctgcaaaccctatctgcctcttagagcttaaccatgcatgtcggggcataatataaaccttttccagtctgggccacagagtgagaccccacctctaaaataataaatcaataaactcttgagaagtacacagaaaagaaacttctgtaactttttaggtcttaattacaagcaattgtagcttaatctaaacttgctcttcactttatttctatgctcttgaaaactagtgacataagccttatgaattttttgtttgtttgtttcttctttttttaagagagagacagggtctcattctgttgctcaggttggagtgcagaggcacaatcatagctcaccgtaaccttgaattcctagtctcaagtaatcctcccatctcagcctccctaataactaggactacaggcacataccaccacatctggctagtgtgtgtgtgtgtgtgtgtgtgtgtgtgtgtgtaaagacaggggtctcattatgttccccaggctggtcttgaactcctgggcttaagcgatcctcccaccgcagcctcccaaaactttgggattacaggcatgagccactacacctggctggattattctttctttaaaaaaatttttttggccgggcgccgtgactgtaatcccggcactttgaggggccgaggcgggcgaatcacgaggtcaggagatagagaccatcctggctaacacggtgaaaccccgtctctactaaaaaaaaataca

SEQ ID NO: 28394 - DNA, 564 bp, Homo sapiens
aagatattaaggggtgtgcatttccaaagtaatggaataaataaaaacaacaacaaaggaaaataagtgattcagggaaaacaaaatctaaccacaataggaaaagacgaaggtaatttccaggatgacagttgggcagccgacttaactaagtcttaccacaaacactaagactgattcaagaatttaaggacatttaagatagatgtctttataataaggtttgcacaagaacaaaaatgtaatcaaagtgtatcatctgtttcagcaatgaataacataaaaacaaacagcagacaacaatttaaccacaaaacaaaattaagagtctgagaagaggaaaggagaaagagagatacagacatacattagaatttttttttttttaattaaagcagcagtaggaaaatggaagcaaataccagaagaaacagttaaaataatggaaagcagctgcctctggggagaaggcctaggaaatgggaaaaacaccagaaaacaggatgactatttttcattataaatgttgtagtccaatttcaccttttcaattgctctggtttc

SEQ ID NO: 28395 - DNA, 443 bp, Homo sapiens
ccaagaccatggggctgagtattttggaatgaatatcttacagtgagaacataattgaatgggctgctttatgacaaggtgagccctctgtcaatgagatgctcattcattcactaattcattgcaaagcatctgttcactggaaattggatgctatagtaagtactaaagaaaaagaagccattaagacaaatcgagtccttcttctgaaggagcttagtgcctagtggtggaggaagagtcagacaactcattaatgatgaccccactgtgtgataaatgctgtcaagggaattgtagggtgttgtggaggcacagagagattcaagggaggtgccttggaaaagtgacatggaaacagctaactagacagatcagcaaaggggtgtgtgttggggagaaggaagaaatatatgtagtaggcacaggcatggatagtatgt

SEQ ID NO: 28396 - DNA, 242 bp, Homo sapiens
ccaagaccatggggctgagtattttggaatgaatatcttacagtgagaacataattgaatgggctgctttatgacaaggtgagccctctgtcaatgagatgctcattcattcactaattcattgcaaagcatctgttcactggaaattggatgctatagtaagtactaaagaaaaagaagccgcgtagtctatcgagccgcgtagtcagtcgagccgcgtagtcagatcgaccgcgtagtca

SEQ ID NO: 28397 - DNA, 1171 bp, Homo sapiens
taccctttcatgcacatgtcctcttaaccctccaaccctccgtgggttccaacaccctatgccagttccacatggtcatgtggataccttcctattctcagtcagactccaataccctgctctgggccaccatgtccttcccttctcccatctgaatgcctgtctccctcaaccccatctaatgactttggactgaattgttagagtgagactaaatatgcagttcatgtgcctggggtcagctactccagtctggttttgtatttcttgtctcttaactacattctaagctacctatcttgcaaatagcagcagatatcaaataaattgataaaggagtactctgcaacttttatattttatgttataacatgaaaagtcatgttgtaacatttttagtggagtgtatattggcacagctcctatggagggtatggcagtgtctccaggagcatctcttcatttagagattctctaggatgtattcagagttgagatttattgcagcaatagagtaaagacactgtcagatcataagagaaaaagacactggaggaatctggaagaatccgtgtgcctgtttttttatgcccactccctttaggggtgacacagagcacactcttttcctagtcatgaaaatgcagcaatgcatgtgtggtattcctgcccagggaaatccattagagactcagcatccaggattttcattggtgctagccatataagcactctttaccaaacatgtacccaaattccagactcccagaaggaaggcagatgttcagcattaaccatattgtttgtacaaacagtctaggcatactgagccttctcccttccccacttaccaattaacttggagcgtctaaaagccaaggtcccagatgctagccaagagcaagccttgcaagcaggcatttctaaggacagtagtctaagagctgctatgctaactcttttctgcactgaggcttattggctgtattgcttgaaagaactaaatacttatactttttacacataggtatttacctgcaaaataagatgtgtgcagaattgcttattgtagcaatttgtaatagtaaaatactggaaataacctaactatccttcatttaaaataaggttttactacattcatactgtagagtgccaggtagctgttaac

SEQ ID NO: 28398 - DNA, 578 bp, Homo sapiens
aatcagtttacacaaattaaaaaaataaatcataacatttaattagtgatttcttcaaaaatatactaaaacaactctattaacctatcaactgcaaactcctagaagccaatttattttttactcttgagttttcttgtgtatttaagaataaagagaaaacaactaataatttctgggacagcccagccatatggactctgactttctcctccttcaggactcacaggtcagcctgctgctcttattgccaaggagaaggatatttctatccccagcccattcaggacttaatcttgtgtaaactgattgtgtccagtgaagaatctcttcccctctttctctttcggtccattggttgagttgtgagtgctgaaaagatcattcatatgaccaagattgtgatgcttagatgtttatccccagcaaacatgtaaactatagaaatctcagttgtctccaccaaacatctaaactgtatagcatctaagcagcctgaggctttcaccagatgcccagtcttccagccagcagcattgtgagccaaataaacatttttttctttataaattactcag

SEQ ID NO: 28399 - DNA, 334 bp, Homo sapiens
ctttttatatttattttcatcgctacacaaacattttttaggagtttgattctacctccattttggttagatatacaaactctaccccatgagggatgtatggtgtatttctagatttagcaacaattttcttgaaaaatgtacaatactatagaaaaatgaagatagtaaataccaggtataagttaataacagtgtttcttttgttcagtaataatgaactgtgtactagcactgaactttaggccctcctatttgcgtattttctgtttgtatatttttaaatagaggaattgtgattataatattattattttggaatatcctaaatcat

SEQ ID NO: 28400 - DNA, 179 bp, Homo sapiens
tcatgtttaacacccaaattttaatagactttattctttagaccagttcaggttcacagcaaaattgggtggaaggtagacagtttccataaacccccagcccctccacacacacagactcccccactatctacatcctcatcggagtggtccatttgttacagccgatgtcgacgcgg

SEQ ID NO: 28401 - DNA, 561 bp, Homo sapiens
cagttgtgttaatccatatatattcatactgtttttttttgttgttgttgttgttttgttttgttttgttttgtctgttctgttactgagaggcatatgttaaatctcccactgtgattatggatttgtctatttttccttgaatatctgttcaatttttgctttatttatgttgcaacatagttaatagtaacatatctactcaagtgctcccctacagctctcctcccaacatatacaaaggcatgtcatcagtttaaaacagccctggccgggtgcagtggctcatgcatgtaatccctgtactttggaaggccaaggtgggtagatcacgaggtcaggagttcgagaacagcttgaccaacatagtgaaactccgtctctactaaaaatacaaaaaattagccaggcatggtagcaggtgcctgtaatcctagctactcaggaggctgaggcaggggaatcgcttgaacccaggaggcggaggttgcagcgagccaagatcctaccactgcacaccagccaggacaacagtgcaagacttcgtccccccccccccaa

SEQ ID NO: 28402 - DNA, 487 bp, Homo sapiens
catttaacaccctccccttaacgatctccacctggcagcctccatttaacccaaaattcagggcatcaatcccctgtacagcccatgttccattggacaggttgggggctcagatgtttctcatagacaaggaatgaatctccggattggccactcctggattccctagctcaggacacacattcaggtgcatcatcaatctggggtcattctaaatatatgtttaagttattgctatcaggggcttttaccctacaaaaggcattaaataattaaaagtcataaaatatgctttaattagaaaactaggcatgacatttccaggatgatttcatatttatattaaattgaaaatatgtatgattttctgcagctattttcactcatggtttttaaaacttcatgcaatgggctgagtaaggtagctcatgcctgtacttgcagcactttgggagactgagtcaagaggattgctgagtccaggagt

SEQ ID NO: 28403 - DNA, 2716 bp, Homo sapiens
caaaaaaacaaaaaacaacaacaaaacttgctaccacccagggattttctgctatttaaaaggtgaatttcttttctggtactaaactgtagctgcttaacttagtaaaggctgtgtttggccaggcctgtgccagaggctcacctggagtgctccacccactggcaggcaagtcctattcctattcacccaggatccccaaggctgggctgggatataaatgttgggataggaaagaaatatttcctttttagaggaaagcaagaagaaacattgcctgaaaggtgattttctagtcatttccaattagtacagaaatgttactgcctctgggtgcagtggttcacgcctgtaatcccagcactgtgggcggatcacttgagcccaggagtttgagaccaacctgggcaagatggcgagaccccatctctacaaaaaaatttaaaaattacctgggcatggtggcacacacctttattctcagctactcaggtggctgaggtgggaggatcccttgagcccaggtggtcaaggctgtggtgagctatgatcatgccactgcactccagcctgggtagcagaacaagaccctgtctcaaaaaaaaaaaaaccccaaaaactgttactactaggttggagtagcctaaggcagtagggcaaggaggtgggcccaggctggtctgtggggagctggagaatggtgactcgagtgaccagtggacaggcaggacccaggccagcattacaagcggggatgtcaggcaggagcaggggagcttctcgcttggcagctggtttatggtacacttttgaaaagtaagctcccagggcctggccctcacatgctcagtgaatatttgactgaagggtcccctcatagcttgggagtattcacaggcctaaatgttagttatactattagctaagcctggtcctttgttacgaaatttaaaaatgaaattgcaacattcttgtggaaattcaaagacatcattttctttcaacaaattcacacattcgttcatgcttcttctataccttttacccctaaagtcatccactcctgagttcctcctgctggtttcccaaactgcgcaatgactgccccatcataggcagtggtccgtggagtcggcctcactttcgcctttccccgcatctacttgtttccaaggccagtggtacttaactgggtcaagttgcctgtggaccttcaggaacagaattgccatgttcctcactgcctggcaggaaaggctccattccaagcccagtgaagatgtgtgcctatccagccgcccaccaaggatgtcatctgtagaatgggtggagggcaggggtttatttggtgtatatttttacattaaaatgcacttaatatcactttgtaaagcccagatgagtgcaaatgtgcctgtaacttcctcctttaatctgtccaggtagtatttagtctttagtcttacattttctttctccctttatttcatgaaattccttgagaaaacttcaacagtaaagaaagaaatttcgttcatctcacaactcttccaaacgaggaaacttagtgaaatatttcagagcttctagatgtgaggtacaaaacttgggatcaaatggaatcttgattcactaaccaatttaagatctgacttctaattttaggaactttgggttatgaacgcttccattttatacctgtgtctagttagtttctgcctatctatccaagaagcttttatcaagggtccaccatgtgccagccactgaagtagatataaatacaaggatgtgtaaggtatggatgatggtatacgaactgtcatcttactggatttgtccgctctgttaaagatacggttccgaaaactttttaaagccctagagagggctttaaggcaatgtagcatcatatatagaggcatcaacctgttcatatctttctatttaacagaactgtgcacctgggcacaagggtgtgcacaacaggatgtgtacagcagcactgttaaagtgtagcacatccatactacaggatcttatgcaactgttggaaagaatgaagcgatgctgcactgtggtcatgcagtgatctctaagacatattaactagaaagcaaaaggtttaacaatgtatagcagctgggcgcagtgactcgcgcctgtaatcccagcactttgggaggctgagtagggcggatcacctgaggtcaggagtttgagaccaacctggccaatgtggcgaaacgctgtctctactaaaactacaaaaattagctgggcgtggtggcgcgtgcctgtaatcccagctactcggcaggctgaggcaggagaatcgcttgaactggggaggtggaggttgcagtgagccgagatcacaccactgcattccagcctgggtgacagagggagactccgtctctaaaaaacaacccccccccccccaaaaaaaaaaatgcatagcaagctgtaatgctctttgtgttttagaatagtagaggtctggaaagttgtttgcttttccccagtttttttttgctgtgttacctctgaagggaattgaggtagaggggagagttagaaggaatattcggcttttctattttatatcctcctaggtgaaatttttacaacaaacatgtactggtgtattttgaaatgtttttaaatttttgtatttcaaaataataaaatataaattcaaactgcaagctgg

SEQ ID NO: 28404 - DNA, 480 bp, Homo sapiens
gactatttcagagtttcatcccaacatccattcccaaatctgacacaaagagttttccttaaaaagtgatcccatagaatgtaagtactgtctcagaagcagatcgtagtcttgatagaggcttgagaaatttagcacaactttttaaggaattcatctcaaatgagtattatctttttgttcttaccttcgtccacttttaaatttaagataattttgatgaataaattgagttctgcttttgatgaaagaagcaaagaccagtatttgttttctatttatttgtagggttattctagccttagtttcttctagatttaagtataatcacttattttatttttaaatagttcaacaatttaacatttcccattccccggtgtatattaaaactgaagaggacgttctcatcctcacgagttgtccctttgagtgacctggatgcttgggaacgaggggctaccccgatgcttctctcct

SEQ ID NO: 28405 - DNA, 273 bp, Homo sapiens
gtgaagggcaggaggaaatgaagctaaggcataagcaggagccagcatgattataaggaccttgtaggatatgttgagaatttgagcttttattcctgaaagtagagggaaaccactggagtgtttaaagcaaaagagtgacaggatctggttaggagtggtagttcacacctgtaaacccaatgctttgggaggctaaggcaggaggattacttgagcccaggagttccagacaagtctaggcaacatagtgagaccctgtctcttcaaaaa

SEQ ID NO: 28406 - DNA, 389 bp, Homo sapiens
ggttaacacaccagtgacaggacaagccaccatcgggtgtgtacctcctaatagtggtccactgagaagaacagtgtcatgtctgtggcttcctgtcaaaagtgtataaactgaatctcagcacgaataacaggcaaacccagactgggaggtgttctacaaaaataactggcctgcacttctttaaactctgaaaaacgaatgaagaactattccacagttaaaggcgacatgacagctacatacatggtatgatcctggatttaactctggatcagaaaatggtttttgtgctgtaaagaatacaggtagggcaattaatgaaatctgaagatggtctgtagattatagtattgcatcagtgttgagtttccagttttcataattgc

SEQ ID NO: 28407 - DNA, 375 bp, Homo sapiens
cctggggttcaacatcacccccaatgggctgtgtgtcttgaggcaagtcactatccctctctgggcattgatctgaatgcaggggagggataatccaccacttgcaagggtgttggaagggtagagagactctgagtggggtggtgggggcggggggctttataaactggagggctgtaccctctggcgccgtggatacaaacgcctcattctttctccttctttctctttatcccattcccaatctgtcagtggagagagccccgagcagggtaagtgagtggcaccctgggactctttttatattcttgggaggccaacgctggttctgagctgatgggggcctcagaatgagacctaggtcgatcatggtgg

SEQ ID NO: 28408 - DNA, 302 bp, Homo sapiens
aaaggtaaaatcatgactcacatgcaaatgtaacatgaataaatgtcaaaaattttacttaacccattaattaattagggaatgagtaagatgctaaaatgagttcaaggagaatttgaagaatacacacacacacacacacacacacacacacacacacaaaatcaggagtgctgaaatgaatttgctaaaaagataaatgacgagttaatgggtgcagcacaccaacatggcacatgtatacatatgtaacaaacctacatgttgtgcacatgtaccctagaacttaaagtataataata

SEQ ID NO: 28409 - DNA, 387 bp, Homo sapiens
ccaaagggcaaagctgagagcaggggtgaattacacctaggaattgagactcacctaaggattggctgattggatttcagaattgttacagaccagggattcccttgtgcctactatctcttggcacccgccccccgctttgataggaatgttttatagaggttaccttaagcctgacccaatactgtatatttggcaagtgtctggagaaaggatgaggaccaggtaacatatcgctttggctttacaggtcagcaggaattgtacttgagaagctgtacttaaggaacatccaagaagtcccaactgtacctgaatctaacttagatgagattctagactttgagctgtgataggataagacttttgaatataacagctaaaaaa

SEQ ID NO: 28410 - DNA, 385 bp, Homo sapiens
gggaagggtttttcagccaggaaagtgaaatgtgccaatttcacttaaaaacagatccacttgggagaatgtgtgcaagatgcaagcgtggcagtgggaggtccggctggagcacttgtgagcttgggtgagagtggggtgtcatggcggacgtgactgtgggaagggctctgaagaggggtcggggacagtgaccagcaacaaggtggatggtgtggccggttactgagatggggaagcctggaagaggatcagatttaaaggggtaagtaagaaatgtggttgcagaggcagtaatttgaggtatctgtgtgacatccaaacagagatgtcagattggcagctgtgtgggtacatcttgctcaacacattaaataaaaaaaaa

SEQ ID NO: 28411 - DNA, 304 bp, Homo sapiens
ctcgtagctggaactacaggcgtgcaccaccatgctgggctaatttttggcatttttagtagagacagtgtttcaccaggtttcccaggctgatctcaaactcctgggctcaagtgatatgcccacctcaacctctcaaagtgctgggattacaggcatgagccgaccgtgtccagccaaataccacttattttttaatcgagtatacatcaaagcaaagacaatgcaaatggtgctcagagggacttgtagttgttttcactatcaatctctttggctccagaggtgttaaatactgtcagtt

SEQ ID NO: 28412 - DNA, 181 bp, Homo sapiens
gatcatctggatagattaaaaagggattcataaaatcgtgcaccctttacaacctctctttgaccatcataatgagtaaaagagcttgtgggggcaactcaaaagagggttctcctagggctcttcaatagaaggggatggggtaatcaagacttgggaatctatccatatcaggttgata

SEQ ID NO: 28413 - DNA, 1404 bp, Homo sapiens
atggccacccagacctgcacccctaccttctccactgggtctatcaagggcctctgtggcacagcaggcggcatctctcgggtgtcctccatccgttctgtgggctcctgcagggtccccagtctcgccggtgctgcagggtacatctcttctgctaggtcgggcctctctggccttgggagctgcttgcctggctcctacctgtcttctgagtgccacacctctggctttgtggggagcgggggctggttctgcgagggctccttcaacggcagcgagaaggagactatgcagttcctgaacgaccgcctggccaactacctggagaaggtgcgtcagctggagcgggagaacgcggagctggagagccgcatccaggagtggtacgagtttcagatcccatacatctgcccagactaccagtcctacttcaagaccatcgaagatttccagcagaagatcctgctgactaagtctgagaatgccaggctggtcctgcagattgataatgccaagctggctgctgacgacttccggaccaagtatgagacagagctgtctctgcggcagctagtggaggccgacatcaacggcctgcgtaggatcctggatgagctgaccctgtgcaaggctgacctggaggctcaggtggagtccctgaaggaggagctgatgtgcctcaagaagaatcacgaggaggaagtcagtgtactccgttgccaacttggggaccgactgaatgtggaggtggacgctgctcccccagtggatctcaacaagatcctggaggatatgagatgccagtacgaggccctggtggagaataaccgcagagatgtggaggcctggttcaacacccagactgaggagctgaaccagcaggtggtgtccagctcggagcagctgcagtgctgccagacggagatcatcgagctgagacgtacggtcaacgcgctagagattgagctgcaggctcagcacagcatgcggaattccttggaatccaccctggccgaaaccgaggcccgctacagctcccagctggcccagatgcagtgcctgatcagcaacgtggaggcccagctgtctgagatccgctgcgacctggagcggcagaaccaggagtaccaggtgttactggacgtcaaggcccggctggagggcgagatcgctacctaccgccacctgctggagggagaggactgcaagcttcctccccaaccttgtgccacggcatgcaagcctgttattagagttccttctgtccccccggtgccctgtgtcccctctgtgccctgcaccccggctccccaggttggcactcagatccgcaccatcaccgaggagatcagagatgggaaagtcatctcctccagggagcacgtgcagtcccgcccgctgtga

SEQ ID NO: 28414 - DNA, 1468 bp, Homo sapiens
agcagcttgaacttagttctcgctgagtcccggctcagggcccttcccttgggtcggggggttggctgtgcagtcaacaataaggaaaaaggcaagacactgagggcagctgaaagacttttacctttgacgagctggtcacctgctccagggaaggtacattcctctccccacaaccctagaggcacctctctggtccacagtgtccctcctgatgctcaggtcgggcctctctggccttgggagctgcttgcctggctcctacctgtcttctgagtgccacacctctggctttgtggggagcgggggctggttctgcgagggctccttcaacggcagcgagaaggagactatgcagttcctgaacgaccgcctggccaactacctggagaaggtgcgtcagctggagcgggagaacgcggagctggagagccgcatccaggagtggtacgagtttcagatcccatacatctgcccagactaccagtcctacttcaagaccatcgaagatttccagcagaagatcctgctgactaagtctgagaatgccaggctggtcctgcagattgataatgccaagctggctgctgacgacttccggaccaagtatgagacagagctgtctctgcggcagctagtggaggccgacatcaacggcctgcgtaggatcctggatgagctgaccctgtgcaaggctgacctggaggctcaggtggagtccctgaaggaggagctgatgtgcctcaagaagaatcacgaggaggaagtcagtgtactccgttgccaacttggggaccgactgaatgtggaggtggacgctgctcccccagtggatctcaacaagatcctggaggatatgagatgccagtacgaggccctggtggagaataaccgcagagatgtggaggcctggttcaacacccagactgaggagctgaaccagcaggtggtgtccagctcggagcagctgcagtgctgccagacggagatcatcgagctgagacgtacggtcaacgcgctagagattgagctgcaggctcagcacagcatgcggaattccttggaatccaccctggccgaaaccgaggcccgctacagctcccagctggcccagatgcagtgcctgatcagcaacgtggaggcccagctgtctgagatccgctgcgacctggagcggcagaaccaggagtaccaggtgttactggacgtcaaggcccggctggagggcgagatcgctacctaccgccacctgctggagggagaggactgcaagcttcctccccaaccttgtgccacggcatgcaagcctgttattagagttccttctgtccccccggtgccctgtgtcccctctgtgccctgcaccccggctccccaggttggcactcagatccgcaccatcaccgaggagatcagagatgggaaagtcatctcctccagggagcacgtgcagtcccgcccgctgtga

SEQ ID NO: 28415 - DNA, 683 bp, Homo sapiens
agcagcttgaacttagttctcgctgagtcccggctcagggcccttcccttgggtcggggggttggctgtgcagtcaacaataaggaaaaaggcaagacactgagggcagctgaaagacttttacctttgacgagctggtcacctgctccagggaaggtacattcctctccccacaaccctagaggcacctctctggtccacagtgtccctcctgatgctcaggtcgggcctctctggccttgggagctgcttgcctggctcctacctgtcttctgagtgccacacctctggctttgtggggagcgggggctggttctgcgagggctccttcaacggcagcgagaaggagactatgcagttcctgaacgaccgcctggccaactacctggagaaggtgcgtcagctggagcgggagaacgcggagctggagagccgcatccaggagtggtacgagtttcagatcccatacatctgcccagactaccagtcctacttcaagaccatcgaagatttccagcagaaggtgagggagacctggcccctttccagctgagcagcccaactcttaggaggcgtctgtctcattccagggcctttccagatgggacggtagcttttagggaattctcctggtagggcaaacttttctctctagggctttggtttcctgggggacccaggct

SEQ ID NO: 28416 - DNA, 531 bp, Homo sapiens
ccttttcccccttctaccttgaaatgtagctgtaattcatttctgccgttcatacagctagagctttccatcctgtgacaaacacaagccaaagtgcttaaggacatctgtttattttatttctttaacgagaaaaccttccaatttctcctgagctcagctgtgtttatttacattttcttggtcatgtgaggcgagcaccttggaagtttaaaggcctggccagacccttgcaggagcctgtagctctgaaacggagaggaagccctgcccaaggaaaacagagtccttggaactctataaaatagattctcaaaataaatactgcctcattcacttggtagatgtggattaagtcaagatgaatacaatttgaaaaggattttctgaggaagtcggagatttctttccccccctgggggttaaaccttgtatttaaatctctcttcccccttccctctctcttttcagctgagtaaaaggtgtttagtctttgtggctaataaagaaaggatgactttgattgggctt

SEQ ID NO: 28417 - DNA, 431 bp, Homo sapiens
ggccaatcttttcttttatatataatacttttaaaatacatttttatttctttcgtcgcccaggctggagagcaatggcgtaatctcggctcacggcaacggcaacctccgcttcctgggctcaagtgattctcctgcctcagcctcacaagtagctggaattacaggcacacgccaccatgcccagctaatttttgtatttttagtagagatggggtttcactatgttgttcaggcgggtcttgaactcctgacctcaggtgatccacctgtctcggcctcccagagtgttgggattacaggcgtgagccaccgcatccagcctcttttataggtaatacttttattgtcaagtctaagaactctttgtgtagcccaatcccaaagattttctactaatttttaaagttttatagttttctgttgtatac

SEQ ID NO: 28418 - DNA, 343 bp, Homo sapiens
ctgggactacaggcgtgcaccaccacgctcagctaatttttgtattttttgtagagatggggtttcactgctttggacaggatggtctccatctcttgacctcgtgatccgcccgcctcagctgcctaaagtgctgggattacaggcgtgagccactgtgcccggcccctagtagcgtttttaatgtgtggtcttgagcaagttggttgatacctctgcacacagtttccctacctgtatgatggagatgataatagccccttctctgcagagctgctgggaggagagtgaaataatgaacactacccacacggtgctgcctcagtcctattttgggtccagc

SEQ ID NO: 28419 - DNA, 381 bp, Homo sapiens
atgccggagccagcgaagtccgctcccgcgcccaagaagggctcgaagaaagccgtgactaaggcgcagaagaaggacggcaggaagcgcaagcgcagccgcaaggagagctactccgtatacgtgtacaaggtgctgaagcaggtccaccccgacaccggcatctcctctaaggccatgggaatcatgaactccttcgtcaacgacatcttcgaacgcatcgcaggtgaggcttcccgcctgccgcattacaacaagcgctcgaccatcacctccagggagatccagacggccgtgcgcctgctgctgcccggggagttggccaagcacgccgtgtccgagggcaccaaggccgtcaccaagtacaccagcgctaagtaa

SEQ ID NO: 28420 - DNA, 720 bp, Homo sapiens
gcgatcaaaacttacggcttttagagtgtttctctgaattatgtggcttttaaaaattgtatatatttaatgtgtacaacttgatttaatatatacatatacacaaaaaaatgtgtacattgtgaaataatcacggcaatcaagtgaattaacatatccatcacctcacttttgtgcgtgtgtgtgggtgggggttgtgtgtgcaccttgggtgatgaaaatatgcagtagatctgttagcagatttcaagtctgtaacacagtaggatgacctgtagtcactgtgctgtacatgagagctccggaacttactcatcgtgcgtcgtaccctttgatcagcgtctccccatttccctcctccccagtccctggtaaccaccctttgactctctgcttctatgaatttgactgtcttagattctccctgtaattgagatcatgcagtatgcgtggcttttcttgtcctgggcaccgaaaagggtgcctgctgtgggaaacccagggcagatgcccctggcttttatagccccttcaccacagtgcttttataagccctgcaaaaagggtagaaatcattgcacgtttacagaacttggatttgtaaggggtgaggaggatagaagacctttgcttttatttttgttttctaatcacagaagaaaaaatgtcctcattgttaaataacgaaaagccaaatgttagaaaaatgtaaagtcaagt

SEQ ID NO: 28421 - DNA, 231 bp, Homo sapiens
cccattaatatggtaatattacttaaccagtctcccctgataggcagttaagatgtttccaatcttttatcattataatcaatacttgtgaaggccatgtgcatattatgcatatatatacaagtatatgtcctagaaatggaattgctgacccaaagggcatgtaggtttacattctgaagatattgacaaatgccctccaaagaggctgtcaatttatactcccagcag

SEQ ID NO: 28422 - DNA, 439 bp, Homo sapiens
aaaagactgcccctcaccagactgggagggagcccaaatgggcagacatgtggtttttccactgatgtctctgcactgttcttgtcccgaaaacctggcaggatgaggaacaggccccagcttacagcatctcagccccttctttcttctctgctttcttaatgcctgttagtccagtgttaaatattttagcagcctgatgactcagatgtagactgtgaaagtgtttctttttccagggaaggcactggaacaggtctagttactgatgctcttaatgccctttccttttgcaagcctggccgagggtgtttaggaataaaaacttgcctggttgctgggcacggtggctcatgcctataatctcagcactttgagaggctgaggtgggaggattgcttgagcccaggagttagagaccagcttgggcaacatagtg

SEQ ID NO: 28423 - DNA, 583 bp, Homo sapiens
tgttctctggagtagcacctataacatccttcaagaactttttctttgcattcacaacttgagtagctgatgcaagaagcttagctttggcctgtcttagcttccaacatgctttcttcactaagctcgatgatttctaccttttgatttgaagtgacaggtgtgcacacttcttttcaattgaacacatggtggccactgcagagtgaagtggcctaatttcattgttgtatcttggggaatggggagctagaagagagaaacagagacagggaaatgactagtcaatgaagcagtcaaacacaacatttttccatcacgtttgctatcttccatagagttccagcacgctgagacaattccattagtaacatcagaaatcactgatcacagatcataacagatgtgataactaaaatctttgaaagattgggattgccaaaagatgtgacagagatgtgaagtgagcccatggtgttggaaaaatggtgctggtcaggcttgctgagcacttcgtggccacaaatctttaatttgttaaaaaggtgatgttgccaagcaaaataaagtgaagctcaaagtg

SEQ ID NO: 28424 - DNA, 234 bp, Homo sapiens
ctaggtccagaatgtgcttgtcaggaagggtgtgcagcccagggttctctccgtgttcactgcctctttcctttgtcatcttcattctgccgttgagcctatctagtgggtttttacaatttcagttactgtatgtttagttcgaagttttccatttggttctcctttataccttctgtttctttcctgagacttctcatcattccctttatgttaagaatacccctccttact

SEQ ID NO: 28425 - DNA, 434 bp, Homo sapiens
tgggtttttagttgtgaagagcactaggtagaagtctcaaccttaaccctaaacctaaattaattttgccccagttcagttctagctgcacaccccaagcccagtccagtccctttgcccagcttctcctcatgcatgaaatttaggggcaacaatgcaggggcaggtgttcctccacatgcctctctatccaagctcctctctccatccaactgctggagaaataacacacataacacgtcaagaatacatagtatctggcaagctaaagtacagtgagtgaggaagaatttctcaggaaaacaagctgcagagccataaatctgctaaaagattcacccaatttacatcgctaaacagaacacttctcactccaaagcctctgcgctcacattgattcacggcatttcagtcttccacaagaacaattggtg

SEQ ID NO: 28426 - DNA, 479 bp, Homo sapiens
agctgttgttttctttccctttaccatgattgtctacagtaataacttttgtctaaaaaaccaaaaaccaaaaatcagttttgcatccttttactcagatacttaatggtttgatactttaacatttcatgttaatatttccatcaagggaaaacaagaactagcaagaatgaacttactctgctggcctatcagattgtcagcatatttgtacagtattatgattcttactcaactgtgacatttgatgcatacatatatgcacacatacacatgtaaagatgaaattcttgactcttctttggtcctgtaagcacctactctagaatgtaaggaagtgttagagcaggagttgacagatttttcatgtgaagggtcagataatacttcaggtattactggccaagaggcaaaatggagaatgtattacatcaagagacaaaacaaattcccacaaattttttaattgaaaaaataaa

SEQ ID NO: 28427 - DNA, 1541 bp, Homo sapiens
  misc_feature (1)..(1): n is a, c, g, or t
naatagtggagcactaggcataaatgccttaaagaaaggactgatctcccctgaagaagagagaattctgcctctagattgcttacaatttgaactggaacatcagctgttctctaggtcttaagtctgctgctctaacctacaaattttggacatgccaatctccacagtcacatgggccaattccttagtttctctggagaatcctgactaatgtatgcaatgtctttatttcatcctcattcttaaaggatattttcatcagcaacaccacaccctcctgatcaccatagctttatggtaagacacccctactctgtccagacccaactgtcaacagaagccaaagccatctggaggagcatgcaacaacaagaaacaaatttattagctaacctaaccactaatgacgcaagagacaattctaaggactttcaaaacagcaaagtaggagcagctgctacctctagggatgagggatgcaattgtccaattattggtgaaattgtcatttcatgctattggctatttgaaattcctcctctaatttcagaataaatcactgaaattgacatcggccagtctgaatttcaagaaattacctgctgaagacaagagggatctcttcttcagatttgcagtctggggaagacacagcctctactgtactttagaacctgagatatggtggtggagggagccctgggtcgagtggtcagagctccggactccagccccatgcaacttcaaaatatgacaaatgtcttgaaggggagattggcatgcagatgaggaaggccctctcgccaacacatttgtatttcctctgtactgtgagactgtgggagatttactgcgacatttagaagctttcttccaaactcctgggcctccgacactggttctaaactcagcaaatgttctttgggaaaaacagacagtgcatgtgaggcccctcgagtttggaatttatgtctccagcttcacatggtctctcaagtgcttatgcttttcttctctctgccacccacattcccacatcccgcccaccccccaactttcctcccttcaccttcccatggagactttttgcctgggctaaatctgatcctcagcccactctcagaatcgataaatgcccctaggtgattgtaagctcacctaagatatactttttctcctctagaattttagtttattagatttttctagttgtctttgcaaaagcgttaacaggctctgacttctgacattcaactagatgtggaatatccaacccctagcatttcatggaatgtactgaccaagataaaatgtgttcttattaaacaatgccatttcttgaccacttctgtttttaggaattgtggtatctgagtcatggtgattagaagtactaatgaaataaatgggaaaattaaacttctactaacatttcatatagtagggagatgtctgtgaagaattataactggtacagattttgtgtttataaacaaggagacagaaaatgcagaaaataaaaaatattttatttagtc

SEQ ID NO: 28428 - DNA, 1207 bp, Homo sapiens
  misc_feature (1)..(1): n is a, c, g, or t
  misc_feature (1177)..(1177): n is a, c, g, or t
  misc_feature (1206)..(1206): n is a, c, g, or t
naatagtggagcactaggcataaatgccttaaagaaaggactgatctcccctgaagaagagagaattctgcctctagattgcttacaatttgaactggaacatcagctgttctctaggtcttaagtctgctgctctaacctacaaattttggacatgccaatctccacagtcacatgggccaattccttagtttctctggagaatcctgactaatgtatgcaatgtctttatttcatcctcattcttaaaggatattttcatcagcaacaccacaccctcctgatcaccatagctttatggatgcaattgtccaattattggtgaaattgtcatttcatgctattggctatttgaaattcctcctctaatttcagaataaatcactgaaattgacatcggccagtctgaatttcaagaaattacctgctgaagacaagagggatctcttcttcagatttgcagtctggggaagacacagcctctactgtactttagaacctgagatatggtggtggagggagccctgggtcgagtggtaagattcacccttaggttagtattgacgtaaggtgacgaggagctgtagacaaaagattgtaaccataagaacttcatagtttttgtattttcaccgagcttatatttggtgtgttttttgtcttttctttatgattatcaataaaatgcttgaaaggagatgaggttggggaataatttttgggaataccacaaaagacacttttgtgatggaaatccttaaaaagacacaatccattacctcattgggttcaaaaggcaattgtgaactactgtggagtttggaaagaagcaatgaggtaatcaaggatactgttgacaatctagcttatcctatggatggaaggaaattgaaactaatggaggcgaggctggtaaaacaatagggtttgagacaattctgtggcattagaaatgaaagaggaaggtgaatccgggagacggagcttgcagtgagctgagatcgcgccactgcactccagcctgggcgacagagcgagactccatctcaaaaaaaaaagaaagaaagaaaagaaagaggaagtaataatctgtgaaatttttccttaggaacttattggcaatttaaaaatgaatttgttaagccatgctggttctgacccaaaagccattccccanccttcctcactcccctctttcactactgnc

SEQ ID NO: 28429 - DNA, 1319 bp, Homo sapiens
  misc_feature (1)..(1): n is a, c, g, or t
  misc_feature (1289)..(1289): n is a, c, g, or t
  misc_feature (1318)..(1318): n is a, c, g, or t
naatagtggagcactaggcataaatgccttaaagaaaggactgatctcccctgaagaagagagaattctgcctctagattgcttacaatttgaactggaacatcagctgttctctaggtcttaagtctgctgctctaacctacaaattttggacatgccaatctccacagtcacatgggccaattccttagtttctctggagaatcctgactaatgtatgcaatgtctttatttcatcctcattcttaaaggatattttcatcagcaacaccacaccctcctgatcaccatagctttatgcaacaacaagaaacaaatttattagctaacctaaccactaatgacgcaagagacaattctaaggactttcaaaacagcaaagtaggagcagctgctacctctagggatgagggatgcaattgtccaattattggtgaaattgtcatttcatgctattggctatttgaaattcctcctctaatttcagaataaatcactgaaattgacatcggccagtctgaatttcaagaaattacctgctgaagacaagagggatctcttcttcagatttgcagtctggggaagacacagcctctactgtactttagaacctgagatatggtggtggagggagccctgggtcgagtggtaagattcacccttaggttagtattgacgtaaggtgacgaggagctgtagacaaaagattgtaaccataagaacttcatagtttttgtattttcaccgagcttatatttggtgtgttttttgtcttttctttatgattatcaataaaatgcttgaaaggagatgaggttggggaataatttttgggaataccacaaaagacacttttgtgatggaaatccttaaaaagacacaatccattacctcattgggttcaaaaggcaattgtgaactactgtggagtttggaaagaagcaatgaggtaatcaaggatactgttgacaatctagcttatcctatggatggaaggaaattgaaactaatggaggcgaggctggtaaaacaatagggtttgagacaattctgtggcattagaaatgaaagaggaaggtgaatccgggagacggagcttgcagtgagctgagatcgcgccactgcactccagcctgggcgacagagcgagactccatctcaaaaaaaaaagaaagaaagaaaagaaagaggaagtaataatctgtgaaatttttccttaggaacttattggcaatttaaaaatgaatttgttaagccatgctggttctgacccaaaagccattccccanccttcctcactcccctctttcactactgnc

SEQ ID NO: 28430 - DNA, 656 bp, Homo sapiens
  misc_feature (8)..(8): n is a, c, g, or t
atccccgngctgcaggaattcggcacgagctctactgaaggctactcttcttatcaagtaacgtcttctccatgctcttgacccttgccccttcagacctatggatggtaataacctgcccacacctagtttaccatcagaggacacagcagcaaggtgccatcctagaagcagagagcagacccttaccagacaaccaaccagctggtgccatgatcttggacttctcggcctccagaactgtgagaaataaatttctatattctataaattacccattctgtagtgtcttgtaatagtagcacaaatagactaagactgtaagaaaatggatttgggtcaaacaagcatttgagtggcgcattaaagaattctcaaataaacccgatattttttgcccataaatagtagtactttacatcttaagatgcattttaaaaaacgaaaatttagatgaatggctaacatttgaaatgattatttcttaagatgcgatctgtgttctctaactccaattcttgggtatgagagagagaggagccatccattgttctttccacattttgatttccaactgaggtcaaaacacattgatcaaagccgggaaccaagagccaaaggtgaaagaatccacaaactcagatacatgaggacat

SEQ ID NO: 28431 - DNA, 1364 bp, Homo sapiens
  misc_feature (1334)..(1334): n is a, c, g, or t
  misc_feature (1363)..(1363): n is a, c, g, or t
gctgggactacaggcgcccgccatgatgcccggctaattttttgtatttttagcagagacggggtttcaccctgttagccaggatggtctcatctcctgacctcgtgatccgcccgcctaggcctcccaaagtgctgggattacaggcgtgagccaccgcgcccggcctaataaaggacaatttttaatagccactggactatttaagtgatctcttcttctgtcagtttcttttaccatcagaggacacagcagcaaggtgccatcctagaagcagagagcagacccttaccagacaaccaaccagctggtgccatgatcttggacttctcggcctccagaactcaacaacaagaaacaaatttattagctaacctaaccactaatgacgcaagagacaattctaaggactttcaaaacagcaaagtaggagcagctgctacctctagggatgagggatgcaattgtccaattattggtgaaattgtcatttcatgctattggctatttgaaattcctcctctaatttcagaataaatcactgaaattgacatcggccagtctgaatttcaagaaattacctgctgaagacaagagggatctcttcttcagatttgcagtctggggaagacacagcctctactgtactttagaacctgagatatggtggtggagggagccctgggtcgagtggtaagattcacccttaggttagtattgacgtaaggtgacgaggagctgtagacaaaagattgtaaccataagaacttcatagtttttgtattttcaccgagcttatatttggtgtgttttttgtcttttctttatgattatcaataaaatgcttgaaaggagatgaggttggggaataatttttgggaataccacaaaagacacttttgtgatggaaatccttaaaaagacacaatccattacctcattgggttcaaaaggcaattgtgaactactgtggagtttggaaagaagcaatgaggtaatcaaggatactgttgacaatctagcttatcctatggatggaaggaaattgaaactaatggaggcgaggctggtaaaacaatagggtttgagacaattctgtggcattagaaatgaaagaggaaggtgaatccgggagacggagcttgcagtgagctgagatcgcgccactgcactccagcctgggcgacagagcgagactccatctcaaaaaaaaaagaaagaaagaaaagaaagaggaagtaataatctgtgaaatttttccttaggaacttattggcaatttaaaaatgaatttgttaagccatgctggttctgacccaaaagccattccccanccttcctcactcccctctttcactactgnc

SEQ ID NO: 28432 - DNA, 666 bp, Homo sapiens
gctgggactacaggcgcccgccatgatgcccggctaattttttgtatttttagcagagacggggtttcaccctgttagccaggatggtctcatctcctgacctcgtgatccgcccgcctaggcctcccaaagtgctgggattacaggcgtgagccaccgcgcccggcctaataaaggacaatttttaatagccactggactatttaagtgatctcttcttctgtcagtttcttttaccatcagaggacacagcagcaaggtgccatcctagaagcagagagcagacccttaccagacaaccaaccagctggtgccatgatcttggacttctcggcctccagaactttgtgttgtaggtgaaaatcaccgagtcttagaaatacagctgagaatgagtaaggagagagagttgctctgcctaagcacattctccctcactgaaggcactttgaagtgacctcaggaagatcacagaagttcccctagcttcacccccactatagaaatgcaaccagaaactattcaaagacaaaaataccatcctgaattcaccagaacctggagaagtggagacacccactgggcacacaattgagcgaagttgccagcagtaagagaagccgccatttgagactgcaccacacctccctcaagccgtcagaacta

SEQ ID NO: 28433 - DNA, 1548 bp, Homo sapiens
  misc_feature (1)..(1): n is a, c, g, or t
  misc_feature (1518)..(1518): n is a, c, g, or t
  misc_feature (1547)..(1547): n is a, c, g, or t
naatagtggagcactaggcataaatgccttaaagaaaggactgatctcccctgaagaagagagaattctgcctctagattgcttacaatttgaactggaacatcagctgttctctaggtcttaagtctgctgctctaacctacaaattttggacatgccaatctccacagtcacatgggccaattccttagtttctctggagaatcctgactaatgtatgcaatgtctttatttcatcctcattcttaaaggatattttcatcagcaacaccacaccctcctgatcaccatagctttatgatctgagctttcatctggtatcatttcctttccgtctgaagaacttgctttccttgcaacaacaagaaacaaatttattagctaacctaaccactaatgacgcaagagacaattctaaggactttcaaaacagcaaagtaggagcagctgctacctctagggatgagggagaaactcaaaaatgcatacaaaaaccattgcatgaaaagtgactggatttgtacatagcgtcaggagatgtgcgtagtgtcaaagtatctcatcacacattacttgataattacaaatgagaaaaatgaaccttcacagtggcaagacttgacttctacctctttcaaaaagatgcaattgtccaattattggtgaaattgtcatttcatgctattggctatttgaaattcctcctctaatttcagaataaatcactgaaattgacatcggccagtctgaatttcaagaaattacctgctgaagacaagagggatctcttcttcagatttgcagtctggggaagacacagcctctactgtactttagaacctgagatatggtggtggagggagccctgggtcgagtggtaagattcacccttaggttagtattgacgtaaggtgacgaggagctgtagacaaaagattgtaaccataagaacttcatagtttttgtattttcaccgagcttatatttggtgtgttttttgtcttttctttatgattatcaataaaatgcttgaaaggagatgaggttggggaataatttttgggaataccacaaaagacacttttgtgatggaaatccttaaaaagacacaatccattacctcattgggttcaaaaggcaattgtgaactactgtggagtttggaaagaagcaatgaggtaatcaaggatactgttgacaatctagcttatcctatggatggaaggaaattgaaactaatggaggcgaggctggtaaaacaatagggtttgagacaattctgtggcattagaaatgaaagaggaaggtgaatccgggagacggagcttgcagtgagctgagatcgcgccactgcactccagcctgggcgacagagcgagactccatctcaaaaaaaaaagaaagaaagaaaagaaagaggaagtaataatctgtgaaatttttccttaggaacttattggcaatttaaaaatgaatttgttaagccatgctggttctgacccaaaagccattccccanccttcctcactcccctctttcactactgnc

SEQ ID NO: 28434 - DNA, 711 bp, Homo sapiens
  misc_feature (8)..(8): n is a, c, g, or t
atccccgngctgcaggaattcggcacgagctctactgaaggctactcttcttatcaagtaacgtcttctccatgctcttgacccttgccccttcagacctatggatggtaataacctgcccacacctagtttaccatcagaggacacagcagcaaggtgccatcctagaagcagagagcagacccttaccagacaaccaaccagctggtgccatgatcttggacttctcggcctccagaactgtgagaaataaatttctatattctataaattacccattctgtagtgtcttgtaatagtagcacaaatagactaagactgtaagaaaatggatttgggtcaaacaagcatttgagtggcgcattaaagaattctcaaataaacccgatattttttgcccataaatagtagtactttacatcttaagatgcattttaaaaaacgaaaatttagataaaacaacaaatagcgtcagttttctacatggctaatatctgggcagaaatctaggaatggctaacatttgaaatgattatttcttaagatgcgatctgtgttctctaactccaattcttgggtatgagagagagaggagccatccattgttctttccacattttgatttccaactgaggtcaaaacacattgatcaaagccgggaaccaagagccaaaggtgaaagaatccacaaactcagatacatgaggacat

SEQ ID NO: 28435 - DNA, 298 bp, Homo sapiens
agtggagcactaggcataaatgccttaaagaaaggactgatctcccctgaagaagagagaattctgcctctagattgcttacaatttgaactggaacatcagctgttctctaggtcttaagtctgctgctctaacctacaaattttggacatgccaatctccacagtcacatgggccaattccttagtttctctggagaatcctgactaatgtatgcaatgtctttatttcatcctcattcttaaaggatattttcatcaggtatgctattttaggttgatggttattttcctagtgc

SEQ ID NO: 28436 - DNA, 1492 bp, Homo sapiens
  misc_feature (1)..(1): n is a, c, g, or t
  misc_feature (1462)..(1462): n is a, c, g, or t
  misc_feature (1491)..(1491): n is a, c, g, or t
naatagtggagcactaggcataaatgccttaaagaaaggactgatctcccctgaagaagagagaattctgcctctagattgcttacaatttgaactggaacatcagctgttctctaggtcttaagtctgctgctctaacctacaaattttggacatgccaatctccacagtcacatgggccaattccttagtttctctggagaatcctgactaatgtatgcaatgtctttatttcatcctcattcttaaaggatattttcatcagcaacaccacaccctcctgatcaccatagctttatgcaacaacaagaaacaaatttattagctaacctaaccactaatgacgcaagagacaattctaaggactttcaaaacagcaaagtaggagcagctgctacctctagggatgagggagaaactcaaaaatgcatacaaaaaccattgcatgaaaagtgactggatttgtacatagcgtcaggagatgtgcgtagtgtcaaagtatctcatcacacattacttgataattacaaatgagaaaaatgaaccttcacagtggcaagacttgacttctacctctttcaaaaagatgcaattgtccaattattggtgaaattgtcatttcatgctattggctatttgaaattcctcctctaatttcagaataaatcactgaaattgacatcggccagtctgaatttcaagaaattacctgctgaagacaagagggatctcttcttcagatttgcagtctggggaagacacagcctctactgtactttagaacctgagatatggtggtggagggagccctgggtcgagtggtaagattcacccttaggttagtattgacgtaaggtgacgaggagctgtagacaaaagattgtaaccataagaacttcatagtttttgtattttcaccgagcttatatttggtgtgttttttgtcttttctttatgattatcaataaaatgcttgaaaggagatgaggttggggaataatttttgggaataccacaaaagacacttttgtgatggaaatccttaaaaagacacaatccattacctcattgggttcaaaaggcaattgtgaactactgtggagtttggaaagaagcaatgaggtaatcaaggatactgttgacaatctagcttatcctatggatggaaggaaattgaaactaatggaggcgaggctggtaaaacaatagggtttgagacaattctgtggcattagaaatgaaagaggaaggtgaatccgggagacggagcttgcagtgagctgagatcgcgccactgcactccagcctgggcgacagagcgagactccatctcaaaaaaaaaagaaagaaagaaaagaaagaggaagtaataatctgtgaaatttttccttaggaacttattggcaatttaaaaatgaatttgttaagccatgctggttctgacccaaaagccattccccanccttcctcactcccctctttcactactgnc

SEQ ID NO: 28437 - DNA, 407 bp, Homo sapiens
ttttctttttttgttttttctttaacaagacaaagtctccctcttggcccccaggctggagtgcaatggcgcgatctcggctcactgcaacctctgcctcccgggttcaagcgattctcctgcctcagcctctcgagtagctgggattacaggtgtgtaccaccaagtctggctaatttttgtattttaagtagtgacgaggtttcaccacatcggccaagctggtctcgagctcctgacctcaggtgattcgcccacctcggtctcccaaagtgctgggattactggcatgagccactgagcctggccgaaaattttcatagtaaaatgctgggggagaaaataattccgagttataatcaaaataaaggaggcagcaggccccactgtgaaaaacctcagccctg

SEQ ID NO: 28438 - DNA, 299 bp, Homo sapiens
ttacagtcaggaaaaaaaggtttagttcaccttgagaggttagagaaagaaaggttatcattgaatgaaatgcatggcttgatgccatttgtaaaacaggttggtgctggctcaagaaggcaggaacaaattctaacttggttgaaaagtatgattggcggaggggtaaaggaaaatctccagaattagtcattcaggggctctgcaatgtagatctgaagcagtgcggagaaaaggctaccaatccaccttcatcttagcaagcaagcactgttcctcttcttgattccagggagcta

SEQ ID NO: 28439 - DNA, 728 bp, Homo sapiens
ggaaaagttagagggaaatatggaaaagacgtaaatgaggattaggggattaaaatcattctcctttgttttaatttacagattctttgattccaaaattaagcgtcaaaataaatattttgtatggcatctagaattttcaaattcttaaaaaatgcatgttttttgttgctgttttgttgatttagggaagcaggatagtcattatcagatttacgatggttatagtaataatcacatattaaaaaaccctcattttcctttttataaatttaagaaactcctatcatactgtgatttaggagaagccattgaatttcagttgtttcagagtaaggaataatacccaaaaagcaaaatagattataaagctgacttttctagagcttcatttcaactttgaatataaaacattatcttttcaaatatgagaaactaaaaaagaagaaatgaaagaatcatttaagttacacaaatgtgtagttctgttcctacatagcgttgattagatcataaatgcttaaatttctaatggctacagagtgaattatggaaatgagaatcactagtacaatgttatattttgaaactgtgttcacatatttgaatactatttacatgaaatttgttatataacttgaacaaagtacagaatatgttaataataataaaaatttgttgaaacactttctgtgtttcatatgcattaaagtatatggctataagat

SEQ ID NO: 28440 - DNA, 411 bp, Homo sapiens
taccaatatcccagggatggaattatggtagggtcattctaattccattttatacaagggaaactaaggacccagaaagtttaaatcggtcatttatttgtttgtttatgcatatatccagcaaatatttgttgggtacatactatatataggtcactgtcgtgagcattataatgtctaagcaatcaaatttggagtaaagaacttgaattaagttcattcaattcctagactaacattatttctatatgtagttctgatcagtattctagaattatggtttaaatatccagttataaataatatatattacagatttattattatgtacctgaaactctactgagtacttttcatgccttatctcatttaatcctatcataatccaatgaagtaagccctaccactatc

SEQ ID NO: 28441 - DNA, 557 bp, Homo sapiens
ttttagtttgtcatgcttaaacagacccctcagtattctcacagagaactgaagcaattcattttcaagactaacaagagcacagcatctgcatgcatgtggcaggtatgttagtgaatgttgtgaagtaggtggtcccatcagttgtcatggttcacctctgtccagactgtgattgtgtgactcgcagttggcacttcagcaaagcttaggaaaatgcctcatcttcttttgtgggaggtggaaaaataagtagctgctttcaatgaacactgcaagccttgttaaagtctgtacctttcatacagaaactcctagatgaatggcaatggaaaatacgggtttgtgataactttgaatgatgtgtgattgccttgattagcactatagttactaagcagatatgcacttctttgttttaaaagagaacttgaattttttttttactataactgccagttgcttaatttctaccactttgtctatttttttaaaaaatgaatttccacctaatttgtgcttgtcagtgatgacaagttttaaaagtaactcaagtt

SEQ ID NO: 28442 - DNA, 265 bp, Homo sapiens
tgttttttacaactgagtttactctgtctgtgaaggccgcagcgtaaagccagttgtgaatcatgcacatcagctccttctgaaatgtgtttatggcctaggacacagggaccctggagactatggtgctgcagtgcattatggctgctacccttctagtctgtcctgctgctcgttctgccacctgccagctgttgctacctgaaccttctccttgcagcagttctcagtgttctctttgcttgggaattgcctggggagctaa

SEQ ID NO: 28443 - DNA, 2404 bp, Homo sapiens
gctcacccattctacacttgctcttttgctcccaaccaggaagccatcatgtcttgccgctcctaccgagtcagctctggtcaccgggtgggcaacttcagctcttgttcagcaatgacaccacagaacctgaatcgcttccgggccaactctgtctcctgttggagtgggcctggattccggggccttggcagctttggtagtcggagtgtcatcacctttggatcgtactcaccccggatagcagctgtaggctctcggcccatccactgtggagtccgctttggtgctggctgtgggatgggttttggtgatgggagaggtgttggtctggggcctagggctgacagctgtgttggtctgggctttggagctggcagtggcattggctatggctttggtggccctggctttggttacagagttggaggggttggagtcccagcagccccatctatcacagctgtgactgtgaacaagagcctactgacccccctcaacctggagattgaccccaatgcccagagggtgaagaaggatgagaaggagcaaatcaagaccctcaacaacaagtttgcctccttcattgacaaggttcggttcctagagcagcagaataagctcctagagaccaagtggagcttcctccaagagcagaaatgtatcaggagcaatctggagccactcttcgagagctacatcaccaacctgcggaggcagttggaggtgctggtcagtgatcaggcccggctccaggctgagaggaaccacctgcaggatgtcctagagggcttcaagaagaagtatgaagaggaagtggtatgtcgggccaatgctgagaatgagtttgtggctctgaagaaggatgtggatgcagctttcatgaacaagtctgatctcgaggccaacgtggataccctaactcaggaaattgactttctaaaaacgctttacatggaggaaatccagttgctgcagtcgcacatctcagagacgtcggtcattgtgaagatggacaacagccgtgacctgaaccttgatgggatcattgctgaggtcaaggcccagtatgaggaggtggccaggcgcagccgggctgatgctgaggcctggtaccagaccaagtatgaagagatgcaggtgacagctggccaacactgtgacaacctgcgcaacatacggaacgagatcaacgaactgacccgcctgatccagaggcttaaggcagagattgagcacgccaaggctcagcgtgccaagttggaggctgcagtggccgaggccgagcagcagggcgaggcgaccctcagtgatgccaaatgcaagctggcagatctggagtgtgccctgcagcaggccaagcaggacatggcgcggcagctgtgcgagtaccaggagctgatgaatgccaagctgggcctggacatcgagatcgccacctacaggcgcctgctggagggcgaggagagccggctctgtgaaggtgttggaccagtaaacatatccgtcagcagctcccggggcggcctggtgtgcgggcctgagcctttggttgccggctccaccctctcccgcggcggggtcaccttctcaggtagcagcagcgtctgtgccaccagtggggtcctggcttcctgtggccccagcctgggtggagcccgggtcgccccggccactggggacctgctgagcactggcacaaggagtggctccatgctcatcagcgaggcctgtgtccccagcgtcccctgccccctgcccacccaggggggcttcagcagctgcagcggcggccgcagctccagcgtccgctttgtgtccaccaccacctcctgccggaccaagtactgagagcccagccccagacagctgctgcccagagaagaaccagctccacggctcctgcttctgcccccagggttcgtgggctctgggcttgacggtctccagctcccctttctgccaggaagccaccccttagcactcccccgattattctgcctggccccatgtcctcttggaggatttttctgccatgtagatgctccattagcagttccagctaagctggcttctccctgcctcccaatttctgtcctttggatcactcctctccctaaaccccgagatggcttttctcccagtggcttctctccggctgtttctcttcctgggttgttggtgtaactccagcatgcaagtccacgaggtggggtgcaggcggacaggcgggctttgcaatgatccccgtactcctgcccctgctcgtggtgtgaggcccagccctgtccactgcagggttgtgtctgcaagctccaaggaggcctgggggttgggtggggtgggctgcctgtgtgcactactctttgtgttcctgggttttcaataaacttgccaagctcac

SEQ ID NO: 28444 - DNA, 340 bp, Homo sapiens
  misc_feature (338)..(340): n is a, c, g, or t
tttctcgcccacgacttcccagggctgagatcaagttctcctcctacagaaaggtgcccatcctggtggcccaggaaggagaaagctcgggacggcagatatgaaatgcctggcacagtgcttggggtctagtatgtagcttccagaacccaccctgcccctctacctgggaggccaaatggcaacaactaaatgactcctctgtcatcatcagcgccctcaagacctacctggtgtcggggcagcacgctggaagagatcattacttactacgcatgcatgaagcctctttactagtcttgcgaagaaagggttcatcaagaatcagcgggacatannn

SEQ ID NO: 28445 - DNA, 2843 bp, Homo sapiens
aggctggtactggtctggggagtttgggatgtccgcggagacgcctatgcggtggaggctccgggcttcagctagggcgggggagcccagcagaaggaccgagcagcctggcaccccactttgccatcctctccctggaaatctcggggtcggcgggccggccgcttcgcgtgggcgaaatcagagacacgtggtttccaaggccccttcgggttcgggaaaattttatggttcgggtcacagtaggaagcggacaatgaggcgggagggcagagagaaccgcaacaccgccgcgcacctggtgccgggtcgggtcgtttccggggctttcagtggccggaagtcgcggcgcctgtactgactctaggaagggctggagttgttttgaatgggcgcccgtaagagaggtgggcaagtacgtgttacagacggccacgccgccctttaggcggtcaaggtggggcgagcagacgttcgcccccctgcagtcggccgggtcactacccaagagcctttggaggcggaagcatggaacggtctgcaaacgttcccgagcgggcctctgcggctctggcgggcgtttcgaacttgggcgccgggcacacgcccagtcccgagagcgctgagggttcccttagcgtcgccctcaccccggccaacccgcggggcgccagagtcctggccctttaaacgccgcgcgtgcctcggcgtcttcgtttcgcgcgcccgcccgcggcgccggcggagcgaacatggacccggctgcgcgggtggtgcgggcgctgtggcctggtgggtgcgccttggcctggaggctgggaggccgcccccagccgctgctacccacgcagagccgggctggcttcgcgggggcggcgggcggcccgagccccgtggctgcagctcgtaaggggagcccgcggctgctgggagctgcggcgctggccctggggggagccctggggctgtaccacacggcgcggtggcacctgcgcgcccaggacctccacgcagagcgctcagccgcgcagctctccctgtccagccgcctgcagctgaccctgtaccagtacaagacgtgtcccttctgcagcaaggtccgagccttcctcgacttccatgccctgccctaccaggtggtggaggtgaaccctgtgcgcagggctgagatcaagttctcctcctacagaaaggtgcccatcctggtggcccaggaaggagaaagctcgcaacaactaaatgactcctctgtcatcatcagcgccctcaagacctacctggtgtcggggcagcccctggaagagatcatcacctactacccagccatgaaggctgtgaacgagcagggcaaggaggtgaccgagttcggcaataagtactggctcatgctcaacgagaaggaggcccagcaagtgtatggtgggaaggaggccaggacggaggagatgaagtggcggcagtgggcggacgactggctggtgcacctgatctcccccaatgtgtaccgcacgcccaccgaggctctggcgtcctttgactacattgtccgcgagggcaagttcggagccgtggagggtgccgtggccaagtacatgggtgcagcggccatgtacctcatcagcaagcgactcaagagcaggcaccgcctccaggacaacgtgcgcgaggacctctatgaggctgctgacaagtgggtggctgctgtgggcaaggaccggcccttcatggggggccagaagccgaatctcgctgatttggcggtgtatggcgtgctgcgtgtgatggaggggctggatgcattcgatgacctgatgcagcacacgcacatccagccctggtacctgcgggtggagagggccatcaccgaggcctccccagcgcactgaatgtccccgcgcagagcagagggaaggcagcggaagacgccagctgccagggcctggggccactgggccagcgcctggcgatactggttgggggcaggatcattctgccccttgtccacgcacccccaccagccctctcgcttctaacacagggcacctgctggggctcagggatgttagggacgagttccagccctgccactgccctggggcgacccctccctgtccctgcctccctgctctgccgcccctcttcctggaccctcagtggctgtcccatggctacatcctgtgggtgggggccctcgacaggacagcaggacggtttgttttcagtggaatcccatccctgggttcccctggttcccactcttcccaagcctcccgggactgggacatgtttgcaataaaggaaaggtttgtggcgcctgtcatggcaggcatctcatggaacaaaaaaaacactgagaacacagaaagaaaaaacacggttgggccgcctgctggcccgtgaaagaggttcaaaaacccattggttgggcgcccgggcccaatcaggtagcgcacacggggcaagcgggccaaggaaacccgcgcagacagacgaggggggcatacacccaaataaaacggcgggggaccacgggcttcggaccaaacccgagggaacgggggccacaggggaacacacagagggtcacggagcgaatatccgcacaggagagaggaaaggcgcaagcacatcaacacgcggcaggaccagacagggacgaggggcgagggggagcggccggcgacacgagcgcgaagacaaacaagcagggacgaccagcggcactcacaaggaacacgcgagcggggtggcgacgagaaggcaaagcaaatcagggcgtgaggacacgcggggacggacgagaaacggcacaccgacgggacaccgcccgcagcccacaaaaa

SEQ ID NO: 28446 - DNA, 2846 bp, Homo sapiens
  misc_feature (2709)..(2709): n is a, c, g, or t
aggctggtactggtctggggagtttgggatgtccgcggagacgcctatgcggtggaggctccgggcttcagctagggcgggggagcccagcagaaggaccgagcagcctggcaccccactttgccatcctctccctggaaatctcggggtcggcgggccggccgcttcgcgtgggcgaaatcagagacacgtggtttccaaggccccttcgggttcgggaaaattttatggttcgggtcacagtaggaagcggacaatgaggcgggagggcagagagaaccgcaacaccgccgcgcacctggtgccgggtcgggtcgtttccggggctttcagtggccggaagtcgcggcgcctgtactgactctaggaagggctggagttgttttgaatgggcgcccgtaagagaggtgggcaagtacgtgttacagacggccacgccgccctttaggcggtcaaggtggggcgagcagacgttcgcccccctgcagtcggccgggtcactacccaagagcctttggaggcggaagcatggaacggtctgcaaacgttcccgagcgggcctctgcggctctggcgggcgtttcgaacttgggcgccgggcacacgcccagtcccgagagcgctgagggttcccttagcgtcgccctcaccccggccaacccgcggggcgccagagtcctggccctttaaacgccgcgcgtgcctcggcgtcttcgtttcgcgcgcccgcccgcggcgccggcggagcgaacatggacccggctgcgcgggtggtgcgggcgctgtggcctggtgggtgcgccttggcctggaggctgggaggccgcccccagccgctgctacccacgcagagccgggctggcttcgcgggggcggcgggcggcccgagccccgtggctgcagctcgtaaggggagcccgcggctgctgggagctgcggcgctggccctggggggagccctggggctgtaccacacggcgcggtggcacctgcgcgcccaggacctccacgcagagcgctcagccgcgcagctctccctgtccagccgcctgcagctgaccctgtaccagtacaagacgtgtcccttctgcagcaaggtccgagccttcctcgacttccatgccctgccctaccaggtggtggaggtgaaccctgtgcgcagggctgagatcaagttctcctcctacagaaaggtgcccatcctggtggcccaggaaggagaaagctcgcaacaactaaatgactcctctgtcatcatcagcgccctcaagacctacctggtgtcggggcagcccctggaagagatcatcacctactacccagccatgaaggctgtgaacgagcagggcaaggaggtgaccgagttcggcaataagtactggctcatgctcaacgagaaggaggcccagcaagtgtatggtgggaaggaggccaggacggaggagatgaagtggcggcagtgggcggacgactggctggtgcacctgatctcccccaatgtgtaccgcacgcccaccgaggctctggcgtcctttgactacattgtccgcgagggcaagttcggagccgtggagggtgccgtggccaagtacatgggtgcagcggccatgtacctcatcagcaagcgactcaagagcaggcaccgcctccaggacaacgtgcgcgaggacctctatgaggctgctgacaagtgggtggctgctgtgggcaaggaccggcccttcatggggggccagaagccgaatctcgctgatttggcggtgtatggcgtgctgcgtgtgatggaggggctggatgcattcgatgacctgatgcagcacacgcacatccagccctggtacctgcgggtggagagggccatcaccgaggcctccccagcgcactgaatgtccccgcgcagagcagagggaaggcagcggaagacgccagctgccagggcctggggccactgggccagcgcctggcgatactggttgggggcaggatcattctgccccttgtccacgcacccccaccagccctctcgcttctaacacagggcacctgctggggctcagggatgttagggacgagttccagccctgccactgccctggggcgacccctccctgtccctgcctccctgctctgccgcccctcttcctggaccctcagtggctgtcccatggctacatcctgtgggtgggggccctcgacaggacagcaggacggtttgttttcagtggaatcccatccctgggttcccctggttcccactcttcccaagcctcccgggactgggacatgtttgcaataaaggaaaggtttgtggcgcctgtcatggcaggcatctcatggaaaaaaaaaaaaaaaaaaaaaaaaaaaaaaaaaaaaaaaaaaaaaaaaaaaaaaaaaaaaaaaaaagaaggaggggcggcgccacctcaggaattaccatccctgcggaggggggacccagtcattgtaggcgcacgcgcagcagttttgtggaagaacagggggggccgccccagaaggaggaggacgattaatattaaaggcgcagcgccgcagccgcggcgctataacaacacgactgtcgggcgtggggaaaaaagcggagccggcgggggatacctttgtaggaaagaagagagccccaacctgatgtcggggggggagcaacaataagtggggaaaaaacctcatcccatagaggagatatttatnagcgctgctggggaggaatgaatatttaaactatttagggggtgtataagggggttcaacccacgcggagagtagttctgcgccagagagaaaaattttggtccagcgggatattattgtagaggcaaatttatttc

SEQ ID NO: 28447 - DNA, 2654 bp, Homo sapiens
aggctggtactggtctggggagtttgggatgtccgcggagacgcctatgcggtggaggctccgggcttcagctagggcgggggagcccagcagaaggaccgagcagcctggcaccccactttgccatcctctccctggaaatctcggggtcggcgggccggccgcttcgcgtgggcgaaatcagagacacgtggtttccaaggccccttcgggttcgggaaaattttatggttcgggtcacagtaggaagcggacaatgaggcgggagggcagagagaaccgcaacaccgccgcgcacctggtgccgggtcgggtcgtttccggggctttcagtggccggaagtcgcggcgcctgtactgactctaggaagggctggagttgttttgaatgggcgcccgtaagagaggtgggcaagtacgtgttacagacggccacgccgccctttaggcggtcaaggtggggcgagcagacgttcgcccccctgcagtcggccgggtcactacccaagagcctttggaggcggaagcatggaacggtctgcaaacgttcccgagcgggcctctgcggctctggcgggcgtttcgaacttgggcgccgggcacacgcccagtcccgagagcgctgagggttcccttagcgtcgccctcaccccggccaacccgcggggcgccagagtcctggccctttaaacgccgcgcgtgcctcggcgtcttcgtttcgcgcgcccgcccgcggcgccggcggagcgaacatggacccggctgcgcgggtggtgcgggcgctgtggcctggtgggtgcgccttggcctggaggctgggaggccgcccccagccgctgctacccacgcagagccgggctggcttcgcgggggcggcgggcggcccgagccccgtggctgcagctcgtaaggggagcccgcggctgctgggagctgcggcgctggccctggggggagccctggggctgtaccacacggcgcggtggcacctgcgcgcccaggacctccacgcagagcgctcagccgcgcagctctccctgtccagccgcctgcagctgaccctgtaccagtacaagacgtgtcccttctgcagcaaggtccgagccttcctcgacttccatgccctgccctaccaggtggtggaggtgaaccctgtgcgcagggctgagatcaagttctcctcctacagaaaggtgcccatcctggtggcccaggaaggagaaagctcgcaacaactaaatgactcctctgtcatcatcagcgccctcaagacctacctggtgtcggggcagcccctggaagagatcatcacctactacccagccatgaaggctgtgaacgagcagggcaaggaggtgaccgagttcggcaataagtactggctcatgctcaacgagaaggaggcccagcaagtgtatggtgggaaggaggccaggacggaggagatgaagtggcggcagtgggcggacgactggctggtgcacctgatctcccccaatgtgtaccgcacgcccaccgaggctctggcgtcctttgactacattgtccgcgagggcaagttcggagccgtggagggtgccgtggccaagtacatgggtgcagcggccatgtacctcatcagcaagcgactcaagagcaggcaccgcctccaggacaacgtgcgcgaggacctctatgaggctgctgacaagtgggtggctgctgtgggcaaggaccggcccttcatggggggccagaagccgaatctcgctgatttggcggtgtatggcgtgctgcgtgtgatggaggggctggatgcattcgatgacctgatgcagcacacgcacatccagccctggtacctgcgggtggagagggccatcaccgaggcctccccagcgcactgaatgtccccgcgcagagcagagggaaggcagcggaagacgccagctgccagggcctggggccactgggccagcgcctggcgatactggttgggggcaggatcattctgccccttgtccacgcacccccaccagccctctcgcttctaacacagggcacctgctgggttcccctggttcccactcttcccaagcctcccgggactgggacatgtttgcaataaaggaaaggtttgtggcgcctgtcatggcaggcatctcatggaacaaaaaaaacactgagaacacagaaagaaaaaacacggttgggccgcctgctggcccgtgaaagaggttcaaaaacccattggttgggcgcccgggcccaatcaggtagcgcacacggggcaagcgggccaaggaaacccgcgcagacagacgaggggggcatacacccaaataaaacggcgggggaccacgggcttcggaccaaacccgagggaacgggggccacaggggaacacacagagggtcacggagcgaatatccgcacaggagagaggaaaggcgcaagcacatcaacacgcggcaggaccagacagggacgaggggcgagggggagcggccggcgacacgagcgcgaagacaaacaagcagggacgaccagcggcactcacaaggaacacgcgagcggggtggcgacgagaaggcaaagcaaatcagggcgtgaggacacgcggggacggacgagaaacggcacaccgacgggacaccgcccgcagcccacaaaaa

SEQ ID NO: 28448 - DNA, 2616 bp, Homo sapiens
  misc_feature (2479)..(2479): n is a, c, g, or t
aggctggtactggtctggggagtttgggatgtccgcggagacgcctatgcggtggaggctccgggcttcagctagggcgggggagcccagcagaaggaccgagcagcctggcaccccactttgccatcctctccctggaaatctcggggtcggcgggccggccgcttcgcgtgggcgaaatcagagacacgtggtttccaaggccccttcgggttcgggaaaattttatggttcgggtcacagtaggaagcggacaatgaggcgggagggcagagagaaccgcaacaccgccgcgcacctggtgccgggtcgggtcgtttccggggctttcagtggccggaagtcgcggcgcctgtactgactctaggaagggctggagttgttttgaatgggcgcccgtaagagaggtgggcaagtacgtgttacagacggccacgccgccctttaggcggtcaaggtggggcgagcagacgttcgcccccctgcagtcggccgggtcactacccaagagcctttggaggcggaagcatggaacggtctgcaaacgttcccgagcgggcctctgcggctctggcgggcgtttcgaacttgggcgccgggcacacgcccagtcccgagagcgctgagggttcccttagcgtcgccctcaccccggccaacccgcggggcgccagagtcctggccctttaaacgccgcgcgtgcctcggcgtcttcgtttcgcgcgcccgcccgcggcgccggcggagcgaacatggacccggctgcgcgggtggtgcgggcgctgtggcctggtgggtgcgccttggcctggaggctgggaggccgcccccagccgctgctacccacgcagagccgggctggcttcgcgggggcggcgggcggcccgagccccgtggctgcagctcgtaaggggagcccgcggctgctgggagctgcggcgctggccctggggggagccctggggctgtaccacacggcgcggtggcacctgcgcgcccaggacctccacgcagagcgctcagccgcgcagctctccctgtccagccgcctgcagctgaccctgtaccagtacaagacgtgtcccttctgcagcaaggtccgagccttcctcgacttccatgccctgccctaccaggtggtggaggtgaaccctgtgcgcagggctgagatcaagttctcctcctacagaaaggtgcccatcctggtggcccaggaaggagaaagctcgcaacaactaaatgactcctctgtcatcatcagcgccctcaagacctacctggtgtcggggcagcccctggaagagatcatcacctactacccagccatgaaggctgtgaacgagcagggcaaggaggtgaccgagttcggcaataagtactggctcatgctcaacgagaaggaggcccagcaagtgtatggtgggaaggaggccaggacggaggagatgaagtggcggcagtgggcggacgactggctggtgcacctgatctcccccaatgtgtaccgcacgcccaccgaggctctggcgtcctttgactacattgtccgcgagggcaagttcggagccgtggagggtgccgtggccaagtacatgggtgcagcggccatgtacctcatcagcaagcgactcaagagcaggcaccgcctccaggacaacgtgcgcgaggacctctatgaggctgctgacaagtgggtggctgctgtgggcaaggaccggcccttcatggggggccagaagccgaatctcgctgatttggcggtgtatggcgtgctgcgtgtgatggaggggctggatgcattcgatgacctgatgcagcacacgcacatccagccctggtacctgcgggtggagagggccatcaccgaggcctccccagcgcactgaatctccctgctctgccgcccctcttcctggaccctcagtggctgtcccatggctacatcctgtgggtgggggccctcgacaggacagcaggacggtttgttttcagtggaatcccatccctgggttcccctggttcccactcttcccaagcctcccgggactgggacatgtttgcaataaaggaaaggtttgtggcgcctgtcatggcaggcatctcatggaaaaaaaaaaaaaaaaaaaaaaaaaaaaaaaaaaaaaaaaaaaaaaaaaaaaaaaaaaaaaaaaaagaaggaggggcggcgccacctcaggaattaccatccctgcggaggggggacccagtcattgtaggcgcacgcgcagcagttttgtggaagaacagggggggccgccccagaaggaggaggacgattaatattaaaggcgcagcgccgcagccgcggcgctataacaacacgactgtcgggcgtggggaaaaaagcggagccggcgggggatacctttgtaggaaagaagagagccccaacctgatgtcggggggggagcaacaataagtggggaaaaaacctcatcccatagaggagatatttatnagcgctgctggggaggaatgaatatttaaactatttagggggtgtataagggggttcaacccacgcggagagtagttctgcgccagagagaaaaattttggtccagcgggatattattgtagaggcaaatttatttc

SEQ ID NO: 28449 - DNA, 3297 bp, Homo sapiens
aggctggtactggtctggggagtttgggatgtccgcggagacgcctatgcggtggaggctccgggcttcagctagggcgggggagcccagcagaaggaccgagcagcctggcaccccactttgccatcctctccctggaaatctcggggtcggcgggccggccgcttcgcgtgggcgaaatcagagacacgtggtttccaaggccccttcgggttcgggaaaattttatggttcgggtcacagtaggaagcggacaatgaggcgggagggcagagagaaccgcaacaccgccgcgcacctggtgccgggtcgggtcgtttccggggctttcagtggccggaagtcgcggcgcctgtactgactctaggaagggctggagttgttttgaatgggcgcccgtaagagaggtgggcaagtacgtgttacagacggccacgccgccctttaggcggtcaaggtggggcgagcagacgttcgcccccctgcagtcggccgggtcactacccaagagcctttggaggcggaagcatggaacggtctgcaaacgttcccgagcgggcctctgcggctctggcgggcgtttcgaacttgggcgccgggcacacgcccagtcccgagagcgctgagggttcccttagcgtcgccctcaccccggccaacccgcggggcgccagagtcctggccctttaaacgccgcgcgtgcctcggcgtcttcgtttcgcgcgcccgcccgcggcgccggcggagcgaacatggacccggctgcgcgggtggtgcgggcgctgtggcctggtgggtgcgccttggcctggaggctgggaggccgcccccagccgctgctacccacgcagagccgggctggcttcgcgggggcggcgggcggcccgagccccgtggctgcagctcgtaaggggagcccgcggctgctgggagctgcggcgctggccctggggggagccctggggctgtaccacacggcgcggtggcacctgcgcgcccaggacctccacgcagagcgctcagccgcgcagctctccctgtccagccgcctgcagctgaccctgtaccagtacaagacgtgtcccttctgcagcaaggtccgagccttcctcgacttccatgccctgccctaccaggtggtggaggtgaaccctgtgcgcagggctgagatcaagttctcctcctacagaaaggtgcccatcctggtggcccaggaaggagaaagctcgcaacaactaaatgactcctctgtcatcatcagcgccctcaagacctacctggtgtcggggcagcccctggaagagatcatcacctactacccagccatgaaggctgtgaacgagcagggcaaggaggtgaccgagttcggcaataagtactggctcatgctcaacgagaaggaggcccagcaagtgtatggtgggaaggaggccaggacggaggagatgaagtggcggcagtgggcggacgactggctggtgcacctgatctcccccaatgtgtaccgcacgcccaccgaggctctggcgtcctttgactacattgtccgcgagggcaagttcggagccgtggagggtgccgtggccaagtacatgggtgcagcggccatgtacctcatcagcaagcgactcaagagcaggcaagtgtgtgtgcacatccggggcctgctgtccccgagcctccggtgccacgagcagtggtgatcccatcacacccctcaggagaccagcgggaggccgaggcctagggcaggtgggaaacgcattatggattatgggtcccttggccaagatgggacttggacccagagctcctgctcacctcccctggggacagcagggctggccttgaagccggaagcctgggccctgactggcgcctcctctgtggctttctccctggcctggtctcttgcctttaccacagcctccccgtctgggacggatgctccctgaggcgtctgcagatgtgatgctctcacctggggtgccgtcctggcttccacacctcccccctctccccagaggagaccctcttccctgctgggctgggagtgggggctcccctgaggggcttttcccttccccgcccaggcaccgcctccaggacaacgtgcgcgaggacctctatgaggctgctgacaagtgggtggctgctgtgggcaaggaccggcccttcatggggggccagaagccgaatctcgctgatttggcggtgtatggcgtgctgcgtgtgatggaggggctggatgcattcgatgacctgatgcagcacacgcacatccagccctggtacctgcgggtggagagggccatcaccgaggcctccccagcgcactgaatgtccccgcgcagagcagagggaaggcagcggaagacgccagctgccagggcctggggccactgggccagcgcctggcgatactggttgggggcaggatcattctgccccttgtccacgcacccccaccagccctctcgcttctaacacagggcacctgctggggctcagggatgttagggacgagttccagccctgccactgccctggggcgacccctccctgtccctgcctccctgctctgccgcccctcttcctggaccctcagtggctgtcccatggctacatcctgtgggtgggggccctcgacaggacagcaggacggtttgttttcagtggaatcccatccctgggttcccctggttcccactcttcccaagcctcccgggactgggacatgtttgcaataaaggaaaggtttgtggcgcctgtcatggcaggcatctcatggaacaaaaaaaacactgagaacacagaaagaaaaaacacggttgggccgcctgctggcccgtgaaagaggttcaaaaacccattggttgggcgcccgggcccaatcaggtagcgcacacggggcaagcgggccaaggaaacccgcgcagacagacgaggggggcatacacccaaataaaacggcgggggaccacgggcttcggaccaaacccgagggaacgggggccacaggggaacacacagagggtcacggagcgaatatccgcacaggagagaggaaaggcgcaagcacatcaacacgcggcaggaccagacagggacgaggggcgagggggagcggccggcgacacgagcgcgaagacaaacaagcagggacgaccagcggcactcacaaggaacacgcgagcggggtggcgacgagaaggcaaagcaaatcagggcgtgaggacacgcggggacggacgagaaacggcacaccgacgggacaccgcccgcagcccacaaaaa

SEQ ID NO: 28450 - DNA, 1760 bp, Homo sapiens
aggctggtactggtctggggagtttgggatgtccgcggagacgcctatgcggtggaggctccgggcttcagctagggcgggggagcccagcagaaggaccgagcagcctggcaccccactttgccatcctctccctggaaatctcggggtcggcgggccggccgcttcgcgtgggcgaaatcagagacacgtggtttccaaggccccttcgggttcgggaaaattttatggttcgggtcacagtaggaagcggacaatgaggcgggagggcagagagaaccgcaacaccgccgcgcacctggtgccgggtcgggtcgtttccggggctttcagtggccggaagtcgcggcgcctgtactgactctaggaagggctggagttgttttgaatgggcgcccgtaagagaggtgggcaagtacgtgttacagacggccacgccgccctttaggcggtcaaggtggggcgagcagacgttcgcccccctgcagtcggccgggtcactacccaagagcctttggaggcggaagcatggaacggtctgcaaacgttcccgagcgggcctctgcggctctggcgggcgtttcgaacttgggcgccgggcacacgcccagtcccgagagcgctgagggttcccttagcgtcgccctcaccccggccaacccgcggggcgccagagtcctggccctttaaacgccgcgcgtgcctcggcgtcttcgtttcgcgcgcccgcccgcggcgccggcggagcgaacatggacccggctgcgcgggtggtgcgggcgctgtggcctggtgggtgcgccttggcctggaggctgggaggccgcccccagccgctgctacccacgcagagccgggctggcttcgcgggggcggcgggcggcccgagccccgtggctgcagctcgtaaggggagcccgcggctgctgggagctgcggcgctggccctggggggagccctggggctgtaccacacggcgcggtggcacctgcgcgcccaggacctccacgcagagcgctcagccgcgcagctctccctgtccagccgcctgcagctgaccctgtaccagtacaagacgtgtcccttctgcagcaaggtccgagccttcctcgacttccatgccctgccctaccaggtggtggaggtgaaccctgtgcgcagggctgagatcaagttctcctcctacagaaaggtgcccatcctggtggcccaggaaggagaaagctcgcaacaactaaatgactcctctgtcatcatcagcgccctcaagacctacctggtgtcggggcagcccctggaagagatcatcacctactacccagccatgaaggctgtgaacgagcagggcaaggaggtgaccgagttcggcaataagtactggctcatgctcaacgagaaggaggcccagcaagtgtatggtgggaaggaggccaggacggaggagatgaagtggcggcagtgggcggacgactggctggtgcacctgatctcccccaatgtgtaccgcacgcccaccgaggctctggcgtcctttgactacattgtccgcgagggcaagttcggagccgtggagggtgccgtggccaagtacatgggtgcagcggccatgtacctcatcagcaagcgactcaagagcagccggtccggaaagtggcgaggcctttagtgtgacagtggctgtggaggccggccaggggccaacgactccgagggtgggcgcggaagggggccaggccccccgcggggggcggcctcccaa

SEQ ID NO: 28451 - DNA, 2057 bp, Homo sapiens
cgcactattcataggtgcgatgcctcgttgtaattcggtcgaggccaggcgttagatccacgcagagccgggctggcttcgcgggggcggcgggcggcccgagccccgtggctgcagctcgtaaggggagcccgcggctgctgggagctgcggcgctggccctggggggagccctggggctgtaccacacggcgcggtggcacctgcgcgcccaggacctccacgcagagcgctcagccgcgcagctctccctgtccagccgcctgcagctgaccctgtaccagtacaagacgtgtcccttctgcagcaaggtccgagccttcctcgacttccatgccctgccctaccaggtggtggaggtgaaccctgtgcgcagggctgagatcaagttctcctcctacagaaaggtgcccatcctggtggcccaggaaggagaaagctcgcaacaactaaatgactcctctgtcatcatcagcgccctcaagacctacctggtgtcggggcagcccctggaagagatcatcacctactacccagccatgaaggctgtgaacgagcagggcaaggaggtgaccgagttcggcaataagtactggctcatgctcaacgagaaggaggcccagcaagtgtatggtgggaaggaggccaggacggaggagatgaagtggcggcagtgggcggacgactggctggtgcacctgatctcccccaatgtgtaccgcacgcccaccgaggctctggcgtcctttgactacattgtccgcgagggcaagttcggagccgtggagggtgccgtggccaagtacatgggtgcagcggccatgtacctcatcagcaagcgactcaagagcaggcaccgcctccaggacaacgtgcgcgaggacctctatgaggctgctgacaagtgggtggctgctgtgggcaaggaccggcccttcatggggggccagaagccgaatctcgctgatttggcggtgtatggcgtgctgcgtgtgatggaggggctggatgcattcgatgacctgatgcagcacacgcacatccagccctggtacctgcgggtggagagggccatcaccgaggcctccccagcgcactgaatgtccccgcgcagagcagagggaaggcagcggaagacgccagctgccagggcctggggccactgggccagcgcctggcgatactggttgggggcaggatcattctgccccttgtccacgcacccccaccagccctctcgcttctaacacagggcacctgctggggctcagggatgttagggacgagttccagccctgccactgccctggggcgacccctccctgtccctgcctccctgctctgccgcccctcttcctggaccctcagtggctgtcccatggctacatcctgtgggtgggggccctcgacaggacagcaggacggtttgttttcagtggaatcccatccctgggttcccctggttcccactcttcccaagcctcccgggactgggacatgtttgcaataaaggaaaggtttgtggcgcctgtcatggcaggcatctcatggaacaaaaaaaacactgagaacacagaaagaaaaaacacggttgggccgcctgctggcccgtgaaagaggttcaaaaacccattggttgggcgcccgggcccaatcaggtagcgcacacggggcaagcgggccaaggaaacccgcgcagacagacgaggggggcatacacccaaataaaacggcgggggaccacgggcttcggaccaaacccgagggaacgggggccacaggggaacacacagagggtcacggagcgaatatccgcacaggagagaggaaaggcgcaagcacatcaacacgcggcaggaccagacagggacgaggggcgagggggagcggccggcgacacgagcgcgaagacaaacaagcagggacgaccagcggcactcacaaggaacacgcgagcggggtggcgacgagaaggcaaagcaaatcagggcgtgaggacacgcggggacggacgagaaacggcacaccgacgggacaccgcccgcagcccacaaaaa

SEQ ID NO: 28452 - DNA, 2822 bp, Homo sapiens
  misc_feature (2685)..(2685): n is a, c, g, or t
aggctggtactggtctggggagtttgggatgtccgcggagacgcctatgcggtggaggctccgggcttcagctagggcgggggagcccagcagaaggaccgagcagcctggcaccccactttgccatcctctccctggaaatctcggggtcggcgggccggccgcttcgcgtgggcgaaatcagagacacgtggtttccaaggccccttcgggttcgggaaaattttatggttcgggtcacagtaggaagcggacaatgaggcgggagggcagagagaaccgcaacaccgccgcgcacctggtgccgggtcgggtcgtttccggggctttcagtggccggaagtcgcggcgcctgtactgactctaggaagggctggagttgttttgaatgggcgcccgtaagagaggtgggcaagtacgtgttacagacggccacgccgccctttaggcggtcaaggtggggcgagcagacgttcgcccccctgcagtcggccgggtcactacccaagagcctttggaggcggaagcatggaacggtctgcaaacgttcccgagcgggcctctgcggctctggcgggcgtttcgaacttgggcgccgggcacacgcccagtcccgagagcgctgagggttcccttagcgtcgccctcaccccggccaacccgcggggcgccagagtcctggccctttaaacgccgcgcgtgcctcggcgtcttcgtttcgcgcgcccgcccgcggcgccggcggagcgaacatggacccggctgcgcgggtggtgcgggcgctgtggcctggtgggtgcgccttggcctggaggctgggaggccgcccccagccgctgctacccacgcagagccgggctggcttcgcgggggcggcgggcggcccgagccccgtggctgcagctcgtaaggggagcccgcggctgctgggagctgcggcgctggccctggggggagccctggggctgtaccacacggcgcggtggcacctgcgcgcccaggacctccacgcagagcgctcagccgcgcagctctccctgtccagccgcctgcagctgaccctgtaccagtacaagacgtgtcccttctgcagcaaggtccgagccttcctcgacttccatgccctgccctaccaggtggtggaggtgaaccctgtgcgcagggctgagatcaagttctcctcctacagaaaggtgcccatcctggtggcccaggaaggagaaagctcgcaacaactaaatgactcctctgtcatcatcagcgccctcaagacctacctggtgtcggggcagcccctggaagagatcatcacctactacccagccatgaaggctgtgaacgagcagggcaaggaggtgaccgagttcggcaataagtactggctcatgctcaacgagaaggaggcccagcaagtggaggagatgaagtggcggcagtgggcggacgactggctggtgcacctgatctcccccaatgtgtaccgcacgcccaccgaggctctggcgtcctttgactacattgtccgcgagggcaagttcggagccgtggagggtgccgtggccaagtacatgggtgcagcggccatgtacctcatcagcaagcgactcaagagcaggcaccgcctccaggacaacgtgcgcgaggacctctatgaggctgctgacaagtgggtggctgctgtgggcaaggaccggcccttcatggggggccagaagccgaatctcgctgatttggcggtgtatggcgtgctgcgtgtgatggaggggctggatgcattcgatgacctgatgcagcacacgcacatccagccctggtacctgcgggtggagagggccatcaccgaggcctccccagcgcactgaatgtccccgcgcagagcagagggaaggcagcggaagacgccagctgccagggcctggggccactgggccagcgcctggcgatactggttgggggcaggatcattctgccccttgtccacgcacccccaccagccctctcgcttctaacacagggcacctgctggggctcagggatgttagggacgagttccagccctgccactgccctggggcgacccctccctgtccctgcctccctgctctgccgcccctcttcctggaccctcagtggctgtcccatggctacatcctgtgggtgggggccctcgacaggacagcaggacggtttgttttcagtggaatcccatccctgggttcccctggttcccactcttcccaagcctcccgggactgggacatgtttgcaataaaggaaaggtttgtggcgcctgtcatggcaggcatctcatggaaaaaaaaaaaaaaaaaaaaaaaaaaaaaaaaaaaaaaaaaaaaaaaaaaaaaaaaaaaaaaaaaagaaggaggggcggcgccacctcaggaattaccatccctgcggaggggggacccagtcattgtaggcgcacgcgcagcagttttgtggaagaacagggggggccgccccagaaggaggaggacgattaatattaaaggcgcagcgccgcagccgcggcgctataacaacacgactgtcgggcgtggggaaaaaagcggagccggcgggggatacctttgtaggaaagaagagagccccaacctgatgtcggggggggagcaacaataagtggggaaaaaacctcatcccatagaggagatatttatnagcgctgctggggaggaatgaatatttaaactatttagggggtgtataagggggttcaacccacgcggagagtagttctgcgccagagagaaaaattttggtccagcgggatattattgtagaggcaaatttatttc

SEQ ID NO: 28453 - DNA, 2936 bp, Homo sapiens
aggctggtactggtctggggagtttgggatgtccgcggagacgcctatgcggtggaggctccgggcttcagctagggcgggggagcccagcagaaggaccgagcagcctggcaccccactttgccatcctctccctggaaatctcggggtcggcgggccggccgcttcgcgtgggcgaaatcagagacacgtggtttccaaggccccttcgggttcgggaaaattttatggttcgggtcacagtaggaagcggacaatgaggcgggagggcagagagaaccgcaacaccgccgcgcacctggtgccgggtcgggtcgtttccggggctttcagtggccggaagtcgcggcgcctgtactgactctaggaagggctggagttgttttgaatgggcgcccgtaagagaggtgggcaagtacgtgttacagacggccacgccgccctttaggcggtcaaggtggggcgagcagacgttcgcccccctgcagtcggccgggtcactacccaagagcctttggaggcggaagcatggaacggtctgcaaacgttcccgagcgggcctctgcggctctggcgggcgtttcgaacttgggcgccgggcacacgcccagtcccgagagcgctgagggttcccttagcgtcgccctcaccccggccaacccgcggggcgccagagtcctggccctttaaacgccgcgcgtgcctcggcgtcttcgtttcgcgcgcccgcccgcggcgccggcggagcgaacatggacccggctgcgcgggtggtgcgggcgctgtggcctggtgggtgcgccttggcctggaggctgggaggccgcccccagccgctgctacccacgcagagccgggctggcttcgcgggggcggcgggcggcccgagccccgtggctgcagctcgtaaggggagcccgcggctgctgggagctgcggcgctggccctggggggagccctggggctgtaccacacggcgcggtggcacctgcgcgcccaggacctccacgcagagcgctcagccgcgcagctctccctgtccagccgcctgcagctgaccctgtaccagtacaagacgtgtcccttctgcagcaaggtccgagccttcctcgacttccatgccctgccctaccaggtggtggaggtgaaccctgtgcgcagggctgagatcaagttctcctcctacagaaaggtgcccatcctggtggcccaggaaggagaaagctcgggacggcagatatgaaatgcctggcacagtgcttggggtctagtatgtagcttccagaacccaccctgcccctctacctgggaggccaaatggcaacaactaaatgactcctctgtcatcatcagcgccctcaagacctacctggtgtcggggcagcccctggaagagatcatcacctactacccagccatgaaggctgtgaacgagcagggcaaggaggtgaccgagttcggcaataagtactggctcatgctcaacgagaaggaggcccagcaagtgtatggtgggaaggaggccaggacggaggagatgaagtggcggcagtgggcggacgactggctggtgcacctgatctcccccaatgtgtaccgcacgcccaccgaggctctggcgtcctttgactacattgtccgcgagggcaagttcggagccgtggagggtgccgtggccaagtacatgggtgcagcggccatgtacctcatcagcaagcgactcaagagcaggcaccgcctccaggacaacgtgcgcgaggacctctatgaggctgctgacaagtgggtggctgctgtgggcaaggaccggcccttcatggggggccagaagccgaatctcgctgatttggcggtgtatggcgtgctgcgtgtgatggaggggctggatgcattcgatgacctgatgcagcacacgcacatccagccctggtacctgcgggtggagagggccatcaccgaggcctccccagcgcactgaatgtccccgcgcagagcagagggaaggcagcggaagacgccagctgccagggcctggggccactgggccagcgcctggcgatactggttgggggcaggatcattctgccccttgtccacgcacccccaccagccctctcgcttctaacacagggcacctgctggggctcagggatgttagggacgagttccagccctgccactgccctggggcgacccctccctgtccctgcctccctgctctgccgcccctcttcctggaccctcagtggctgtcccatggctacatcctgtgggtgggggccctcgacaggacagcaggacggtttgttttcagtggaatcccatccctgggttcccctggttcccactcttcccaagcctcccgggactgggacatgtttgcaataaaggaaaggtttgtggcgcctgtcatggcaggcatctcatggaacaaaaaaaacactgagaacacagaaagaaaaaacacggttgggccgcctgctggcccgtgaaagaggttcaaaaacccattggttgggcgcccgggcccaatcaggtagcgcacacggggcaagcgggccaaggaaacccgcgcagacagacgaggggggcatacacccaaataaaacggcgggggaccacgggcttcggaccaaacccgagggaacgggggccacaggggaacacacagagggtcacggagcgaatatccgcacaggagagaggaaaggcgcaagcacatcaacacgcggcaggaccagacagggacgaggggcgagggggagcggccggcgacacgagcgcgaagacaaacaagcagggacgaccagcggcactcacaaggaacacgcgagcggggtggcgacgagaaggcaaagcaaatcagggcgtgaggacacgcggggacggacgagaaacggcacaccgacgggacaccgcccgcagcccacaaaaa

SEQ ID NO: 28454 - DNA, 1925 bp, Homo sapiens
gggcacctgcgcgcccaggtgccaccgcgccgtgtggtacagccccaggctccccccaggcgcggtggcacctgcgcgcccaggacctccacgcagagcgctcagccgcgcagctctccctgtccagccgcctgcagctgaccctgtaccagtacaagacgtgtcccttctgcagcaaggtccgagccttcctcgacttccatgccctgccctaccaggtggtggaggtgaaccctgtgcgcagggctgagatcaagttctcctcctacagaaaggtgcccatcctggtggcccaggaaggagaaagctcgcaacaactaaatgactcctctgtcatcatcagcgccctcaagacctacctggtgtcggggcagcccctggaagagatcatcacctactacccagccatgaaggctgtgaacgagcagggcaaggaggtgaccgagttcggcaataagtactggctcatgctcaacgagaaggaggcccagcaagtgtatggtgggaaggaggccaggacggaggagatgaagtggcggcagtgggcggacgactggctggtgcacctgatctcccccaatgtgtaccgcacgcccaccgaggctctggcgtcctttgactacattgtccgcgagggcaagttcggagccgtggagggtgccgtggccaagtacatgggtgcagcggccatgtacctcatcagcaagcgactcaagagcaggcaccgcctccaggacaacgtgcgcgaggacctctatgaggctgctgacaagtgggtggctgctgtgggcaaggaccggcccttcatggggggccagaagccgaatctcgctgatttggcggtgtatggcgtgctgcgtgtgatggaggggctggatgcattcgatgacctgatgcagcacacgcacatccagccctggtacctgcgggtggagagggccatcaccgaggcctccccagcgcactgaatgtccccgcgcagagcagagggaaggcagcggaagacgccagctgccagggcctggggccactgggccagcgcctggcgatactggttgggggcaggatcattctgccccttgtccacgcacccccaccagccctctcgcttctaacacagggcacctgctggggctcagggatgttagggacgagttccagccctgccactgccctggggcgacccctccctgtccctgcctccctgctctgccgcccctcttcctggaccctcagtggctgtcccatggctacatcctgtgggtgggggccctcgacaggacagcaggacggtttgttttcagtggaatcccatccctgggttcccctggttcccactcttcccaagcctcccgggactgggacatgtttgcaataaaggaaaggtttgtggcgcctgtcatggcaggcatctcatggaacaaaaaaaacactgagaacacagaaagaaaaaacacggttgggccgcctgctggcccgtgaaagaggttcaaaaacccattggttgggcgcccgggcccaatcaggtagcgcacacggggcaagcgggccaaggaaacccgcgcagacagacgaggggggcatacacccaaataaaacggcgggggaccacgggcttcggaccaaacccgagggaacgggggccacaggggaacacacagagggtcacggagcgaatatccgcacaggagagaggaaaggcgcaagcacatcaacacgcggcaggaccagacagggacgaggggcgagggggagcggccggcgacacgagcgcgaagacaaacaagcagggacgaccagcggcactcacaaggaacacgcgagcggggtggcgacgagaaggcaaagcaaatcagggcgtgaggacacgcggggacggacgagaaacggcacaccgacgggacaccgcccgcagcccacaaaaa

SEQ ID NO: 28455 - DNA, 2191 bp, Homo sapiens
ggagcgaacatgtgaccctggctgcgcgggtgtgtgctggtgcgctgtgtgccatggatggtgttgctgccttgtgccattggatgtgcttggtgtgtgcctgcccccatgcctgcttgctacccactgcatgatgctctgtgtgcttgtagcttctgctgtgtgtgtgctgtgctgtgtgctgtgccctgatgcccctgtgtgcttgcatgcttctgtagagtggtgatgccctgctggcttagcttgtggatgcttgctgtgctgcttggccctgtgtggttgatgccctggtggctgtaccacactgtgctgctggttggcaccttgctgctgcccatggacctccactgcagagctgctcagtgcctgctgcatgctctccctgtccagccgcctgcagctgaccctgtaccagtacaagacgtgtcccttctgcagcaaggtccgagccttcctcgacttccatgccctgccctaccaggtggtggaggtgaaccctgtgcgcagggctgagatcaagttctcctcctacagaaaggtgcccatcctggtggcccaggaaggagaaagctcgcaacaactaaatgactcctctgtcatcatcagcgccctcaagacctacctggtgtcggggcagcccctggaagagatcatcacctactacccagccatgaaggctgtgaacgagcagggcaaggaggtgaccgagttcggcaataagtactggctcatgctcaacgagaaggaggcccagcaagtgtatggtgggaaggaggccaggacggaggagatgaagtggcggcagtgggcggacgactggctggtgcacctgatctcccccaatgtgtaccgcacgcccaccgaggctctggcgtcctttgactacattgtccgcgagggcaagttcggagccgtggagggtgccgtggccaagtacatgggtgcagcggccatgtacctcatcagcaagcgactcaagagcaggcaccgcctccaggacaacgtgcgcgaggacctctatgaggctgctgacaagtgggtggctgctgtgggcaaggaccggcccttcatggggggccagaagccgaatctcgctgatttggcggtgtatggcgtgctgcgtgtgatggaggggctggatgcattcgatgacctgatgcagcacacgcacatccagccctggtacctgcgggtggagagggccatcaccgaggcctccccagcgcactgaatgtccccgcgcagagcagagggaaggcagcggaagacgccagctgccagggcctggggccactgggccagcgcctggcgatactggttgggggcaggatcattctgccccttgtccacgcacccccaccagccctctcgcttctaacacagggcacctgctggggctcagggatgttagggacgagttccagccctgccactgccctggggcgacccctccctgtccctgcctccctgctctgccgcccctcttcctggaccctcagtggctgtcccatggctacatcctgtgggtgggggccctcgacaggacagcaggacggtttgttttcagtggaatcccatccctgggttcccctggttcccactcttcccaagcctcccgggactgggacatgtttgcaataaaggaaaggtttgtggcgcctgtcatggcaggcatctcatggaacaaaaaaaacactgagaacacagaaagaaaaaacacggttgggccgcctgctggcccgtgaaagaggttcaaaaacccattggttgggcgcccgggcccaatcaggtagcgcacacggggcaagcgggccaaggaaacccgcgcagacagacgaggggggcatacacccaaataaaacggcgggggaccacgggcttcggaccaaacccgagggaacgggggccacaggggaacacacagagggtcacggagcgaatatccgcacaggagagaggaaaggcgcaagcacatcaacacgcggcaggaccagacagggacgaggggcgagggggagcggccggcgacacgagcgcgaagacaaacaagcagggacgaccagcggcactcacaaggaacacgcgagcggggtggcgacgagaaggcaaagcaaatcagggcgtgaggacacgcggggacggacgagaaacggcacaccgacgggacaccgcccgcagcccacaaaaa

SEQ ID NO: 28456 - DNA, 1774 bp, Homo sapiens
  misc_feature (11)..(11): n is a, c, g, or t
ctgcaggcgantggacagggagagctgcacgcatgccttcctcgacttccatgccctgccctaccaggtggtggaggtgaaccctgtgcgcagggctgagatcaagttctcctcctacagaaaggtgcccatcctggtggcccaggaaggagaaagctcgcaacaactaaatgactcctctgtcatcatcagcgccctcaagacctacctggtgtcggggcagcccctggaagagatcatcacctactacccagccatgaaggctgtgaacgagcagggcaaggaggtgaccgagttcggcaataagtactggctcatgctcaacgagaaggaggcccagcaagtgtatggtgggaaggaggccaggacggaggagatgaagtggcggcagtgggcggacgactggctggtgcacctgatctcccccaatgtgtaccgcacgcccaccgaggctctggcgtcctttgactacattgtccgcgagggcaagttcggagccgtggagggtgccgtggccaagtacatgggtgcagcggccatgtacctcatcagcaagcgactcaagagcaggcaccgcctccaggacaacgtgcgcgaggacctctatgaggctgctgacaagtgggtggctgctgtgggcaaggaccggcccttcatggggggccagaagccgaatctcgctgatttggcggtgtatggcgtgctgcgtgtgatggaggggctggatgcattcgatgacctgatgcagcacacgcacatccagccctggtacctgcgggtggagagggccatcaccgaggcctccccagcgcactgaatgtccccgcgcagagcagagggaaggcagcggaagacgccagctgccagggcctggggccactgggccagcgcctggcgatactggttgggggcaggatcattctgccccttgtccacgcacccccaccagccctctcgcttctaacacagggcacctgctggggctcagggatgttagggacgagttccagccctgccactgccctggggcgacccctccctgtccctgcctccctgctctgccgcccctcttcctggaccctcagtggctgtcccatggctacatcctgtgggtgggggccctcgacaggacagcaggacggtttgttttcagtggaatcccatccctgggttcccctggttcccactcttcccaagcctcccgggactgggacatgtttgcaataaaggaaaggtttgtggcgcctgtcatggcaggcatctcatggaacaaaaaaaacactgagaacacagaaagaaaaaacacggttgggccgcctgctggcccgtgaaagaggttcaaaaacccattggttgggcgcccgggcccaatcaggtagcgcacacggggcaagcgggccaaggaaacccgcgcagacagacgaggggggcatacacccaaataaaacggcgggggaccacgggcttcggaccaaacccgagggaacgggggccacaggggaacacacagagggtcacggagcgaatatccgcacaggagagaggaaaggcgcaagcacatcaacacgcggcaggaccagacagggacgaggggcgagggggagcggccggcgacacgagcgcgaagacaaacaagcagggacgaccagcggcactcacaaggaacacgcgagcggggtggcgacgagaaggcaaagcaaatcagggcgtgaggacacgcggggacggacgagaaacggcacaccgacgggacaccgcccgcagcccacaaaaa

SEQ ID NO: 28457 - DNA, 2117 bp, Homo sapiens
aggctggtactggtctggggagtttgggatgtccgcggagacgcctatgcggtggaggctccgggcttcagctagggcgggggagcccagcagaaggaccgagcagcctggcaccccactttgccatcctctccctggaaatctcggggtcggcgggccggccgcttcgcgtgggcgaaatcagagacacgtggtttccaaggccccttcggctctccctgtccagccgcctgcagctgaccctgtaccagtacaagacgtgtcccttctgcagcaaggtccgagccttcctcgacttccatgccctgccctaccaggtggtggaggtgaaccctgtgcgcagggctgagatcaagttctcctcctacagaaaggtgcccatcctggtggcccaggaaggagaaagctcgggacggcagatatgaaatgcctggcacagtgcttggggtctagtatgtagcttccagaacccaccctgcccctctacctgggaggccaaatggcaacaactaaatgactcctctgtcatcatcagcgccctcaagacctacctggtgtcggggcagcccctggaagagatcatcacctactacccagccatgaaggctgtgaacgagcagggcaaggaggtgaccgagttcggcaataagtactggctcatgctcaacgagaaggaggcccagcaagtgtatggtgggaaggaggccaggacggaggagatgaagtggcggcagtgggcggacgactggctggtgcacctgatctcccccaatgtgtaccgcacgcccaccgaggctctggcgtcctttgactacattgtccgcgagggcaagttcggagccgtggagggtgccgtggccaagtacatgggtgcagcggccatgtacctcatcagcaagcgactcaagagcaggcaccgcctccaggacaacgtgcgcgaggacctctatgaggctgctgacaagtgggtggctgctgtgggcaaggaccggcccttcatggggggccagaagccgaatctcgctgatttggcggtgtatggcgtgctgcgtgtgatggaggggctggatgcattcgatgacctgatgcagcacacgcacatccagccctggtacctgcgggtggagagggccatcaccgaggcctccccagcgcactgaatgtccccgcgcagagcagagggaaggcagcggaagacgccagctgccagggcctggggccactgggccagcgcctggcgatactggttgggggcaggatcattctgccccttgtccacgcacccccaccagccctctcgcttctaacacagggcacctgctggggctcagggatgttagggacgagttccagccctgccactgccctggggcgacccctccctgtccctgcctccctgctctgccgcccctcttcctggaccctcagtggctgtcccatggctacatcctgtgggtgggggccctcgacaggacagcaggacggtttgttttcagtggaatcccatccctgggttcccctggttcccactcttcccaagcctcccgggactgggacatgtttgcaataaaggaaaggtttgtggcgcctgtcatggcaggcatctcatggaacaaaaaaaacactgagaacacagaaagaaaaaacacggttgggccgcctgctggcccgtgaaagaggttcaaaaacccattggttgggcgcccgggcccaatcaggtagcgcacacggggcaagcgggccaaggaaacccgcgcagacagacgaggggggcatacacccaaataaaacggcgggggaccacgggcttcggaccaaacccgagggaacgggggccacaggggaacacacagagggtcacggagcgaatatccgcacaggagagaggaaaggcgcaagcacatcaacacgcggcaggaccagacagggacgaggggcgagggggagcggccggcgacacgagcgcgaagacaaacaagcagggacgaccagcggcactcacaaggaacacgcgagcggggtggcgacgagaaggcaaagcaaatcagggcgtgaggacacgcggggacggacgagaaacggcacaccgacgggacaccgcccgcagcccacaaaaa

SEQ ID NO: 28458 - DNA, 2141 bp, Homo sapiens
aggctggtactggtctggggagtttgggatgtccgcggagacgcctatgcggtggaggctccgggcttcagctagggcgggggagcccagcagaaggaccgagcagcctggcaccccactttgccatcctctccctggaaatctcggggtcggcgggccggccgcttcgcgtgggcgaaatcagagacacgtggtttccaaggccccttcgggttcgggaaaattttatggttcgggtcacagtaggaagcggacaatgaggcgggagggcagagagaaccgcaacaccgccgcgcacctggtgccgggtcgggtcgtttccggggctttcagtggccggaagtcgcggcgcctgtactgactctaggaagggctggagttgttttgaatgggcgcccgtaagagaggtgggcaactctccctgtccagccgcctgcagctgaccctgtaccagtacaagacgtgtcccttctgcagcaaggtccgaaaaggtgcccatcctggtggcccaggaaggagaaagctcgcaacaactaaatgactcctctgtcatcatcagcgccctcaagacctacctggtgtcggggcagcccctggaagagatcatcacctactacccagccatgaaggctgtgaacgagcagggcaaggaggtgaccgagttcggcaataagtactggctcatgctcaacgagaaggaggcccagcaagtgtatggtgggaaggaggccaggacggaggagatgaagtggcggcagtgggcggacgactggctggtgcacctgatctcccccaatgtgtaccgcacgcccaccgaggctctggcgtcctttgactacattgtccgcgagggcaagttcggagccgtggagggtgccgtggccaagtacatgggtgcagcggccatgtacctcatcagcaagcgactcaagagcaggcaccgcctccaggacaacgtgcgcgaggacctctatgaggctgctgacaagtgggtggctgctgtgggcaaggaccggcccttcatggggggccagaagccgaatctcgctgatttggcggtgtatggcgtgctgcgtgtgatggaggggctggatgcattcgatgacctgatgcagcacacgcacatccagccctggtacctgcgggtggagagggccatcaccgaggcctccccagcgcactgaatgtccccgcgcagagcagagggaaggcagcggaagacgccagctgccagggcctggggccactgggccagcgcctggcgatactggttgggggcaggatcattctgccccttgtccacgcacccccaccagccctctcgcttctaacacagggcacctgctggggctcagggatgttagggacgagttccagccctgccactgccctggggcgacccctccctgtccctgcctccctgctctgccgcccctcttcctggaccctcagtggctgtcccatggctacatcctgtgggtgggggccctcgacaggacagcaggacggtttgttttcagtggaatcccatccctgggttcccctggttcccactcttcccaagcctcccgggactgggacatgtttgcaataaaggaaaggtttgtggcgcctgtcatggcaggcatctcatggaacaaaaaaaacactgagaacacagaaagaaaaaacacggttgggccgcctgctggcccgtgaaagaggttcaaaaacccattggttgggcgcccgggcccaatcaggtagcgcacacggggcaagcgggccaaggaaacccgcgcagacagacgaggggggcatacacccaaataaaacggcgggggaccacgggcttcggaccaaacccgagggaacgggggccacaggggaacacacagagggtcacggagcgaatatccgcacaggagagaggaaaggcgcaagcacatcaacacgcggcaggaccagacagggacgaggggcgagggggagcggccggcgacacgagcgcgaagacaaacaagcagggacgaccagcggcactcacaaggaacacgcgagcggggtggcgacgagaaggcaaagcaaatcagggcgtgaggacacgcggggacggacgagaaacggcacaccgacgggacaccgcccgcagcccacaaaaa

SEQ ID NO: 28459 - DNA, 2123 bp, Homo sapiens
  misc_feature (1986)..(1986): n is a, c, g, or t
accatcaccccatacgacaaacaaaaaacaaaacaacgcatagatagagcccggattacactcgtcacgagggtgtctgggcgctgtggcctggtgggtgcgccttggcctggaggctgggaggccgcccccagccgctgctacccacgcagagccgggctggcttcgcgggggcggcgggcggcccgagccccgtggctgcagctcgtaaggggagcccgcggctgctgggagctgcggcgctggccctggggggagccctggggctgtaccacacggcgcggtggcacctgcgcgcccaggacctccacgcagagcgctcagccgcgcagctctccctgtccagccgcctgcagctgaccctgtaccagtacaagacgtgtcccttctgcagcaaggtccgagccttcctcgacttccatgccctgccctaccaggtggtggaggtgaaccctgtgcgcagggctgagatcaagttctcctcctacagaaaggtgcccatcctggtggcccaggaaggagaaagctcgcaacaactaaatgactcctctgtcatcatcagcgccctcaagacctacctggtgtcggggcagcccctggaagagatcatcacctactacccagccatgaaggctgtgaacgagcagggcaaggaggtgaccgagttcggcaataagtactggctcatgctcaacgagaaggaggcccagcaagtggaggagatgaagtggcggcagtgggcggacgactggctggtgcacctgatctcccccaatgtgtaccgcacgcccaccgaggctctggcgtcctttgactacattgtccgcgagggcaagttcggagccgtggagggtgccgtggccaagtacatgggtgcagcggccatgtacctcatcagcaagcgactcaagagcaggcaccgcctccaggacaacgtgcgcgaggacctctatgaggctgctgacaagtgggtggctgctgtgggcaaggaccggcccttcatggggggccagaagccgaatctcgctgatttggcggtgtatggcgtgctgcgtgtgatggaggggctggatgcattcgatgacctgatgcagcacacgcacatccagccctggtacctgcgggtggagagggccatcaccgaggcctccccagcgcactgaatgtccccgcgcagagcagagggaaggcagcggaagacgccagctgccagggcctggggccactgggccagcgcctggcgatactggttgggggcaggatcattctgccccttgtccacgcacccccaccagccctctcgcttctaacacagggcacctgctggggctcagggatgttagggacgagttccagccctgccactgccctggggcgacccctccctgtccctgcctccctgctctgccgcccctcttcctggaccctcagtggctgtcccatggctacatcctgtgggtgggggccctcgacaggacagcaggacggtttgttttcagtggaatcccatccctgggttcccctggttcccactcttcccaagcctcccgggactgggacatgtttgcaataaaggaaaggtttgtggcgcctgtcatggcaggcatctcatggaaaaaaaaaaaaaaaaaaaaaaaaaaaaaaaaaaaaaaaaaaaaaaaaaaaaaaaaaaaaaaaaaagaaggaggggcggcgccacctcaggaattaccatccctgcggaggggggacccagtcattgtaggcgcacgcgcagcagttttgtggaagaacagggggggccgccccagaaggaggaggacgattaatattaaaggcgcagcgccgcagccgcggcgctataacaacacgactgtcgggcgtggggaaaaaagcggagccggcgggggatacctttgtaggaaagaagagagccccaacctgatgtcggggggggagcaacaataagtggggaaaaaacctcatcccatagaggagatatttatnagcgctgctggggaggaatgaatatttaaactatttagggggtgtataagggggttcaacccacgcggagagtagttctgcgccagagagaaaaattttggtccagcgggatattattgtagaggcaaatttatttc

SEQ ID NO: 28460 - DNA, 3194 bp, Homo sapiens
aggctggtactggtctggggagtttgggatgtccgcggagacgcctatgcggtggaggctccgggcttcagctagggcgggggagcccagcagaaggaccgagcagcctggcaccccactttgccatcctctccctggaaatctcggggtcggcgggccggccgcttcgcgtgggcgaaatcagagacacgtggtttccaaggccccttcgggttcgggaaaattttatggttcgggtcacagtaggaagcggacaatgaggcgggagggcagagagaaccgcaacaccgccgcgcacctggtgccgggtcgggtcgtttccggggctttcagtggccggaagtcgcggcgcctgtactgactctaggaagggctggagttgttttgaatgggcgcccgtaagagaggtgggcaagtacgtgttacagacggccacgccgccctttaggcggtcaaggtggggcgagcagacgttcgcccccctgcagtcggccgggtcactacccaagagcctttggaggcggaagcatggaacggtctgcaaacgttcccgagcgggcctctgcggctctggcgggcgtttcgaacttgggcgccgggcacacgcccagtcccgagagcgctgagggttcccttagcgtcgccctcaccccggccaacccgcggggcgccagagtcctggccctttaaacgccgcgcgtgcctcggcgtcttcgtttcgcgcgcccgcccgcggcgccggcggagcgaacatggacccggctgcgcgggtggtgcgggcgctgtggcctggtgggtgcgccttggcctggaggctgggaggccgcccccagccgctgctacccacgcagagccgggctggcttcgcgggggcggcgggcggcccgagccccgtggctgcagctcgtaaggggagcccgcggctgctgggagctgcggcgctggccctggggggagccctggggctgtaccacacggcgcggtggcacctgcgcgcccaggacctccacgcagagcgctcagccgcgcagaggtggtggaggtgaaccctgtgcgcagggctgagatcaagttctcctcctacagaaaggtgcccatcctggtggcccaggaaggagaaagctcgcaacaactaaatgactcctctgtcatcatcagcgccctcaagacctacctggtgtcggggcagcccctggaagagatcatcacctactacccagccatgaaggctgtgaacgagcagggcaaggaggtgaccgagttcggcaataagtactggctcatgctcaacgagaaggaggcccagcaagtgtatggtgggaaggaggccaggacggaggagatgaagtggcggcagtgggcggacgactggctggtgcacctgatctcccccaatgtgtaccgcacgcccaccgaggctctggcgtcctttgactacattgtccgcgagggcaagttcggagccgtggagggtgccgtggccaagtacatgggtgcagcggccatgtacctcatcagcaagcgactcaagagcaggcaagtgtgtgtgcacatccggggcctgctgtccccgagcctccggtgccacgagcagtggtgatcccatcacacccctcaggagaccagcgggaggccgaggcctagggcaggtgggaaacgcattatggattatgggtcccttggccaagatgggacttggacccagagctcctgctcacctcccctggggacagcagggctggccttgaagccggaagcctgggccctgactggcgcctcctctgtggctttctccctggcctggtctcttgcctttaccacagcctccccgtctgggacggatgctccctgaggcgtctgcagatgtgatgctctcacctggggtgccgtcctggcttccacacctcccccctctccccagaggagaccctcttccctgctgggctgggagtgggggctcccctgaggggcttttcccttccccgcccaggcaccgcctccaggacaacgtgcgcgaggacctctatgaggctgctgacaagtgggtggctgctgtgggcaaggaccggcccttcatggggggccagaagccgaatctcgctgatttggcggtgtatggcgtgctgcgtgtgatggaggggctggatgcattcgatgacctgatgcagcacacgcacatccagccctggtacctgcgggtggagagggccatcaccgaggcctccccagcgcactgaatgtccccgcgcagagcagagggaaggcagcggaagacgccagctgccagggcctggggccactgggccagcgcctggcgatactggttgggggcaggatcattctgccccttgtccacgcacccccaccagccctctcgcttctaacacagggcacctgctggggctcagggatgttagggacgagttccagccctgccactgccctggggcgacccctccctgtccctgcctccctgctctgccgcccctcttcctggaccctcagtggctgtcccatggctacatcctgtgggtgggggccctcgacaggacagcaggacggtttgttttcagtggaatcccatccctgggttcccctggttcccactcttcccaagcctcccgggactgggacatgtttgcaataaaggaaaggtttgtggcgcctgtcatggcaggcatctcatggaacaaaaaaaacactgagaacacagaaagaaaaaacacggttgggccgcctgctggcccgtgaaagaggttcaaaaacccattggttgggcgcccgggcccaatcaggtagcgcacacggggcaagcgggccaaggaaacccgcgcagacagacgaggggggcatacacccaaataaaacggcgggggaccacgggcttcggaccaaacccgagggaacgggggccacaggggaacacacagagggtcacggagcgaatatccgcacaggagagaggaaaggcgcaagcacatcaacacgcggcaggaccagacagggacgaggggcgagggggagcggccggcgacacgagcgcgaagacaaacaagcagggacgaccagcggcactcacaaggaacacgcgagcggggtggcgacgagaaggcaaagcaaatcagggcgtgaggacacgcggggacggacgagaaacggcacaccgacgggacaccgcccgcagcccacaaaaa

SEQ ID NO: 28461 - DNA, 1591 bp, Homo sapiens
accatgcccggctaatttttgaatttttagtagagacagagtttcagtatgttggtcaggctggtctcgaactcctgaccgcaggtgatccatccactttggcctcccaaagtgctgggactacaggcgtgagccagcgtgcctggcccactgctcatttttaaaactgtcctgcccctgggtgacctgggtcttgaaactgggtggtggggtctcttctcccccatctcaggacctgagatgaggggagggcatttatcccaaggaaacttgctggggggcagggtctgtggcccagaaaagggggtacagatgtgaagcaggcgagacctgcagccaccccacatgctttgttcaaaccctcacctgtgctgttggcccttgagtgggtcacgagctccaaggggggaggggacgggacctggccacacagctggcagggaacgaaggaggtctggatgcctgtcaaaccagctatggtgacacgtttctgttcgtgccccaggcggtgtatggcgtgctgcgtgtgatggaggggctggatgcattcgatgacctgatgcagcacacgcacatccagccctggtacctgcgggtggagagggccatcaccgaggcctccccagcgcactgaatgtccccgcgcagagcagagggaaggcagcggaagacgccagctgccagggcctggggccactgggccagcgcctggcgatactggttgggggcaggatcattctgccccttgtccacgcacccccaccagccctctcgcttctaacacagggcacctgctggggctcagggatgttagggacgagttccagccctgccactgccctggggcgacccctccctgtccctgcctccctgctctgccgcccctcttcctggaccctcagtggctgtcccatggctacatcctgtgggtgggggccctcgacaggacagcaggacggtttgttttcagtggaatcccatccctgggttcccctggttcccactcttcccaagcctcccgggactgggacatgtttgcaataaaggaaaggtttgtggcgcctgtcatggcaggcatctcatggaacaaaaaaaacactgagaacacagaaagaaaaaacacggttgggccgcctgctggcccgtgaaagaggttcaaaaacccattggttgggcgcccgggcccaatcaggtagcgcacacggggcaagcgggccaaggaaacccgcgcagacagacgaggggggcatacacccaaataaaacggcgggggaccacgggcttcggaccaaacccgagggaacgggggccacaggggaacacacagagggtcacggagcgaatatccgcacaggagagaggaaaggcgcaagcacatcaacacgcggcaggaccagacagggacgaggggcgagggggagcggccggcgacacgagcgcgaagacaaacaagcagggacgaccagcggcactcacaaggaacacgcgagcggggtggcgacgagaaggcaaagcaaatcagggcgtgaggacacgcggggacggacgagaaacggcacaccgacgggacaccgcccgcagcccacaaaaa

SEQ ID NO: 28462 - DNA, 1197 bp, Homo sapiens
  misc_feature (1171)..(1171): n is a, c, g, or t
aggctggtactggtctggggagtttgggatgtccgcggagacgcctatgcggtggaggctccgggcttcagctagggcgggggagcccagcagaaggaccgagcagcctggcaccccactttgccatcctctccctggaaatctcggggtcggcgggccggccgcttcgcgtgggcgaaatcagagacacgtggtttccaaggccccttcgggttcgggaaaattttatggttcgggtcacagtaggaagcggacaatgaggcgggagggcagagagaaccgcaacaccgccgcgcacctggtgccgggtcgggtcgtttccggggctttcagtggccggaagtcgcggcgcctgtactgactctaggaagggctggagttgttttgaatgggcgcccgtaagagaggtgggcaagtacgtgttacagacggccacgccgccctttaggcggtcaaggtggggcgagcagacgttcgcccccctgcagtcggccgggtcactacccaagagcctttggaggcggaagcatggaacggtctgcaaacgttcccgagcgggcctctgcggctctggcgggcgtttcgaacttgggcgccgggcacacgcccagtcccgagagcgctgagggttcccttagcgtcgccctcaccccggccaacccgcggggcgccagagtcctggccctttaaacgccgcgcgtgcctcggcgtcttcgtttcgcgcgcccgcccgcggcgccggcggagcgaacatggacccggctgcgcgggtggtgcgggcgctgtggcctggtgggtgcgccttggcctggaggctgggaggccgcccccagccgctgctacccacgcagagccgggctggcttcgcgggggcggcgggcggcccgagccccgtggctgcagctcgtaaggggagcccgcggctgctgggagctgcggcgctggccctggggggagccctggggctgtaccacacggcgcggtggcacctgcgcgcccaggacctccacgcagagcgctcagccgcgcagctctccctgtccagccgcctgcagctgaccctgtaccagtacaagacgtgtcccttctgcagcaaggtccgagccttcctcgacttccatgccctgccctaccgcgaattttttaattaaacgcgcttttcgcagttctnaaaatacgaaattctcgctcgctaca

SEQ ID NO: 28463 - DNA, 754 bp, Homo sapiens
aggctggtactggtctggggagtttgggatgtccgcggagacgcctatgcggtggaggctccgggcttcagctagggcgggggagcccagcagaaggaccgagcagcctggcaccccactttgccatcctctccctggaaatctcggggtcggcgggccggccgcttcgcgtgggcgaaatcagagacacgtggtttccaaggccccttcgggttcgggaaaattttatggttcgggtcacagtaggaagcggacaatgaggcgggagggcagagagaaccgcaacaccgccgcgcacctggtgccgggtcgggtcgtttccggggctttcagtggccggaagtcgcggcgcctgtactgactctaggaagggctggagttgttttgaatgggcgcccgtaagagaggtgggcaactctccctgtccagccgcctgcagctgaccctgtaccagtacaagacgtgtcccttctgcagcaaggtccgagccttcctcgacttccatgccctgccctaccaggtggtggaggtgaaccctgtgcgcagggctgagatcaagttctcctcctacagaaaggtgcccatcctggtggcccaggaaggagaaagctcgccacaactaacctcctcggactcctgccttactcatttacaccaaccacccaactatctataaacctagccatggccatccccttatgagcgggcgcagtgattataggctttcgctctaagattaaaaatggggtaccga

SEQ ID NO: 28464 - DNA, 435 bp, Homo sapiens
tggaatctcaagttttcaagagaaactggcctgttcaggggtctacctgcttccttacagtttcagtttctctttcctgaaatcacaacacacatctgtcaccaagccctgtaaaatgtgcatctgctctgccatggctcccctttccctacagctgctttgcctcatccttgtgctatcatagtggctattaaacactcccctattgttttctgctaaacagaacacatatttcttaattaggcattcaatacttcccctgccatggggtcagacacttccacatccctgctatagccatggttctcaggcctgtccgcacattccaattacttaaggaacttaaaaatttaaaaagccaatgcccaggtgacaatccagaaaattaaatcagaattttgggggagggagacagaccaggacatcattatttaa

SEQ ID NO: 28465 - DNA, 817 bp, Homo sapiens
gccatattggccaggctggtcttgagctcctgacctggtgatccacctgccttggcctcccaaagtgctgggattacaggccgagccaccatgcctggccagggaatgctttttaaatccctaaacaattgtataatattgtgtatatgtgtgtgtgcatgtgtatatatgtgtgcgagcatgtgtgcctgtatgcatatgtacattcaaaacttgggaactagtgggtttttatgtaatgtaagtggtagaactgaacagatgttggtagtatgtcagagaaatgggagccagtgatgttatttcataagactcataggtaacttggaaagcatatgtgagattagagtttttatattcgttagtgaagtagagatagtgaaagcctgccatactcctcaccaatcgtagtcatgtcatcattaattatatgcctcagtgaaaggattgagaaaaagagaacaaaagagcatcagataactaagaagaatccccaaccctgtacctcattggttgggtaacacaaatgccagtggaacctggacagtaatgatgatgtgactgttccacgtggctcagcttggccaatttcctcagctcctggtgttctgtggtcatgtccaagggactaaagcagcagtaaagctccatagtcagatgtctttgatttacccattttaggtagcaagtatcttcagctctgcctcattctatttactataaaacaaaatacagtaaggaagcaacctagaatttgttagtgggtacaatgaaaaagtagtcaccatattttggatctgcgcatttaaaaaaaaaa

SEQ ID NO: 28466 - DNA, 425 bp, Homo sapiens
tttcccagatgggaccagactttcttcattaaagtgttgagaaatgcattggtgaggagagcaccagatgcttgaaaactcttttgtagcaatcttccatgagccaggttggtgagaaaatccacagtgcttcctggttcaatgggaatcacggaatctcagagtggcagggtctaagtattagatacagcaaaaccaccaggaaaaaatgggctcagttacggaagtattgatggggcagcagggatctttggcagtgatgtcctaagaatgaaataaatgggtggtctaccgaatgattgtttgatatatgcaattttatttgattgatttctaattttttaagagacaggatcttgctctgtcacccaggctggagtgcagtggcccgattatagctcactacagccctgaacccctggctt

SEQ ID NO: 28467 - DNA, 366 bp, Homo sapiens
gaattgcttgcacccagaaggtagaggttgcagtgagccgagaccgcaccactgcactccagcatgggcgacaaagcgagactccgtctcaaaaaaaaaagaaaaaagaaacttgaatgttaatactggctttgctgccgaccacatctgtccttccagtttttgtgtctatagcctctcctgtaaaaggtagatagtaatttatttcctctctgctttataagatgctaaaatgagaaaatatatacattaattgaataaaacaagagagctttatgaaatttatgaaatataagaaataaattaggctgggcgtggtggctcacgcctgtaatcccagcactttgggaggccaagacgggtgga

SEQ ID NO: 28468 - DNA, 1415 bp, Homo sapiens
tgtattaatttgcaaataaatgtctatcttattattttgagagatttaaaaaattttagttcttcaaaattgcattttcacattttgaattacgttatctttgacaaatacagaagatgtcaaattttggtttattttctttggttctaatttatatttttgtttaaaactatatttttcactatagactctttctgtctctcgaggtccctgtataatgaaaaagaaggctggaaaaagtattaacattgtcaaaatccaggaaaagtagttggtcatgatattgatcgttaactttagaaactttttgtatcttgtgggttaaattaggattactatgtggtagtgataaatgatgttaattagggccgagtgcagtggctaacacctgtaattccagcatgtagggaggctgaggtgggaggatgtcttgaatccaggagtttgagaccagcctgtacaacatagtgtaagaccccttctccacacaaaaaattagaaaatttgtcaagcatcttggtgcacacctgtagtcccagctgcttgggaggatgaagcgagagaatcacttaagcccaggtgttcgaggctgcagtgagctatgattgcaccactgcactccagactagatgaccatctcttttaaaaaaatgtgtttatatgttatatgtgatagtgctttttaaaaacatttttaaattatagagacagggtctcactatgttacagcccaggctggtctcaaattcctgggctcaagcaatcctcccaccttagctaacctcccaaagtgctcggattataggcatgagctgcatgcccagctaatttagtgatttttaaaaactgagctggtaattataaattctcttcctggaacttctgactttctcacaattggaatcttttgacaaaaattatcagtaatgggaaaactttgtgtagttgtcatttttcctcccatcagtgtgatagatatgattggagttatgttggactgatattttgaaaaaagatttaattatagctattaataaagacatttaaactactgactatgcatttttattcttttgggagggtttaatgtttatagtttaaagcaaactgttgtttttaaaaaagtatctaacagggccgggcgcggtggctcacacctgtaatcccagcactttgggaggcctaggcgggcggatcacaaggtcaagagatcaagaccatcctggctaacatggtgaaaccctgtctctactaaaaatacaaaaaaatagctgggtgtggcggcgtgcgcctgtagtcccagctactcgggaggctgaggcaggaggatggcatgaacccgggaggcggagcttgcagtgagccgagatcgcgccactgcactccagcctgggcgacagagcaatactctgtct

SEQ ID NO: 28469 - DNA, 1043 bp, Homo sapiens
tgtattaatttgcaaataaatgtctatcttattattttgagagatttaaaaaattttagttcttcaaaattgcattttcacattttgaattacgttatctttgacaaatacagaagatgtcaaattttggtttattttctttggttctaatttatatttttgtttaaaactatatttttcactatagactctttctgtctctcgaggtccctgtataatgaaaaagaaggctggaaaaagtattaacattgtcaaaatccaggaaaagtagttggtcatgatattgatcgttaactttagaaactttttgtatcttgtgggttaaattaggattactatgtggtagtgataaatgatgttaattagggccgagtgcagtggctaacacctgtaatcccaccttagctaacctcccaaagtgctcggattataggcatgagctgcatgcccagctaatttagtgatttttaaaaactgagctggtaattataaattctcttcctggaacttctgactttctcacaattggaatcttttgacaaaaattatcagtaatgggaaaactttgtgtagttgtcatttttcctcccatcagtgtgatagatatgattggagttatgttggactgatattttgaaaaaagatttaattatagctattaataaagacatttaaactactgactatgcatttttattcttttgggagggtttaatgtttatagtttaaagcaaactgttgtttttaaaaaagtatctaacagggccgggcgcggtggctcacacctgtaatcccagcactttgggaggcctaggcgggcggatcacaaggtcaagagatcaagaccatcctggctaacatggtgaaaccctgtctctactaaaaatacaaaaaaatagctgggtgtggcggcgtgcgcctgtagtcccagctactcgggaggctgaggcaggaggatggcatgaacccgggaggcggagcttgcagtgagccgagatcgcgccactgcactccagcctgggcgacagagcaatactctgtct

SEQ ID NO: 28470 - DNA, 385 bp, Homo sapiens
ttttttttagctaaagtccatactttattcagatttccttagtttttatctaatatcctttcctgttccaagattccatcgaggataccccattatatttagtcttcttttctccttaagctcctggaactctgatagtgtctcagacttttctcgtttttgatgtccctgacagttttgagctcataggtcttttgactatttattctctgtactttgcttacactagagtaccacaacaaatattactttgaattaggtaatatctataattggtgaaaagcaaatcatgtttgaagtagctacatggtaaggatgatcaagttatcactgaaacttgtttgagcagctttggttgtgtatagcttattttctgactacgtat

SEQ ID NO: 28471 - DNA, 993 bp, Homo sapiens
agggaaaggcattctggggagaaggaacaattggccagattccaaatggctttaaatgccatgtaatctggattatatcctttgtgtaataaggaatcactgaaggtttttaagtaagggtgtgacaatatcacgtgttttagaaagaactctggcagcagggtagagcatggacggaactgaaaagctactgcataatcttggcaagagataagggctcgcactaaggcagtgaggatgggaatgagaggactgctgacaagagagaagacaggtcttgagaccatctgcctggatgttaaagactggagaagtaaaagatcactgagggactaaatgaaatgccatggttgggaacacagaaggaattcttttttttttttttgagaaggagtctcagctctgtcgcccgcccaggctggagtacagtggtgtgatttcagctcactgcaacctccgcctcccaggttcaagtgattctcatgcctcagcctgctgagtagctgggattacaggtgcatgctaccacacacggctaatttttgtatttttagtaggggttttgtatttttagtggggtttcaccatgctggcaggctggtctcaaactcctgacctaaagtgacccgcccaccttggcctcccaaagtgttcggattacaggcgtgagccactgtgcccggccaggaatcccttatattattaactttcaatataaaaaagttgcctaaggcatatataagtggcaactgttgaacaggcagtgcagtaatagggacaggctcaggagagaggtaaatgctgtagataaatatctgggaattaacatttgggtgagaactgacaccactgcagtgaataccttcatccaggaagaaatacagaagttttacaaaagaatcttgaggtatctcaatatttaaaggggccagtggtaggagctcgggagcaggtgctggcagtcagtcggaacaacctctcccagccttgcct

SEQ ID NO: 28472 - DNA, 1043 bp, Homo sapiens
tcctggattgcataaaggctccttctccttacatagccagggcaaaggtgcatgacaactctgagcaagtcaaaacaaccgtcagcagcgggaaacctcgatgaacaaacaccgggagagtgtttctgcagatcctgctttgtgacttcgagtgaagtgtggaagcgctggaagcacttagaccctgcctgtgccgcagacccctgggaggcaccaacaccccggatcgagaagcccgatgggaaagaatgtctgggaaggacgtcatgcccgaggcttgcgtgacagtttccactcacagtgcgctcactctgaacctctgtgcacacgatgggcctgcatctcttcccactatctgctaggaaacacgaggggaaggaaatgaccgcagaagggagtgcaccgtgggggcaggaggtgctgcggccaatgggcagtgctgggagatgaaaccaacagcggcgattgccccagaaagaacttggcgctgctaaggcaatggcggcccgaaagaggcccctgacgcatgaggagcggccgccgtctccagccccaggcctccctcccctgtgtttcccgcagccccctctggagtctctcccccgccccgcacgtgtagggagaccccgggaaagtgggccggttataattgcaaaaaataaaccgtcagtagccacaatatcttataaacgtaaaagtaatctgaaaacctacttcagttagagaaagggcgtttgaatatttcctgtttaagacacagaccccctgagaagatgtataaaggacttgggctgggtgtggtggctcacactgcccacaccatgaccttggacccccggcctccggaactgagaggcgccgaacgcctgctgttcaagctgcaccgtgatgggcacttggttctgtctgccccaggaaaatgagcccagcgctctccccaaactcctttgtcctgaacttctttccagagccctcagccctaatgggtggtcccctagggtcctcagccttcagactctaaattcccgttggaaacccacagg

SEQ ID NO: 28473 - DNA, 1045 bp, Homo sapiens
tgacacgcgccaccaggctccgcgctcatggcctggcctggcatctcaccaggcttttcaatggactagagtgcggggctgctctgcctgtggcaagggttgtcctgctgctgggcacaggcccagagaggaagtggcagaagctgggcatgggatgctggtccttgaaggagtgtgtgggggccactgggttgaacgcagcccgctgcagccctgtgaccttgattaaaagactactttttagagcagttttcattttaccgatacatcgatcagagagtacggagcttcccacattgcctcccgcaccccatagcaggcagaggcaccagccaggcgccatcctttacaagctgtttcagcaaaatgtccctgggaaggaaatgaccgcagaagggagtgcaccgtgggggcaggaggtgctgcggccaatgggcagtgctgggagatgaaaccaacagcggcgattgccccagaaagaacttggcgctgctaaggcaatggcggcccgaaagaggcccctgacgcatgaggagcggccgccgtctccagccccaggcctccctcccctgtgtttcccgcagccccctctggagtctctcccccgccccgcacgtgtagggagaccccgggaaagtgggccggttataattgcaaaaaataaaccgtcagtagccacaatatcttataaacgtaaaagtaatctgaaaacctacttcagttagagaaagggcgtttgaatatttcctgtttaagacacagaccccctgagaagatgtataaaggacttgggctgggtgtggtggctcacactgcccacaccatgaccttggacccccggcctccggaactgagaggcgccgaacgcctgctgttcaagctgcaccgtgatgggcacttggttctgtctgccccaggaaaatgagcccagcgctctccccaaactcctttgtcctgaacttctttccagagccctcagccctaatgggtggtcccctagggtcctcagccttcagactctaaattcccgttggaaacccacagg

SEQ ID NO: 28474 - DNA, 989 bp, Homo sapiens
gtggctctgacgatgatggtgaggtggtggagacgccctcacagctgggccaccctcccgtcgggagacacgttttgtcagttgcttcctctggagtccttttaaaagactactttttagagcagttttcattttaccgatacatcgatcagagagtacggagcttcccacattgcctcccgcaccccatagcaggcagaggcaccagccaggcgccatcctttacaagctgtttcagcaaaatgtccctgggtcttaatgattaagtccaggcactccaaggacgattaaatatttaaacagcagcttccctttgaagggaaggaaatgaccgcagaagggagtgcaccgtgggggcaggaggtgctgcggccaatgggcagtgctgggagatgaaaccaacagcggcgattgccccagaaagaacttggcgctgctaaggcaatggcggcccgaaagaggcccctgacgcatgaggagcggccgccgtctccagccccaggcctccctcccctgtgtttcccgcagccccctctggagtctctcccccgccccgcacgtgtagggagaccccgggaaagtgggccggttataattgcaaaaaataaaccgtcagtagccacaatatcttataaacgtaaaagtaatctgaaaacctacttcagttagagaaagggcgtttgaatatttcctgtttaagacacagaccccctgagaagatgtataaaggacttgggctgggtgtggtggctcacactgcccacaccatgaccttggacccccggcctccggaactgagaggcgccgaacgcctgctgttcaagctgcaccgtgatgggcacttggttctgtctgccccaggaaaatgagcccagcgctctccccaaactcctttgtcctgaacttctttccagagccctcagccctaatgggtggtcccctagggtcctcagccttcagactctaaattcccgttggaaacccacagg

SEQ ID NO: 28475 - DNA, 921 bp, Homo sapiens
gtggctctgacgatgatggtgaggtggtggagacgccctcacagctgggccaccctcccgtcgggagacacgttttgtcagttgcttcctctggagtccttttaaaagactactttttagagcagttttcattttaccgatacatcgatcagagagtacggagcttcccacattgcctcccgcaccccatagcaggcagaggcaccagccaggcgccatcctttacaagctgtttcagcaaaatgtccctgggaaggaaatgaccgcagaagggagtgcaccgtgggggcaggaggtgctgcggccaatgggcagtgctgggagatgaaaccaacagcggcgattgccccagaaagaacttggcgctgctaaggcaatggcggcccgaaagaggcccctgacgcatgaggagcggccgccgtctccagccccaggcctccctcccctgtgtttcccgcagccccctctggagtctctcccccgccccgcacgtgtagggagaccccgggaaagtgggccggttataattgcaaaaaataaaccgtcagtagccacaatatcttataaacgtaaaagtaatctgaaaacctacttcagttagagaaagggcgtttgaatatttcctgtttaagacacagaccccctgagaagatgtataaaggacttgggctgggtgtggtggctcacactgcccacaccatgaccttggacccccggcctccggaactgagaggcgccgaacgcctgctgttcaagctgcaccgtgatgggcacttggttctgtctgccccaggaaaatgagcccagcgctctccccaaactcctttgtcctgaacttctttccagagccctcagccctaatgggtggtcccctagggtcctcagccttcagactctaaattcccgttggaaacccacagg

SEQ ID NO: 28476 - DNA, 771 bp, Homo sapiens
gtggctctgacgatgatggtgaggtggtggagacgccctcacagctgggccaccctcccgtcgggagacacgttttgtcagttgcttcctctggagtccttggaaggaaatgaccgcagaagggagtgcaccgtgggggcaggaggtgctgcggccaatgggcagtgctgggagatgaaaccaacagcggcgattgccccagaaagaacttggcgctgctaaggcaatggcggcccgaaagaggcccctgacgcatgaggagcggccgccgtctccagccccaggcctccctcccctgtgtttcccgcagccccctctggagtctctcccccgccccgcacgtgtagggagaccccgggaaagtgggccggttataattgcaaaaaataaaccgtcagtagccacaatatcttataaacgtaaaagtaatctgaaaacctacttcagttagagaaagggcgtttgaatatttcctgtttaagacacagaccccctgagaagatgtataaaggacttgggctgggtgtggtggctcacactgcccacaccatgaccttggacccccggcctccggaactgagaggcgccgaacgcctgctgttcaagctgcaccgtgatgggcacttggttctgtctgccccaggaaaatgagcccagcgctctccccaaactcctttgtcctgaacttctttccagagccctcagccctaatgggtggtcccctagggtcctcagccttcagactctaaattcccgttggaaacccacagg

SEQ ID NO: 28477 - DNA, 478 bp, Homo sapiens
agcagcctgcggagcgttctaggcaggacagggcagcaaacctgacatgcggagctgggggcaggggtaatggggccagggggtaatggcaggtgaggccatggcctagagggttgccatgcttggtgcaggggaggagaggcccaggtgtggctgcagtggcagcaggagtcagtgtggctgtgcccagtgggatgttgtcagagaatggacctggctgctgggaaaggtgattgtgtttgtctgagccacactggactcttctctgaccagcaagcacattctggagatgcggggcagagacgaggcctccgtgagaacctttgaggtgtgagggccttgatctggggtgcagcctccagctttctgcttacagagcaggacctgcaggagctcgctgactgcctgcacagtggaaggaagacctgtttcttttactttccttgaggagaaaaaattaaagttctgagcaaacgca

SEQ ID NO: 28478 - DNA, 542 bp, Homo sapiens
ttctctgccttcctcctgctcctggtggcttatgtcctgccgctcttgatacgcgactgtggtctgtcctgggatggttatgatgcatatgtgctattgttgtgaactgtaacattgaggtctggccttacggttggttttgattgtcccttctgctcccttttcttattttaatattttaccattttccattttaatgtatctgttgtcttttttggctaaatctcttttcagttttattttactgtatatcttttctaagtgattgcttagagattacaatatactaaacctagcctttcacagtttctgcagatcctgctttgtgacttcgagtgaagtgtggaagcgctggaagcacttagaccctgcctgtgagttgtcatgtatcatgtctgcaaacattaaaaatctcaccagatgatgggatgcagaggttgcggtgagctgagatgacgccactacactccagcctaggcgacagagcaagaccctatctcaaaaaacaaaacaaaataaaagttctctgcttattttgcacc

SEQ ID NO: 28479 - DNA, 496 bp, Homo sapiens
tcctggattgcataaaggctccttctccttacatagccagggcaaaggtgcatgacaactctgagcaagtcaaaacaaccgtcagcagcgggaaacctcgatgaacaaacaccgggagagtgtttctgcagatcctgctttgtgacttcgagtgaagtgtggaagcgctggaagcacttagaccctgcctgtgccgcagacccctgggaggcaccaacaccccggatcgagaagcccgatgggaaagaatgtctgggaaggacgtcatgcccgaggcttgcgtgacagtttccactcacagtgcgctcactctgaacctctgtgcacacgatgggcctgcatctcttcccactatctgctaggaaacacgaggcctccagctttctgcttacagagcaggacctgcaggagctcgctgactgcctgcacagtggaaggaagacctgtttcttttactttccttgaggagaaaaaattaaagttctgagcaaacgca

SEQ ID NO: 28480 - DNA, 570 bp, Homo sapiens
tcctggattgcataaaggctccttctccttacatagccagggcaaaggtgcatgacaactctgagcaagtcaaaacaaccgtcagcagcgggaaacctcgatgaacaaacaccgggagagtgcattcccaggggagttccaggaggcccatggcccctcctgtacagccctccaccgcccagagccttccagcgccgtgtcttccccttggagcatctggaggccccagacagcacccgcctgacgttcagcagagggggagaccgaggcctgcagcagagtgttttgtcagatgctgctccctgaccgggagtgagagggaacccacctagagtttctgcagatcctgctttgtgacttcgagtgaagtgtggaagcgctggaagcacttagaccctgcctgtgagttgtcatgtatcatgtctgcaaacattaaaaatctcaccagatgatgggatgcagaggttgcggtgagctgagatgacgccactacactccagcctaggcgacagagcaagaccctatctcaaaaaacaaaacaaaataaaagttctctgcttattttgcacc

SEQ ID NO: 28481 - DNA, 870 bp, Homo sapiens
aaacagaccagtcacagaaagctgaaggtgctggagatgccaagtgaagtgtgtgcatttttgatagctgtgtacttctggtgactgtacacttgaaatactattttttatcaagttttataaagatgcagaattttgttttacttttttttttttaaagctatgttgttagcacacagaacacttcattgtgtttgtgggggaaggggcatatgtcactaatagaatgtctccaaagctggattgatgtggagaaaacacctttcccttctagttttgagagacttcctcttggctcccaggaggagggattccctgactttgacacacatggccaccttggcacaaaagccttgtggtatagaaaaacaaatttgtttttatgtcctcttctccctttccatctttcagcatagacttaactcccttaagcccagacatctgttgagacctgacccctagtcattggttaccagtgtgtcaggcaatctggactttccagtgatgccactgagatggcacctgtcaaaagagcagtggttccatttctagattgtggatcttcagataaattctgccattttcatttcacttcctgaaagtcagggtcggcttgtgaaaagttgttaaacaacatgctaaatgtgaaatgtcaaccctcactctaaactttccctgttcagagcatcagatgaagacttcattgggttttatagtggctttctgatttttggtagtccattgaagaagggagtttgaaagttgcttgtatactgttaacgattgtctgcccatgtcctgcctgaaataccatgattgtttatggaaagtatctttaataaagctggatacagcttggcttggtaaaaa

SEQ ID NO: 28482 - DNA, 2700 bp, Homo sapiens
agcaattgggaacagaaagtgcttcctgtcccggcctgagacaatggacaataaacccagcctggtgggccccggcccctgaccccaaggcttcaggaagaggctcccacacgcacacacctgcggtgtgcgaagctcgcattgttctgggctcatggccgagtagggccccttgctctcaggagcctccagctctttctggacctgagccctgggagccttcactctgcccagatgtgcttcctgtggaaggagacccccagatgacacagatggagtcttgctctgtcacccaggctggaatgcagtggcatgatcttggctcactgaaacctctgcctcccggttcaagcaattctcctgcctcagcctcctgagtagctgggattacagaaaatctgagcagtgggtgaggccgagggactgcccagagccccagagcacggcagtgggcaagcagtcgtccctgtcctgggcatccctgtggccatggagctcctgggtgagcagctgctctgagacaagtctggtgaagaatacagcaggactcctgaacattcttccttaaatgcttatctgtggaaaccagaactgcccttggcgcgtggctcgtggacgtgctgggtggctgggtggggcgggtgcacgggtggagcctcagctctgtttctttctctgggtagtgtccccactgccgggcttctcccgctctcagctctctggggaggtcccctgtgaagggcctgtctttcctgtcccctccctcggatcattaatgaaccactctctctctctttttccttttcagtgattgggctgtcggaatcaaagaggccctccggtgactcaggcgtttcccattgccctattctagcatcctctactcttagcactgagagtttttcacgtcctatttggaactgataggaaaccctttcattgtttcgctacatggatattagcactgatgaaggaagcgctccatcagatagtggtccgctgcagtgagctggtttccagcacgagcctgcctagactcagcgtctcccgcctccagggacccccagactctcagcccctaggcaccctgggccagggtggttggaagcttctaggcattgtggggtctctggcaccagagacactcgggggtctggggaccgagtttgggccctgtacccacccactaccatttgacatggtgagagagagagagagagatgacgagctcaggcagggatggcttctccagtgcccacaatgtgccaggactctgctgtgccactgtgggcctttcctcacccctccctcccagacatcaagctccggtttccagctgtgttccttgaagccgtcgggctctctggtgacagccacagagcctctgagcaactttgctttcagctattttccatgacccagtcctgggtaaggcttcatttgaatgaagggttctgctgctaaaaaaaaaaaaaaagttggaaaaaccacctgatcacaactttctaaggcagctattttgttttgcaatgagatatttgcagtggtttcactaaagcctgatcttcccactggactgtcggcctgtgaggatgaggacgtgtctatcacagtcagtatgccctgaatgaatgggtgtcaccctccgccccctagtgagagataaggacctcaggctcagagaggttatgtggttttctcaaagccacacagcaagatttggcaggtgagccttacttctcttcctgggctagcctgcggtcaggggcaaggcttttggatgataagagtgaggtgcagtcagctctatattgggggtggcagagggaaaaggagggggggttcccaaagcaccattctgctttctgtgagaagggatttcccctcaacaacttctgtcccatttttcagagctaaagtgacaagccacatccacgtccctggttaaaggtgctccccctgcaggaaacacatgtgcacttgggatggagccctctgtgcgggagcggcttgctcacctctcagccagtgccagctgggtgggtctctcccagctctcgaatcctaactgcagccaccatttattcagcacctgttatgtaccaggcactttatgtatcttattgctaaccctcaaaacaagcccttcccaacataagcgcttttgtgccaaacccataggtctgaaactgagacccagagaggctgaatgacatgctcacagtcacacagcaggcagtggcaggcagtagtgaagtcggctctatggattgtatacctgggctcctccaggcctctgcgctgcccggcctgataccctagcaggttgggtattcagaggtgcctggggagcttgttaaaagtgtagattccaggcctccttacccttagagactgtgactcagtatccggggcagggcccaggcatcttcattttgacaggccgtcccggtggctgccatgcgcaggcaggttttaggaacatcatgggtggatgattcctggtctccccagccctcttgacctggccacagagagctgcctttccagcgaggtcagccgagatgacgctgccgggagagcagtcttctctgtagtccccggaggggactcctcggaggaaggatgagtctgagggttccggttgtcttggcctgagaccacccaaggtcttttaacagaaaaaaacttcacccaaaa

SEQ ID NO: 28483 - DNA, 355 bp, Homo sapiens
tatagactagtttgggtggattgggcaaatccgactcggaccatccatgattttatattgtgacctgaattattgtgaaaatatcttctcagctgctttagctttcttctttgtgaaaggcagaatggaaagaggcctgggatccaagtcacaagacccaaactgcaggccccacactgccacagttcaacccttctgtgtctctgtgccctgaaatgtaaaacatgggcttgaaccaagtaacgtccaaagccctacttaactctaacaaatgtgttattctctagtttctttcaggttgcctgtctcagttgaagaatatgactaaatttttttctcattagcatccataaaa

SEQ ID NO: 28484 - DNA, 3498 bp, Homo sapiens
  misc_feature (7)..(7): n is a, c, g, or t
  misc_feature (9)..(9): n is a, c, g, or t
  misc_feature (12)..(13): n is a, c, g, or t
  misc_feature (17)..(18): n is a, c, g, or t
  misc_feature (29)..(29): n is a, c, g, or t
gagggcngnccnngagnnccggccccgcntcggccggccccgcctcggccggggcgtgggctccggctgcagctccggtctgctctcttggctcgggaacccccgcgggcgctggctccgtctgccagggatgacggcgacccctgagagcctcttccccactggggacgaactggactccagccagctccagatggagtccgatgaggtggacaccctgaaggagggagaggacccagccgaccggatgcacccgtttctggccatctatgagcttcagtctctgaaagtgcaccccttggtgttcgcacctggggtccctgtcacagcccaggtggtgggcaccgaaagatataccagcggatccaaggtgggaacctgcactctgtattctgtccgcttgactcacggcgacttttcctggacaaccaagaagaaataccgtcattttcaggagctgcatcgggacctcctgagacacaaagtcttgatgagtctgctccctctggctcgatttgccgttgcctattctccagcccgagatgcaggcaacagagagatgccctctctaccccgggcaggtcctgagggctccaccagacatgcagccagcaaacagaaatacctggagaattacctcaaccgtctcttgaccatgtctttctatcgcaactaccatgccatgacagagttcctggaagtcagtcagctgtcctttatcccggacttgggccgcaaaggactggaggggatgatccggaagcgctcaggtggccaccgtgttcctggcctcacctgctgtggccgagaccaagtttgttatcgctggtccaagaggtggctggtggtgaaggactccttcctgctgtacatgtgcctcgagacaggtgccatctcatttgttcagctctttgaccctggctttgaggtgcaagtggggaaaaggagcacggaggcacggcacggcgtgcggatcgatacctcccacaggtccttgattctcaagtgcagcagctaccggcaggcacggtggtgggcccaagagatcactgagctggcacagggcccaggcagagacttcctacagctgcaccggcatgacagctacgccccaccccggcctgggaccttggcccggtggtttgtgaatggggcaggttactttgctgctgtggcagatgccatccttcgagctcaagaggagattttcatcacagactggtggttgagtcctgaggtttacctgaagcgtccggcccattcagatgactggagactggacattatgctcaagaggaaggcggaggaaggtgtccgtgtgtctattctgctgtttaaagaagtggaattggccttgggcatcaacagtggctatagcaagagggcgctgatgctgctgcaccccaacataaaggtgatgcgtcacccagaccaagtgacgttgtgggcccatcatgagaagctcctggtggtggaccaagtggtagcattcctggggggactggaccttgcctatggccgctgggatgacctgcactaccgactgactgaccttggagactcctctgaatcagctgcctcccagcctcccaccccgcgcccagactcaccagccaccccagacctctctcacaaccaattcttctggctgggcaaggactacagcaatcttatcaccaaggactgggtgcagctggaccggcctttcgaagatttcattgacagggagacgacccctcggatgccatggcgggacgttggggtggtcgtccatggcctaccggcccgggaccttgcccggcacttcatccagcgctggaacttcaccaagaccaccaaggccaagtacaagactcccacatacccctacctgcttcccaagtctaccagcacggccaatcagctccccttcacacttccaggagggcagtgcaccaccgtacaggtcttgcgatcagtggaccgctggtcagcagggactctggagaactccatcctcaatgcctacctgcacaccatcagggagagccagcacttcctctacattgagaatcagttcttcattagctgctcagatgggcggacggttctgaacaaggtgggcgatgagattgtggacagaatcctgaaggcccacaaacaggggtggtgttaccgagtctacgtgcttttgcccttactccctggcttcgagggtgacatctccacgggcggtggcaactccatccaggccattctgcactttacttacaggaccctgtgtcgtggggagtattcaatcctgcatcgccttaaagcagccatggggacagcatggcgggactatatttccatctgcgggcttcgtacacacggagagctgggcgggcaccccgtctcggagctcatctacatccacagcaaggtgctcatcgcagatgaccggacagtcatcattggttctgcaaacatcaatgaccggagcttgctggggaagcgggacagtgagctggccgtgctgatcgaggacacagagacggaaccatccctcatgaatggggcagagtatcaggcgggcaggtttgccttgagtctgcggaagcactgcttcggtgtgattcttggagcaaatacccggccagacttggatctccgagaccccatctgtgatgacttcttccagttgtggcaagacatggctgagagcaacgccaatatctatgagcagatcttccgctgcctgccatccaatgccacgcgttccctgcggactctccgggagtacgtggccgtggagcccttggccacggtcagtccccccttggctcggtctgagctcacccaggtccagggccacctggtccacttccccctcaagttcctagaggatgagtctttgctgcccccgctgggtagcaaggagggcatgatccccctagaagtgtggacatagttgaggcccccgtcagggagaggtcaccagctgctgtgccccaccacgtctggctccctgccccttaaccccaaggactgagggcagtgccctttgagatctggggaggcaggcattcctgaagggaactagaggtgttacagaggacccttacgtgagaaatagctgaaaagggcactcccaaccctgggctggggaggaggagagagtcccagagctcatcccccctgctgcccagtgcaaaccacttctccatgctgcaaaggagaagcacagctcctgccagggtgagcagggtcaagcctcttattccaggagaagggggctctgccccaggccctactacccattgttcccttcctcttcctgcccttgaaccccctccctgtcccagggccctcccagcccattgctgccaaggtggagggaaggataaagccacttctggcttcagcccccaccaggggaaggaaggagggcacattaactccctccaccagcctgctgacagacactaactttgtatccgttcaataagcatttcataaataaaggtgtagaaaagg

SEQ ID NO: 28485 - DNA, 3454 bp, Homo sapiens
tactccactgaataatctcctagaggccctccggtctgctctcttggctcgggaacccccgcgggcgctggctccgtctgccagggatgacggcgacccctgagagcctcttccccactggggacgaactggactccagccagctccagatggagtccgatgaggtggacaccctgaaggagggagaggacccagccgaccggatgcacccgtttctggccatctatgagcttcagtctctgaaagtgcaccccttggtgttcgcacctggggtccctgtcacagcccaggtggtgggcaccgaaagatataccagcggatccaaggtgggaacctgcactctgtattctgtccgcttgactcacggcgacttttcctggacaaccaagaagaaataccgtcattttcaggagctgcatcgggacctcctgagacacaaagtcttgatgagtctgctccctctggctcgatttgccgttgcctattctccagcccgagatgcaggcaacagagagatgccctctctaccccgggcaggtcctgagggctccaccagacatgcagccagcaaacagaaatacctggagaattacctcaaccgtctcttgaccatgtctttctatcgcaactaccatgccatgacagagttcctggaagtcagtcagctgtcctttatcccggacttgggccgcaaaggactggaggggatgatccggaagcgctcaggtggccaccgtgttcctggcctcacctgctgtggccgagaccaagtttgttatcgctggtccaagaggtggctggtggtgaaggactccttcctgctgtacatgtgcctcgagacaggtgccatctcatttgttcagctctttgaccctggctttgaggtgcaagtggggaaaaggagcacggaggcacggcacggcgtgcggatcgatacctcccacaggtccttgattctcaagtgcagcagctaccggcaggcacggtggtgggcccaagagatcactgagctggcacagggcccaggcagagacttcctacagctgcaccggcatgacagctacgccccaccccggcctgggaccttggcccggtggtttgtgaatggggcaggttactttgctgctgtggcagatgccatccttcgagctcaagaggagattttcatcacagactggtggttgagtcctgaggtttacctgaagcgtccggcccattcagatgactggagactggacattatgctcaagaggaaggcggaggaaggtgtccgtgtgtctattctgctgtttaaagaagtggaattggccttgggcatcaacagtggctatagcaagagggcgctgatgctgctgcaccccaacataaaggtgatgcgtcacccagaccaagtgacgttgtgggcccatcatgagaagctcctggtggtggaccaagtggtagcattcctggggggactggaccttgcctatggccgctgggatgacctgcactaccgactgactgaccttggagactcctctgaatcagctgcctcccagcctcccaccccgcgcccagactcaccagccaccccagacctctctcacaaccaattcttctggctgggcaaggactacagcaatcttatcaccaaggactgggtgcagctggaccggcctttcgaagatttcattgacagggagacgacccctcggatgccatggcgggacgttggggtggtcgtccatggcctaccggcccgggaccttgcccggcacttcatccagcgctggaacttcaccaagaccaccaaggccaagtacaagactcccacatacccctacctgcttcccaagtctaccagcacggccaatcagctccccttcacacttccaggagggcagtgcaccaccgtacaggtcttgcgatcagtggaccgctggtcagcagggactctggagaactccatcctcaatgcctacctgcacaccatcagggagagccagcacttcctctacattgagaatcagttcttcattagctgctcagatgggcggacggttctgaacaaggtgggcgatgagattgtggacagaatcctgaaggcccacaaacaggggtggtgttaccgagtctacgtgcttttgcccttactccctggcttcgagggtgacatctccacgggcggtggcaactccatccaggccattctgcactttacttacaggaccctgtgtcgtggggagtattcaatcctgcatcgccttaaagcagccatggggacagcatggcgggactatatttccatctgcgggcttcgtacacacggagagctgggcgggcaccccgtctcggagctcatctacatccacagcaaggtgctcatcgcagatgaccggacagtcatcattggttctgcaaacatcaatgaccggagcttgctggggaagcgggacagtgagctggccgtgctgatcgaggacacagagacggaaccatccctcatgaatggggcagagtatcaggcgggcaggtttgccttgagtctgcggaagcactgcttcggtgtgattcttggagcaaatacccggccagacttggatctccgagaccccatctgtgatgacttcttccagttgtggcaagacatggctgagagcaacgccaatatctatgagcagatcttccgctgcctgccatccaatgccacgcgttccctgcggactctccgggagtacgtggccgtggagcccttggccacggtcagtccccccttggctcggtctgagctcacccaggtccagggccacctggtccacttccccctcaagttcctagaggatgagtctttgctgcccccgctgggtagcaaggagggcatgatccccctagaagtgtggacatagttgaggcccccgtcagggagaggtcaccagctgctgtgccccaccacgtctggctccctgccccttaaccccaaggactgagggcagtgccctttgagatctggggaggcaggcattcctgaagggaactagaggtgttacagaggacccttacgtgagaaatagctgaaaagggcactcccaaccctgggctggggaggaggagagagtcccagagctcatcccccctgctgcccagtgcaaaccacttctccatgctgcaaaggagaagcacagctcctgccagggtgagcagggtcaagcctcttattccaggagaagggggctctgccccaggccctactacccattgttcccttcctcttcctgcccttgaaccccctccctgtcccagggccctcccagcccattgctgccaaggtggagggaaggataaagccacttctggcttcagcccccaccaggggaaggaaggagggcacattaactccctccaccagcctgctgacagacactaactttgtatccgttcaataagcatttcataaataaaggtgtagaaaagg

SEQ ID NO: 28486 - DNA, 3421 bp, Homo sapiens
tactccactgaataatctcctagaggccctccggtctgctctcttggctcgggaacccccgcgggcgctggctccgtctgccagggatgacggcgacccctgagagcctcttccccactggggacgaactggactccagccagctccagatggagtccgatgaggtggacaccctgaaggagggagaggacccagccgaccggatgcacccgtttctggccatctatgagcttcagtctctgaaagtgcaccccttggtgttcgcacctggggtccctgtcacagcccaggtggtgggcaccgaaagatataccagcggatccaaggtgggaacctgcactctgtattctgtccgcttgactcacggcgacttttcctggacaaccaagaagaaataccgtcattttcaggagctgcatcgggacctcctgagacacaaagtcttgatgagtctgctccctctggctcgatttgccgttgcctattctccagcccgagatgcaggcaacagagagatgccctctctaccccgggcaggtcctgagggctccaccagacatgcagccagcaaacagaaatacctggagaattacctcaaccgtctcttgaccatgtctttctatcgcaactaccatgccatgacagagttcctggaagtcagtcagctgtcctttatcccggacttgggccgcaaaggactggaggggatgatccggaagcgctcaggtggccaccgtgttcctggcctcacctgctgtggccgagaccaagtttgttatcgctggtccaagaggtggctggtggtgaaggactccttcctgctgtacatgtgcctcgagacaggtgccatctcatttgttcagctctttgaccctggctttgaggtgcaagtggggaaaaggagcacggaggcacggcacggcgtgcggatcgatacctcccacaggtccttgattctcaagtgcagcagctaccggcaggcacggtggtgggcccaagagatcactgagctggcacagggcccaggcagagacttcctacagctgcaccggcatgacagctacgccccaccccggcctgggaccttggcccggtggtttgtgaatggggcaggttactttgctgctgtggcagatgccatccttcgagctcaagaggagattttcatcacagactggtggttgagtcctgaggtttacctgaagcgtccggcccattcagatgactggagactggacattatgctcaagaggaaggcggaggaaggtgtccgtgtgtctattctgctgtttaaagaagtggaattggccttgggcatcaacagtggctatagcaagagggcgctgatgctgctgcaccccaacataaaggtgatgcgtcacccagaccaagtgacgttgtgggcccatcatgagaagctcctggtggtggaccaagtggtagcattcctggggggactggaccttgcctatggccgctgggatgacctgcactaccgactgactgaccttggagactcctctgaatcagctgcctcccagcctcccaccccgcgcccagactcaccagccaccccagacctctctcacaaccaattcttctggctgggcaaggactacagcaatcttatcaccaaggactgggtgcagctggaccggcctttcgaagatttcattgacagggagacgacccctcggatgccatggcgggacgttggggtggtcgtccatggcctaccggcccgggaccttgcccggcacttcatccagcgctggaacttcaccaagaccaccaaggccaagtacaagactcccacatacccctacctgcttcccaagtctaccagcacggccaatcagctccccttcacacttccaggagggcagtgcaccaccgtacaggtcttgcgatcagtggaccgctggtcagcagggactctggagaactccatcctcaatgcctacctgcacaccatcagggagagccagcacttcctctacattgagaatcagttcttcattagctgctcagatgggcggacggttctgaacaaggtgggcgatgagattgtggacagaatcctgaaggcccacaaacaggggtggtgttaccgagtctacgtgcttttgcccttactccctggcttcgagggtgacatctccacgggcggtggcaactccatccaggccattctgcactttacttacaggaccctgtgtcgtggggagtattcaatcctgcatcgccttaaagcagccatggggacagcatggcgggactatatttccatctgcgggcttcgtacacacggagagctgggcgggcaccccgtctcggagctcatctacatccacagcaaggtgctcatcgcagatgaccggacagtcatcattggttctgcaaacatcaatgaccggagcttgctggggaagcgggacagtgagctggccgtgctgatcgaggacacagagacggaaccatccctcatgaatggggcagagtatcaggcgggcagtgtgattcttggagcaaatacccggccagacttggatctccgagaccccatctgtgatgacttcttccagttgtggcaagacatggctgagagcaacgccaatatctatgagcagatcttccgctgcctgccatccaatgccacgcgttccctgcggactctccgggagtacgtggccgtggagcccttggccacggtcagtccccccttggctcggtctgagctcacccaggtccagggccacctggtccacttccccctcaagttcctagaggatgagtctttgctgcccccgctgggtagcaaggagggcatgatccccctagaagtgtggacatagttgaggcccccgtcagggagaggtcaccagctgctgtgccccaccacgtctggctccctgccccttaaccccaaggactgagggcagtgccctttgagatctggggaggcaggcattcctgaagggaactagaggtgttacagaggacccttacgtgagaaatagctgaaaagggcactcccaaccctgggctggggaggaggagagagtcccagagctcatcccccctgctgcccagtgcaaaccacttctccatgctgcaaaggagaagcacagctcctgccagggtgagcagggtcaagcctcttattccaggagaagggggctctgccccaggccctactacccattgttcccttcctcttcctgcccttgaaccccctccctgtcccagggccctcccagcccattgctgccaaggtggagggaaggataaagccacttctggcttcagcccccaccaggggaaggaaggagggcacattaactccctccaccagcctgctgacagacactaactttgtatccgttcaataagcatttcataaataaaggtgtagaaaagg

SEQ ID NO: 28487 - DNA, 361 bp, Homo sapiens
ttggaagactcatctgaatcagcagcctcccagcctcccaccccgcgcccagactcaccagccaccccagacctctctcacaaccaattcttctggctgggcaaggactacagcaatcttatcaccaaggactgggtgcagctggaccggcctttcgaagatttcattgacagggagacgacccctcggatgccatggcgggacgttggggtggtcgtccatggcctaccggcccgggaccttgcccggcacttcatccagcgctggaacttcaccaaggtgttcattccctccgataggggctggaggtagggagggagccagggcagattggcacctcctgctgactctgccatccctc

SEQ ID NO: 28488 - DNA, 3288 bp, Homo sapiens
  misc_feature (7)..(7): n is a, c, g, or t
  misc_feature (9)..(9): n is a, c, g, or t
  misc_feature (12)..(13): n is a, c, g, or t
  misc_feature (17)..(18): n is a, c, g, or t
  misc_feature (29)..(29): n is a, c, g, or t
gagggcngnccnngagnnccggccccgcntcggccggccccgcctcggccggggcgtgggctccggctgcagctccggtctgctctcttggctcgggaacccccgcgggcgctggctccgtctgccagggatgacggcgacccctgagagcctcttccccactggggacgaactggactccagccagctccagatggagtccgatgaggtggacaccctgaaggagggagaggacccagccgaccggatgcacccgtttctggccatctatgagcttcagtctctgaaagtgcaccccttggtgttcgcacctggggtccctgtcacagcccaggtggtgggcaccgaaagatataccagcggatccaaggtgggaacctgcactctgtattctgtccgcttgactcacggcgacttttcctggacaaccaagaagaaataccgtcattttcaggagctgcatcgggacctcctgagacacaaagtcttgatgagtctgctccctctggctcgatttgccgttgcctattctccagcccgagatgcaggcaacagagagatgccctctctaccccgggcaggtcctgagggctccaccagacatgcagccagcaaacagaaatacctggagaattacctcaaccgtctcttgaccatgtctttctatcgcaactaccatgccatgacagagttcctggaagtcagtcagctgtcctttatcccggacttgggccgcaaaggactggaggggatgatccggaagcgctcaggtggccaccgtgttcctggcctcacctgctgtggccgagaccaagtttgttatcgctggtccaagaggtggctggtggtgaaggactccttcctgctgtacatgtgcctcgagacaggtgccatctcatttgttcagctctttgaccctggctttgaggtgcaagtggggaaaaggagcacggaggcacggcacggcgtgcggatcgatacctcccacaggtccttgattctcaagtgcagcagctaccggcaggcacggtggtgggcccaagagatcactgagctggcacagggcccaggcagagacttcctacagctgcaccggcatgacagctacgccccaccccggcctgggaccttggcccggtggtttgtgaatggggcaggttactttgctgctgtggcagatgccatccttcgagctcaagaggagattttcatcacagactggtggttgagtcctgaggtttacctgaagcgtccggcccattcagatgactggagactggacattatgctcaagaggaaggcggaggaaggtgtccgtgtgtctattctgctgtttaaagaagtggaattggccttgggcatcaacagtggctatagcaagagggcgctgatgctgctgcaccccaacataaaggtgatgcgtcacccagaccaagtgacgttgtgggcccatcatgagaagctcctggtggtggaccaagtggtagcattcctggggggactggaccttgcctatggccgctgggatgacctgcactaccgactgactgaccttggagactcctctgaatcagctgcctcccagcctcccaccccgcgcccagactcaccagccaccccagacctctctcacaaccaattcttctggctgggcaaggactacagcaatcttatcaccaaggactgggtgcagctggaccggcctttcgaagatttcattgacagggagacgacccctcggatgccatggcgggacgttggggtggtcgtccatggcctaccggcccgggaccttgcccggcacttcatccagcgctggaacttcaccaagaccaccaaggccaagtacaagactcccacatacccctacctgcttcccaagtctaccagcacggccaatcagctccccttcacacttccaggagggcagtgcaccaccgtacaggtcttgcgatcagtggaccgctggtcagcagggactctggagaactccatcctcaatgcctacctgcacaccatcagggagagccagcacttcctctacattgagaatcagttcttcattagctgctcagatgggcggacggttctgaacaaggtgggcgatgagattgtggacagaatcctgaaggcccacaaacaggggtggtgttaccgagtctacgtgcttttgcccttactccctggcttcgagggtgacatctccacgggcggtggcaactccatccaggccattctgcactttacttacaggaccctgtgtcgtggggagtattcaatcctgcatcgccttaaagcagccatggggacagcatggcgggactatatttccatctgcgggcttcgtacacacggagagctgggcgggcaccccgtctcggagctcatctacatccacagcaaggtgctcatcgcagatgaccggacagtcatcattggttctgcaaacatcaatgaccggagcttgctggggaagcgggacagtgagctggccgtgctgatcgaggacacagagacggaaccatccctcatgaatggggcagagtatcaggcgggcaggtttgccttgagtctgcggaagcactgcttcggtgtgattcttggagcaaatacccggccagacttggatctccgagaccccatctgtgatgacttcttccagttgtggcaagacatggctgagagcaacgccaatatctatgagcagatcttccgctgcctgccatccaatgccacgcgttccctgcggactctccgggagtacgtggccgtggagcccttggccacggtcagtccccccttggctcggtctgagctcacccaggtccagggccacctggtccacttccccctcaagttcctagaggatgagtctttgctgcccccgctgggtagcaaggagggcatgatccccctagaagtgtggacatagttgaggcccccgtcagggagaggtcaccagctgctgtgccccaccacgtctggctccctgccccttaaccccaaggactgagggcagtgccctttgagatctggggaggcaggcattcctgaagggaactagaggtgttacagaggacccttacgtgagaaatagctgaaaagggcactcccaaggccctcccagcccattgctgccaaggtggagggaaggataaagccacttctggcttcagcccccaccaggggaaggaaggagggcacattaactccctccaccagcctgctgacagacactaactttgtatccgttcaataagcatttcataaataaaggtgtagaaaagg

SEQ ID NO: 28489 - DNA, 2439 bp, Homo sapiens
cacgactgtcctccggtcttcactctccagagctttctggcttctgactcccctgacctccttggcttggcctccccccaggtttgtgaatggggcaggttactttgctgctgtggcagatgccatccttcgagctcaagaggagattttcatcacagactggtggttgagtcctgaggtttacctgaagcgtccggcccattcagatgactggagactggacattatgctcaagaggaaggcggaggaaggtgtccgtgtgtctattctgctgtttaaagaagtggaattggccttgggcatcaacagtggctatagcaagagggcgctgatgctgctgcaccccaacataaaggtgatgcgtcacccagaccaagtgacgttgtgggcccatcatgagaagctcctggtggtggaccaagtggtagcattcctggggggactggaccttgcctatggccgctgggatgacctgcactaccgactgactgaccttggagactcctctgaatcagctgcctcccagcctcccaccccgcgcccagactcaccagccaccccagacctctctcacaaccaattcttctggctgggcaaggactacagcaatcttatcaccaaggactgggtgcagctggaccggcctttcgaagatttcattgacagggagacgacccctcggatgccatggcgggacgttggggtggtcgtccatggcctaccggcccgggaccttgcccggcacttcatccagcgctggaacttcaccaagaccaccaaggccaagtacaagactcccacatacccctacctgcttcccaagtctaccagcacggccaatcagctccccttcacacttccaggagggcagtgcaccaccgtacaggtcttgcgatcagtggaccgctggtcagcagggactctggagaactccatcctcaatgcctacctgcacaccatcagggagagccagcacttcctctacattgagaatcagttcttcattagctgctcagatgggcggacggttctgaacaaggtgggcgatgagattgtggacagaatcctgaaggcccacaaacaggggtggtgttaccgagtctacgtgcttttgcccttactccctggcttcgagggtgacatctccacgggcggtggcaactccatccaggccattctgcactttacttacaggaccctgtgtcgtggggagtattcaatcctgcatcgccttaaagcagccatggggacagcatggcgggactatatttccatctgcgggcttcgtacacacggagagctgggcgggcaccccgtctcggagctcatctacatccacagcaaggtgctcatcgcagatgaccggacagtcatcattggttctgcaaacatcaatgaccggagcttgctggggaagcgggacagtgagctggccgtgctgatcgaggacacagagacggaaccatccctcatgaatggggcagagtatcaggcgggcaggtttgccttgagtctgcggaagcactgcttcggtgtgattcttggagcaaatacccggccagacttggatctccgagaccccatctgtgatgacttcttccagttgtggcaagacatggctgagagcaacgccaatatctatgagcagatcttccgctgcctgccatccaatgccacgcgttccctgcggactctccgggagtacgtggccgtggagcccttggccacggtcagtccccccttggctcggtctgagctcacccaggtccagggccacctggtccacttccccctcaagttcctagaggatgagtctttgctgcccccgctgggtagcaaggagggcatgatccccctagaagtgtggacatagttgaggcccccgtcagggagaggtcaccagctgctgtgccccaccacgtctggctccctgccccttaaccccaaggactgagggcagtgccctttgagatctggggaggcaggcattcctgaagggaactagaggtgttacagaggacccttacgtgagaaatagctgaaaagggcactcccaaccctgggctggggaggaggagagagtcccagagctcatcccccctgctgcccagtgcaaaccacttctccatgctgcaaaggagaagcacagctcctgccagggtgagcagggtcaagcctcttattccaggagaagggggctctgccccaggccctactacccattgttcccttcctcttcctgcccttgaaccccctccctgtcccagggccctcccagcccattgctgccaaggtggagggaaggataaagccacttctggcttcagcccccaccaggggaaggaaggagggcacattaactccctccaccagcctgctgacagacactaactttgtatccgttcaataagcatttcataaataaaggtgtagaaaagg

SEQ ID NO: 28490 - DNA, 1469 bp, Homo sapiens
tgatctacccgatgccttgcaaatcagttcttcattagctgctcagatgggcggacggttctgaacaaggtgggcgatgagattgtggacagaatcctgaaggcccacaaacaggggtggtgttaccgagtctacgtgcttttgcccttactccctggcttcgagggtgacatctccacgggcggtggcaactccatccaggccattctgcactttacttacaggaccctgtgtcgtggggagtattcaatcctgcatcgccttaaagcagccatggggacagcatggcgggactatatttccatctgcgggcttcgtacacacggagagctgggcgggcaccccgtctcggagctcatctacatccacagcaaggtgctcatcgcagatgaccggacagtcatcattggttctgcaaacatcaatgaccggagcttgctggggaagcgggacagtgagctggccgtgctgatcgaggacacagagacggaaccatccctcatgaatggggcagagtatcaggcgggcaggtttgccttgagtctgcggaagcactgcttcggtgtgattcttggagcaaatacccggccagacttggatctccgagaccccatctgtgatgacttcttccagttgtggcaagacatggctgagagcaacgccaatatctatgagcagatcttccgctgcctgccatccaatgccacgcgttccctgcggactctccgggagtacgtggccgtggagcccttggccacggtcagtccccccttggctcggtctgagctcacccaggtccagggccacctggtccacttccccctcaagttcctagaggatgagtctttgctgcccccgctgggtagcaaggagggcatgatccccctagaagtgtggacatagttgaggcccccgtcagggagaggtcaccagctgctgtgccccaccacgtctggctccctgccccttaaccccaaggactgagggcagtgccctttgagatctggggaggcaggcattcctgaagggaactagaggtgttacagaggacccttacgtgagaaatagctgaaaagggcactcccaaccctgggctggggaggaggagagagtcccagagctcatcccccctgctgcccagtgcaaaccacttctccatgctgcaaaggagaagcacagctcctgccagggtgagcagggtcaagcctcttattccaggagaagggggctctgccccaggccctactacccattgttcccttcctcttcctgcccttgaaccccctccctgtcccagggccctcccagcccattgctgccaaggtggagggaaggataaagccacttctggcttcagcccccaccaggggaaggaaggagggcacattaactccctccaccagcctgctgacagacactaactttgtatccgttcaataagcatttcataaataaaggtgtagaaaagg

SEQ ID NO: 28491 - DNA, 1482 bp, Homo sapiens
tgctgatgtctgtctctgattcttgccccagaataatcagttcttcattagctgctcagatgggcggacggttctgaacaaggtgggcgatgagattgtggacagaatcctgaaggcccacaaacaggggtggtgttaccgagtctacgtgcttttgcccttactccctggcttcgagggtgacatctccacgggcggtggcaactccatccaggccattctgcactttacttacaggaccctgtgtcgtggggagtattcaatcctgcatcgccttaaagcagccatggggacagcatggcgggactatatttccatctgcgggcttcgtacacacggagagctgggcgggcaccccgtctcggagctcatctacatccacagcaaggtgctcatcgcagatgaccggacagtcatcattggttctgcaaacatcaatgaccggagcttgctggggaagcgggacagtgagctggccgtgctgatcgaggacacagagacggaaccatccctcatgaatggggcagagtatcaggcgggcaggtttgccttgagtctgcggaagcactgcttcggtgtgattcttggagcaaatacccggccagacttggatctccgagaccccatctgtgatgacttcttccagttgtggcaagacatggctgagagcaacgccaatatctatgagcagatcttccgctgcctgccatccaatgccacgcgttccctgcggactctccgggagtacgtggccgtggagcccttggccacggtcagtccccccttggctcggtctgagctcacccaggtccagggccacctggtccacttccccctcaagttcctagaggatgagtctttgctgcccccgctgggtagcaaggagggcatgatccccctagaagtgtggacatagttgaggcccccgtcagggagaggtcaccagctgctgtgccccaccacgtctggctccctgccccttaaccccaaggactgagggcagtgccctttgagatctggggaggcaggcattcctgaagggaactagaggtgttacagaggacccttacgtgagaaatagctgaaaagggcactcccaaccctgggctggggaggaggagagagtcccagagctcatcccccctgctgcccagtgcaaaccacttctccatgctgcaaaggagaagcacagctcctgccagggtgagcagggtcaagcctcttattccaggagaagggggctctgccccaggccctactacccattgttcccttcctcttcctgcccttgaaccccctccctgtcccagggccctcccagcccattgctgccaaggtggagggaaggataaagccacttctggcttcagcccccaccaggggaaggaaggagggcacattaactccctccaccagcctgctgacagacactaactttgtatccgttcaataagcatttcataaataaaggtgtagaaaagg

SEQ ID NO: 28492 - DNA, 1059 bp, Homo sapiens
ctgcctcatcctcccaaagtgctgggaatacaggcgtgagccaccgcacccagccaattttgaattacctgagtagggacaatgtaacttttctggtactcaggttctctaaggatcttaatctggccctgctgggacccctttctcctatagtgtgattcttggagcaaatacccggccagacttggatctccgagaccccatctgtgatgacttcttccagttgtggcaagacatggctgagagcaacgccaatatctatgagcagatcttccgctgcctgccatccaatgccacgcgttccctgcggactctccgggagtacgtggccgtggagcccttggccacggtcagtccccccttggctcggtctgagctcacccaggtccagggccacctggtccacttccccctcaagttcctagaggatgagtctttgctgcccccgctgggtagcaaggagggcatgatccccctagaagtgtggacatagttgaggcccccgtcagggagaggtcaccagctgctgtgccccaccacgtctggctccctgccccttaaccccaaggactgagggcagtgccctttgagatctggggaggcaggcattcctgaagggaactagaggtgttacagaggacccttacgtgagaaatagctgaaaagggcactcccaaccctgggctggggaggaggagagagtcccagagctcatcccccctgctgcccagtgcaaaccacttctccatgctgcaaaggagaagcacagctcctgccagggtgagcagggtcaagcctcttattccaggagaagggggctctgccccaggccctactacccattgttcccttcctcttcctgcccttgaaccccctccctgtcccagggccctcccagcccattgctgccaaggtggagggaaggataaagccacttctggcttcagcccccaccaggggaaggaaggagggcacattaactccctccaccagcctgctgacagacactaactttgtatccgttcaataagcatttcataaataaaggtgtagaaaagg

SEQ ID NO: 28493 - DNA, 1330 bp, Homo sapiens
  misc_feature (7)..(7): n is a, c, g, or t
  misc_feature (9)..(9): n is a, c, g, or t
  misc_feature (12)..(13): n is a, c, g, or t
  misc_feature (17)..(18): n is a, c, g, or t
  misc_feature (29)..(29): n is a, c, g, or t
gagggcngnccnngagnnccggccccgcntcggccggccccgcctcggccggggcgtgggctccggctgcagctccggtctgctctcttggctcgggaacccccgcgggcgctggctccgtctgccagggatgacggcgacccctgagagcctcttccccactggggacgaactggactccagccagctccagatggagtccgatgaggtggacaccctgaaggagggagaggacccagccgaccggatgcacccgtttctggccatctatgagcttcagtctctgaaagtgcaccccttggtgttcgcacctggggtccctgtcacagcccaggtggtgggcaccgaaagatataccagcggatccaaggtgggaacctgcactctgtattctgtccgcttgactcacggcgacttttcctggacaaccaagaagaaataccgtcattttcaggagctgcatcgggacctcctgagacacaaagtcttgatgagtctgctccctctggctcgatttgccgttgcctattctccagcccgagatgcaggcaacagagagatgccctctctaccccgggcaggtcctgagggctccaccagacatgcagccagcaaacagaaatacctggagaattacctcaaccgtctcttgaccatgtctttctatcgcaactaccatgccatgacagagttcctggaagtcagtcagctgtcctttatcccggacttgggccgcaaaggactggaggggatgatccggaagcgctcaggtggccaccgtgttcctggcctcacctgctgtggccgagaccaagtttgttatcgctggtccaagaggtggctggtggtgaaggactccttcctgctgtacatgtgcctcgagacaggtgccatctcatttgttcagctctttgaccctggctttgagatctggggaggcaggcattcccctgggctggggaggaggagagagtcccagagctcatcccccctgctgcccagtgcaaaccacttctccatgctgcaaaggagaagcacagctcctgccagggtgagcagggtcaagcctcttattccaggagaagggggctctgccccaggccctactacccattgttcccttcctcttcctgcccttgaaccccctccctgtcccagggccctcccagcccattgctgccaaggtggagggaaggataaagccacttctggcttcagcccccaccaggggaaggaaggagggcacattaactccctccaccagcctgctgacagacactaactttgtatccgttcaataagcatttcataaataaaggtgtagaaaagg

SEQ ID NO: 28494 - DNA, 313 bp, Homo sapiens
aggtggctgggctggccccagggaaggggcaaaaggagggctggccagagtggggaggcggggacccacgcaggggacatccattcagttcctcatacccctaggtgggaacctgcactctgtattctgtccgcttgactcacggcgacttttcctggacaaccaagaagaaataccgtcattttcaggagctgcatcgggacctcctgagacacaaagtcttgatgagtctgctccctctggctcggtgagggcgaccggactgcttcctgtagagggcaggtgctccccaccctcctttctgtctgtctca

SEQ ID NO: 28495 - DNA, 369 bp, Homo sapiens
tgagacagagtctggctctatcgcccgggctggagtgcagtggcgtgatcttggctcactgcaaccaccccccaacccccatcccggtttcaagtgattctcctgcctcagcctccccagtagctgggattacaggcaccgccatcgtgtctggttaatttttgtatttttaatagagacgggatttcaccatggtggccaggctggtctcaaactcctgaactcaggtgatccacccacctcagcctcccaaaagggctgggattacaggtgtgaggcacgatgctgagccaatgaataccattatttctaaaaatccagtaattctcattcaattcaacaaatatctattaactatatgtggcatac

SEQ ID NO: 28496 - DNA, 1175 bp, Homo sapiens
gtgggaaaacagagaatttcctggaggcatgggaggggcacgctgtaatgagtgggaatgtcacaggcgctgtttcaaaaagagtggatgaaagcctgagaatgcggctgtaaaggctactggaaggctcctcgggcaggggacaggatgtgagcccctggaatagactcataaaagaaaatgttagcacataccattgaattcactgagacacatgagaaaatatgggaaagtcggagagtggaagaaaatgtaaagacccccctcctccccaaagagtacgttgtgtagtggggtagagtggaaaatcaatccaagaaaagtagcaaacggacccaaagatgaagaggaagaaaagaaacagcaacacgaaacgaaaaaaaaagccaccagatttgttgcaacgttgatgtaaacctggccgtcttcctgaaccagtgacccagggtttccgcttccctttgctgtcatcttgctcaagtctagaagctgaaatatcatcatcaactcgacatgaggggataacctctagatccactcatcagatgctcatcagacgttccaattacaaaactgaacctcttcttagtgctggggcggttagaatgcaaacatttcaagaaaaaaacacattgttttctagtggtgatagaattgagggtgagttcttccttcctttattgttgtcttttcttttatttttttctactttactgaagggcacatgcaataaagcagataaaaatgcactaatctggagtttacagttgggtgaatatttatatctgtattcacaggcataaccattaaccagatcaagatctagattctttaacatttcttgctcctcaaaaagtttcctagtgctggttccagtctatagcctccttctccagaagaaattgctatttttacttccgccatcatcaatgaattttgttgttcttgacctttaaatggaaccatacagtatgtactcttttgtgctcagatgttttttcactgagcatcgtgtctacgagtactatgtggtggtgttggtagttcattccttcttactgctgagtagtattccacttttggctatgacaacatttacttatctattctcccactgatgtatgcatcattgtttccagttcgagctattataaacattcctgatatttgctgaa

SEQ ID NO: 28497 - DNA, 421 bp, Homo sapiens
aatactcctgttatgggaggacagacaagggtttgggggatgatgatgctatggtagcggttctcaaaacacaaaatgacaagcaataaaaaagcccaaactcagcagctgtcaccaacttctctttgtgaaaataaaagagaaaaaaaacaaaaacaaaaacaaaacccaaccctctccttaggggaaaaaaaattctacacctcagatgatgcttaaaaaaaaaccagtcctcttcttgatgaacaaaagaaaaaacacggctttgtattgctgatctcatcaactggacacagctggaggtaagcctcttgcttttttttgttttttgttttaaagacaaacagctaacattttgtggctgttctctttcttctttcaaatctttctagggcattacacactctttcttaaaagctgt

SEQ ID NO: 28498 - DNA, 594 bp, Homo sapiens
tataaactctttcactttatttaaaattactatttaaagagaaaggaagacaacagaagacaaataacatgacctctccaaaaaattccttatttattgcccactctagaattatataatgtaaatattaaaaaaaacaaaatttttaaaaaggcaattcatgaacaaatccgaaatgtttatcaagtaggtaacatgaccacacagaccaaaaagagggagaaagagagagaaaagcagtcaaccttacccacttggaaacagtacaatagtgcattcacactgtgaacttctatctaagaaggaacacaggagctcaacataaaagcataacaggcccagcgtggtggctcatgcctgtaatcgcagcactttggaaggctgaggccaagaatttgagaccagcctgggccatatagtgatggcttgtctctacaaatatttaaaaattagccaggcatggtccggctaagcagtcccagctacctgagaggatgagatgggaggactacttgagcccaggaggtcaaggccacagcgagctatgaaggtaccagtctgggcaacagagtaagaccttgtcttaaaaaaaaa

SEQ ID NO: 28499 - DNA, 254 bp, Homo sapiens
agttctgtgtttaacttttcgaggaactgtattccacaatggccgcgccattttacgttcccatcagcagtgcccattggtcccagtttctccatatcctcaccagtgcttgttatttttcattttagaaaatgtttttgatttaaaataatcattggtttcttctccacttttctgtgtgtgggtgtgtgtatttttttctttttaaactggtcatttagactttgaacctcttgtactactattacagtttt

SEQ ID NO: 28500 - DNA, 386 bp, Homo sapiens
ctcactgcatccttgacctcctggactgaagcaatccttccacctcagcctcctgagtagctgggatcacaggtgtgcatcagcatgctcagctaattttttatttgttgtagagatgggtctgtatatccccagctggtcttgaactcctaggctcagcagtcctcttgtctccacctccgaaagtgttgggattacaggcatgagccactgttcctggctgaagttaacattttaatcagatttacagattgttatttatagaatgtattcatgactgtgatcccagctgcttggggggctgaggcgggagaatcgcttgggcctgggaggcggaggttgcagtgagttgagatcatgccaccgcactccagcctgggcaacag

SEQ ID NO: 28501 - DNA, 577 bp, Homo sapiens
tttctttgggaagtaatatgaacgatccacatttagaagccatggtactctgaaggcataaagataaataggtaagctgtcattgtaaaatagcaaaggaggaattttaagactaagtagctcaaaggaaggagggatcggggatctggtaagaggaaatgcaattctaatgtgactcttctcccttacaccattcttcttggacatacactgcttccaaccatgtacagataaagccattctcagcatgtgagctatcccagcatgtgagtcaaaggcactgcttatggatccttccagactcccacaggcccctacatctggaagcctcctgctcccagtgccctggcccacacccacccccgtgaggtattgctagagtcttccccgacaggacctacaggcacgggaacactgaggacgcatgtgttcagcctttatcaccactgcaatcaatcacacagacttcagtgcaggtcatttgggagtaattcacaatggttttgtgctttttttacaagtgaaaaacagaactacttgatggtagagttaaaggattttcacctgaaaccagttc

SEQ ID NO: 28502 - DNA, 491 bp, Homo sapiens
gtcgtgaggatgaaagagtagcatgtgtgaggttgcctcccacgtctgttcatctgagacacagaacacacttggggaacattggtttccattcctccttctctgaaatagcaaaaaaggacagagaaaagacactttcttttcccaacaattttgaatgacagtaacagaactctgtatctcttactgaaaactaattttattgaggttcaactgatatataaaaagctgtacatatatagggctggacgcggctgctcatgcttgtaatcccagcactttgggaggcgaggcaggtggatcacctgagattaggagttcgagaccagcctgaccaacatggcaaaaccctgtctctactaaaaatacaaaaaattagctgggcatggtggtgcatgcctgtagtcccagctacttgggaggctgaggcgggagaatggcatgaacccgggaggcagagcttgcagtgatccaagaccgcaccactgcac

SEQ ID NO: 28503 - DNA, 243 bp, Homo sapiens
tgctacttattagctcattggccctgaacaaatctcatgtttcagagccctcagttgtgaaatggagttaataatattactgcttcatggggttgttgtctgaacttagaacaaataatagctattatttgtaaatggttattttatgtagataacccaagagaagtctgggtgttgtggctcacacctgtaatcgcttttggaggcaaggcagcaggactgcttgaggccaggagttcgaga

SEQ ID NO: 28504 - DNA, 314 bp, Homo sapiens
aagagattgaaataagagctcactaaccagagacgacccattatggtttaaatttctttgtatatgtgcctaccttttcctgtgtgtgtatatttaatacacagcttgagtattccttctctgaaatccttgggaccagaagcattttggatttcaggcttgttcagactttggaatatttgcattatacttactgtctgagcatccctaattggaagatctgactccatagcacatttcttttgaatgtcatgctggtgctcagaaagtttcagattttagagaatttcagatttttggattagggatgttca

SEQ ID NO: 28505 - DNA, 418 bp, Homo sapiens
gagatttagtaccaggtgggttcaggtcctgagcaaaagccccatctttgaattcagaatgctgaccccagggccgatcgtgtagagcctatggtgtatcttaatcgaaacccgtggcccaaacatctcagccaggaacctgggactttaggtgtcacttaatctcttcacacctgttaactacacctatctgcataggaggctccccacatcagtccaggcaacttttttctttgcctggggccatttcttctaaatggaaggagaaaagtctgagcattagaaattgtggcattaatgtctgcaagggctaatggagtgaaaagaatacattattctccttttcttcttagaaaaaaatttcaattgtggatgtaatagaaataccattaaaataatatttctgattgcattgctt

SEQ ID NO: 28506 - DNA, 385 bp, Homo sapiens
gtctcaatgaaattccattgcaccgagtggcatgttaaatgagagctattacaatgtagaaggcaaggcaacaaatttctcctggcttgatcaagactttcctggttttaaaaatgaatatccagcatcctgggaacccccctgtcctgggaaaagcaagagagatggtcattctcatgacagatattgtatcagtggcatggaaacaagtacaatgagagtatgtacaggtgacggagccattctttatgcctcaatagtattgaaagaggcttaacttagtgatacttgagttgagcattgtgcaaactgtaataaacacagtagacaaggacagtaagaggaggccaaagagagaggcaatgtaaacagtcatgaaaaaaaa

SEQ ID NO: 28507 - DNA, 644 bp, Homo sapiens
aaaagtgatagtcacatacttcacatcatcttccttccaaaagtagctctccccattatgcaatacaatttgggtcaatgctctgggccccatttccttgagtttagaaaactattataatttccttataaacatccaaatattctttgcattcataaattgactactactttatctcaaactgaattttctattatcactataatttattgtgtttataaaacatagagtggaaagagctaagcaaaaaggtttccttttcattcttgagatgggcgcttctcaactgggaaggatttaaataacacaaccggaaacctctcatttctaagtcgaattaatagctgaggatggctgaaaaagattatacatatccagaagataaaaagtaaaatgaggccgggcgcggtggctcacacctgtaatcccagcactttgggaggctgaggcaggagaattgcttgaacccgggaagtggaggttgcagtgagccgagatcacaccattgcactccagcctgggcgacaagagcgaaactccctctcaaaaacataaataaataaataaataaataaaaacagatttaggattaacactgtaaccttattgagatggtagaatggcaatataaattaaaacaactc

SEQ ID NO: 28508 - DNA, 304 bp, Homo sapiens
ggacatttaggccatatctagccagatgagaattgaatatgtcaatggttggaacttgaatgtcttggcactgagggccaaagtgctctagtgtcctaggtaaacttgaaaagcagtctaggacataaggactacaattcataggcaactgctagtgctgggcttggctcagagtgagtggattagagtggcatgtgacctagggagacaatagcaaaggcagctaagggagttttcccattaccactcctgcaaccccaggcagtgtatcccactgcaatgaaagtgactccttacttctgct

SEQ ID NO: 28509 - DNA, 401 bp, Homo sapiens
ttgggaacattctaaatcttctcttctagctatttttaaatatgcagtaaattcttattaactatagtcattctactgcgctgtcaaacactagaacttattccacctaactgtatttttgcaccaagctttcttcattcctccctccccactagcctctgatatccaccattctactcactaccttcaagatattaatttccttagctttcacatatgatatttgtcttgctttgcctgacttatttcacttaacagaatgtcctccagtttcatccatgtagttgcaagtgacatacatttattcttatcctgtaaagatgactgagaaaagcatgatttgcaattacaaagacttgtggtaggcagatttctaagatagcctcaaggtttcccaatcc

SEQ ID NO: 28510 - DNA, 722 bp, Homo sapiens
tagaaagcaactggtaaaattctcactgattagatatctggatgagaaaaagttccccacaataaatggaaatttaaaaacctgtgctggctgggcatggtggctcatgcctgtaatcccagagctttgagaggccaggatgggggaatcacttgaggccaggaattccagaccagcctgggcagcatagcaagacccaatctttacaaaatctcagagctctgaaatgccaaagtgggagtatagcttgaggcaaggaattcaagaccagcctgggcaacacaacaagaccccgtccttacaaaatataaaaataaaaaaattaactggtcttggtggtgcacctatagtctcagctacttggaaggctgaggcaggaggattgcttgagcccaggagttcaaggctgtagacttctatgactgagccactgcactccagcctggtgttagagcaagactctgtctctgaaaacaaatctgtgctgtgcatgggtattgaatccaaattttacactatttgcatagtacaggaatctcaaatgaatatattaatgtagatgtcataattacttcaagcaagtaaaactactggagtttccagaagaatcaaatgtaaaacttgtctaaaatgatactaccacatcttaaagtacacaggggtgccacagggaaaaaatactctagctgaaaataagtttacaatgaaaaagaacaaaccaa

SEQ ID NO: 28511 - DNA, 164 bp, Homo sapiens
ttaaattcttactagtcatttaaataaaattagttctttaaaataatacaagcactaagacctacagcagaaataaactagaaacagcatgattacaggaacatccaagcatcatttggcaaactgggtttcagggaagcaaagccttttcagtagtaactaat

SEQ ID NO: 28512 - DNA, 636 bp, Homo sapiens
ttgtagaatttcagtgagcatagtcctgggttaacctgacaacagtcctactgtttattgatgcttataggtgagcctatttctctttctagctttcttccacttaatttactttcttttggaattcttgaatttaataataataatattgatgttattagtcatcactataactttttattgagtatgtattttatgtcagacacagtgtggctaagtgctttacatacattatctcatctaatccttagaaaaaaccctggtgtattagtcttaatttaaaagatgtactttggaaaggttagtagtttacccaagattatgcagctagttaaaagtggtgctggggctgggcttggtggctcacacctgtaatcgcagtgctttgggagtctgaggcaggaggatcgcttgacaccaggagtttaagactaacctgggaaacatagcaagaccccatctttacaaaaaataaaaaaattagccaggagtgggggtgcacacctgtggtcccagctacttgggaggctgaggcaggaggattgcttgagccccagaggttgaggctgcagtgagccatgattatgccactgcacatctgtctgggtgacagagcaagatcctgtctccaaaaaa

SEQ ID NO: 28513 - DNA, 377 bp, Homo sapiens
aaggcctagatctctgaaagtatcttttctaaaaatgcagtgactctgagaggtgggaacctgagttctctccgcagtcttcaaggcattcttctggagggctgagatgttactaagtcaaggggtctgaaatgctgacaaacacagtgaacaaacgtggctttttcacagtgagggaggactatgctgggggccagaagcagacgttcgctactttgtctcacatttacaattctcggatttgcttcaaaacattgcccgaagagtgcctgggctgcagatgtagacaagattaaccatgaattgataaggtagaaactagatgataggcacacaagggttcccttatgaaattgttagaaaagttccatagcaaa

SEQ ID NO: 28514 - DNA, 380 bp, Homo sapiens
cctgtatatgtgtgtatgtggcagggttcattctgacacttgctttttttcatttttcattttcctacctgttagtgaagtagaaggcaagaaaaataagtagtaatgtgtccggaatttattccttctggtaggttcttggtctcgctggcttcaagagtgaagccacagaccctcgtggtgagtgttacagctcttaaaaatggtgtgtctggagtttgttccttcagatgttcagatgtgcccagagtttcttccctcctgtgggtttgtggtctcactcacttctggagtagtgaagccacagacctttgcagtgggtgttacagctcttaaaggtggcacgtctgaagttgtttgttcttcccagtgggttcata

SEQ ID NO: 28515 - DNA, 2328 bp, Homo sapiens
  misc_feature (504)..(504): n is a, c, g, or t
ccaggaatggacacctgcctcagactgggccagtcacattctctactgaaaatctgaaattccaacaaaaggcaacgagttagttgctaccaatatttagcaactacaatgaatgattcgtgtctatgtaattaaattttttaagtgagtaaatttaggggctggtaaaacccaggaagtatgcagtacgtctattcttacattggattaaaaagcaacaaagtgcaaaatggtaaatactcattacctctctcagcccatccccaggcctctcctcctatgccttcccatgagtcagtcattagagggttaatgtttggcacaatggtgactgtacccatcagctcatctgcctcagttctgattaactggtaattgtgctactccagtttttcaacattttgaatattacccccgcctgcttccaaatagtactagaaagtcttgcttcaccctcctctgttgtggaatgatgcatgccaggatgagctcaggttaagacantaattagatctgagattcaactttaccatccacagtcactgaatcacttagaggtggggttagtattaaccccagagcactgaagagacttgtggcttcacttaggccatgagcacacaatctttcacatctgtcctctccagtctacactgcaccacctggtacctggcacagactcttgtcccatctgagtgctcctcgctccagacttttcaatgcattttccatttggctcccaatttaaccatcctgagtgcctcactgattaacctagatggtgctgtggcggaagaaggactccaagaagactggaccttgttatccagtacacctcggcttagattcttgccttgccgctgcactagctgtgcagcctcagacaaattgtgtaattgtaaaaccaggatttcctcttatttaaattggagagattatcatcatcatcacatcatccctttgggcccggatctcctgtaatctgcatgaaatttactgcatattgtttatctgctctgccagagtaaggatattgttatattcatttttgcatcagtgcctcacctgattcttggttaacaataggtctttggtaaataaaattccccccaagttgaatggaatcaagttccaaacactaaagtaagtttcaaatatccaaatgttgaaaatgcaattgatccagatgttttcatatcagtggattatatgccgaattgatttcctccttagaggaaagtcagtagccctgaaactttctacacattcccaacaatttctgtaaaactttcaatgatcttattctctataactagatatgtgggccaagaatcccaacacgtttgccccttaactttgaagctggcaatatgaattaccagggtgacccctcccagtagagcacatgatcagccacagctgtgcatgttttttagtatgactgcactaggatagggctccaagccactgggtggagcaatgtgctctggggagaaagctcatgacatttcccctatgatttcacaaaagaaaaaatctttttcttatgagttgtttctgctcaacgtcaataggaaaggtcatagcttagcgtgtttacatacagatgcatgcatgaatatgtagaatatcagccactcctacggtgtgagagaatttaaattgcactggtcctaagagtgaaggaaagcaggcgtagttgcctactcaacctccactttattcttttccctttataacaatcctaatttcatttgagatgacaatgtatacagctagaagacaatttctcagcctcccttggagagctaggttccagccaatgagatgtaaacagaaatgtatgcaatgttcaagtaggctgcttaaaagaagttgactccacttgaaaggtgtgcttggtttggcctgccttctcccttcctctggttgaatgtcatcttgatgactggagctccaggagccatcctggaatttctgaccttgagggtggaagccacaggctaatatgatagaaggatgaggaagaggctgagtaccagatggctgagaagccactataccagccctagtttcgagtttacactgcttctgtgaaagaaaagtcaatcacaataaaaccttttatcttgtttaaaccaccttaaaaagtcagttttcttttatatgcagcctactaatcctatccaaacaaggcttgaataaggtttactacagctcttttttgttgtaatagcagaaaaattggtaataaatgcccatcaataggaaaataaactattaatttaacaataccaaataaaactgtgcagcagtataaagaatgaa

SEQ ID NO: 28516 - DNA, 233 bp, Homo sapiens
ggtttagggtaaggactgccaagtattacactggcacaataattccagccttctgaaatcaggactagaaaattttcctccataccacactggtgtttcctttgacagcaaccactacctactgaataatgcctaagtccttagcctgctactcaaggccttccaatagtattttccactgttccctatatgggctttaagctttgtctataaagactatgttcttcagttac

SEQ ID NO: 28517 - DNA, 653 bp, Homo sapiens
atgaactggcagagagatggttattagaaaataaaatgcacttagagtcccccatgaatcatttatgggagacaccatgcttagcaaagactatgaaaatatggctgttaagggcaactcaggcactatttctggatgactttcaagcatgaccactagctacaggactgggcctggacacattagaagaatttaggccttcaggatgaaaaggaaaatgtgtgggcagagactgagtccaaggcagtggccttcacaagtcaccctgtgatggtgtccatactgcgaggcatccctcacccgagaaagcaatgttttctgcacgggatgactctggttacatttgcttgttcccgccatgaataaaaggaagagaggtcagctgaagaggcaattaattcaacacaactgagtctacgactaaaggaaaatggacgagcttccccacaggcagtaggagtgcccaccccaggggtccggtttatcaaggaatttcaaagcatcccctgccacgtgcttctgactcctccactacctcgctttggaataagtggttaaaaaagagaaacctctgtttattggactgacggagcaactggacttgttgaggttgcattgctcagggtggctccaggcaagcagacagctgagag

SEQ ID NO: 28518 - DNA, 361 bp, Homo sapiens
gttctgcaggaagtttttgacaaaaactggcaagggtctgaggaaatatacaagagatggagatccccctccccagaggaaatagtagtcacttacagagaaattgtaagacctccttttaaataaaatattaatgaattttcaagggaaatcccttttggaatctggcaaggtcacataacattaaaagcaggtggaaatgaggacacagaattgttcagagaagtagctaaaacagaagcttgagaattgcctatctctacatttggatatccagaaaagcttttgaaaagtaacataaggccaggcacagtggctcacccctgtaatcccagctcttttggaggctgaggcggggatc

SEQ ID NO: 28519 - DNA, 288 bp, Homo sapiens
tctaaggccaacagtgacctgaaattattgactggctggccgtgctaatcaactggagaaaatggttccgaggtcaccaacatcagacaaattcattttaggacctatgtatgtgcttagaaagacagaagtgcttttgtaaaggatactatttcagaaaaacataatcatagtaacaactaatgacgctataaaatgctgatgtgttgaatgctactttagaaaaacatgttcaaatctaggaaaaaatttgatagaaaactatctatctatcggcagggtctcatt

SEQ ID NO: 28520 - DNA, 2681 bp, Homo sapiens
  misc_feature (598)..(598): n is a, c, g, or t
  misc_feature (615)..(615): n is a, c, g, or t
  misc_feature (693)..(693): n is a, c, g, or t
tactgccatttaaaaataggtttttaaaatttagctaagtcttaagtaatttgccgttgctaataattttatctccttgagtcggttgttggggagagatgttatattcaataatttttagttattttgtaatgcagagtgtttattcatttcacagttctgcaatggatgtagtattttgggattgccctgtccagaaaattttcagctacacacctttaaaggaaaatgtttctatctcagatgaaacatgtaatttgggatggttcttcctttgtcacttaaaggaagagataggaaaagtctcttacccactttaaacatgagggtaaaggtttaggtcaaacttactggctttgtcattcaagcatatctgaatcctcacttttttctctttgctttttagggtcagaactgagatattaccaagaaaaggcacaatgccataatattatggtgttatggtattttgacttaaaggggaaaaggtacttaattttggtgggatgttgattgtaccttgttaaaaagactctcattttctcatatgttttctcctaataagatggaatatggagtatactgtaataatataagngttcattataagctatntggattaagaactattgcagagttgtaagcttgttatcaaattaatgcaagacatttaaactatttttttgcaaaacnatttatttttaaaacaacttaaagtatatctagggtgagttaaaagtccctgtgcatctatattagatggcaggttttgtcacagagtcactgtgtattaataataaatgttgaaatggcttctccgtgtctccagaagcatttacatgtcctccttgtgagatcatggtgcacagaggtctttggactgccctgaacccgtcttatgtggacataacctattcccttcgttttctcatcatgccatgtgtttaagatctacccgcttagtgtcaagattattgagattttcatctaaatgtttttaaaattgtattttgtgttttagtggaggacagtcttgatactgttctaattcagaaagccaaattttgatgcgcttttgtatattcataatatatactttaatatgccctattctaatctagtttgaaattgttagattctgatagtataatgataaaatcaaactatttgccaaaaagttaaatttacaagcagaaagatgttttgcgatattttctacttttgtgtagaaagataaccatttggggtaggcagcacaacagaatgtgaaagattggctttatatgatactaacacagtccagttaaaagtggaaacagggaaaagagagagagaaaactcatcatttagtttggtctagacacaatttggttaaattttaggattctattggcagttaacatagatgacatggacacagcctatgagtgctttttaaatacgtgcttctaaaaatctgagctcaaagcaagaaaaagaaaacaggaaagctgtatccatttgccataatagatgaatcagaattgttttctattaaatatttcatcacgaaatatgatggaggccagaagctatttttaggcttactataacactattatgcatttttataaataagaagaaggctgtagaaagtacttgaaaaatatctaattctctttctgtctaaggaaaactctttctacttggtgcaataatctgaaaatttagaaggtcaaaatatgtcacaggaaatgatcatagacctaaaaatagtttttaaggaaaccagctacacggggcaaccaaccatcttgctgttgaagaaaacagttccaaaaggctaaatcattggcataaaggaaacaaaacccaaagtatgcgttgtaattcttgagccagtattactgaaacaggataaaagttataaaatctaacataggttaatgcaatgtctctgctagtgctacaagtctaaaatatctttgtaacaatgctttcagaaatgccagttttaattacatttcacattgtatatgagagatactgctttatgaatgaatcggaataatacattttcatttaaatcttaattgcttttcattaaatgcgaagtcttaatttcaaaatgaaatcacactaccagcaatagacagttttcttgaaaactctaataaggaacaatagccagttccgtaaataactttaaaattctaaaagtgttggtacactagcaatcacaaatatggtttcttttaatacttttttaatcctgtaaagaagggtttttataaacattctttttattaatcagtcataacatggcgaagtgtgtagttgctgtttctgaaaagtgatccaaactctacatccagagattatgaaaaattcttatagaattttgtaacaagtatttacatgttgggtgaaagaaatttcatagtcgttggagtgccatgaaattaatacttgcaattcagattgcggtagtttacactttttctgtatgtttcaaatcaggtgtgtaccatttgtactgagaacaccacagaatgaattatccaaagtccattgattttaatacgtgttttggtttgtaaacaaattatagtaatttcttgcacatttttggaaattaattgtataagaatttatgtatctgcttctagatacagtgtgtaaataaaaaatttcgttcacaa

SEQ ID NO: 28521 - DNA, 450 bp, Homo sapiens
ccagtccaggctgtgaatgttgggcagttgctggccgtaaatgccgaggaggacgcctggttacgggcacaggtcatctcaacagaagagaacaaaataaaggtatgctatgttgactatggttttagtgaaaatgttgaaaaaagcaaagcatacaaattaaacccgaagttttgttcactctcatttcaagctacaaaatgtaagcttgcaggcttggaagtcctaagcgatgaccctgatctagtgaaggtggttgaatctttaacttgtggaaagatctttgcagtggaaatacttgacaaagctgacattccacttgttgttctgtacgatacctcaggagaagatgatatcaatatcaatgccacctgcttgaaggctatatgtgacaagtcactagaggttcacctgcaggtaccactgtgatcactgttgttgcttgttaca

SEQ ID NO: 28522 - DNA, 3454 bp, Homo sapiens
ccagtccaggctgtgaatgttgggcagttgctggccgtaaatgccgaggaggacgcctggttacgggcacaggtcatctcaacagaagagaacaaaataaaggtatgctatgttgactatggttttagtgaaaatgttgaaaaaagcaaagcatacaaattaaacccgaagttttgttcactctcatttcaagctacaaaatgtaagcttgcaggcttggaagtcctaagcgatgaccctgatctagtgaaggtggttgaatctttaacttgtggaaagatctttgcagtggaaatacttgacaaagctgacattccacttgttgttctgtacgatacctcaggagaagatgatatcaatatcaatgccacctgcttgaaggctatatgtgacaagtcactagaggttcacctgcaggttgacgccatgtacacaaatgtcaaagtaactaatatttgctctgatgggacactctactgccaggtgccttgtaagggtctgaacaagctcagtgaccttctacgtaagatagaggactacttccattgcaagcacatgacctctgagtgctttgtttcattacccttctgtgggaaaatctgcctcttccattgcaaaggaaaatggttacgagtagagatcacaaatgttcacagcagccgggctcttgatgttcagttcctggactctggcactgtgacatctgtaaaagtgtcagagctcagggaaattccacctcggtttctacaagaaatgattgcaataccacctcaggccattaagtgctgtttagcagatcttccacaatctattggcatgtggacaccagatgcagtgctgtggttaagagattctgttttgaattgctcggactgtagcattaaggttacaaaagtggatgaaaccagagggatcgcacatgtttatttatttacccctaagaacttccctgaccctcatcgcagtattaatcgccagattacaaatgcagacttgtggaagcatcagaaggatgtgtttttgagtgccatatccagtggagctgactctcccaacagcaaaaatggcaacatgcccatgtcgggcaacactggagagaatttcagaaagaacctcacagatgtcatcaaaaagtccatggtggaccatacgagcgctttctccacagaggaactgccacctcctgtccacttatcaaagccaggggaacacatggatgtgtatgtgcctgtggcctgtcacccaggctacttcgtcatccagccttggcaggagatacataagttggaagttctgatggaagagatgattctatattacagcgtgtctgaagagcgccacatagcagtggagaaagaccaagtgtatgctgcaaaagtggaaaataagtggcacagggtgcttttaaaaggaatcctgaccaatggactggtatctgtgtatgagctggattatggcaaacacgaattagtcaacataagaaaagtacagcccctagtggacatgttccgaaagctgcccttccaagcagtcacagctcaacttgcaggagtgaagtgcaaccagtggtctgaggaggcttctatggtgtttcgaaatcatgtggagaagaaacctctggtggcactggtgcagacagtcattgaaaatgctaacccttgggaccggaaagtagtggtctacttagtggacacatcgttgccagacaccgatacctggattcatgattttatgtcagagtatctgatagagctttcaaaagttaattaatgactgcctctgaaaccttgacaactaattcagattttttagcaataacaaaatgtagtaggcttaaaaaaaatcttaactctgctacatggctctgactgctgtgggggattgaaaagaatatgcttatgtttgatgaaagatatttaacaagttttgttttaacagagttgacttttcaaagaaaattgtacttgaattattactataatattagaataaaaatgtttatcaatataaaaaaaaaaaaaaaaaaactcgagactagttctctcgcgagagggaggcgccatcactcggcctgtaccacccacaacgaggacctaggttgtccttagcatgaggacatcaacctctcaagaacagaggtcagtgccttcctgcgccaaggtccctgcgtttccacaagtccttggtcaggtacctggtcctaacaggctgccatggaacaaatcagagcctcactgactcaccattctgctcctaatgaggctacaagaaaaaaaaccagaggagagaaagcagagcttattacaatcaggaaagagcatgaggttctggcagctgcacttggtctcagctaaagaaggcaatgacctcatacgatagcatgggaaacaaaaatcaagcagacgaaccacattgcaggtgatagatacgcgacgtgcacctggtggggcagcctggggaagtgaggtgatgtgccctactttaaaacagatcgaccagctgggctcctgggattcagatatgaaccagcagtcctctactaaaagtttctttctgcagcgatgggaaaattcagccattgctctgtttcttccaacaagtgaagtccattacagcctaatgtctcaatcttttagttctagctctaaggcctcaggttcaatggctgctgtccctttaaacccttcatttgtcctaaatgtttcaaatagctgcccccaaatgcacgtgtgttaaagatggaagctctaggtcggggtctgagagacagcttgacacttggtagaatacatagactactgtgtctcaaagtgtgttccatggaacattaactccagacctgttcctggagaagagaaaatcctttgtatctgagggggaaacattaccataaccttcctttggggaattcatgtgtgtattagcatattaaaggctctcataaggcctgcaatgcagaaatctatttaagttttatctgtttaacccaatgtttcccttaattccagaacattttctttgttcataacacctgttaacacctcctgaaagtgttcacgtagtagacttatctgagaaaagcaatttttgagccgttaaagcttctagattggacaaactaggcaattaatgatactagatcaattcagaatgcaatttgagcctcttccccctgggaaacaaagtgaaaagagtggatctcatggaattaggggagaagtagacccagaattcatggggggtgggtggctgtgaacaggacctgcagaagaggctcggctgtgaatatttccaaggccccttgacctgtgagattctgtagtgaacggttccagctttggccagcttaacaatgtgctgggccccaaggtcttgagagcattgccttttcttccattgaaataagttcgcttgtttgggaccattcaaaggatcaaaataaaatttacttacc

SEQ ID NO: 28523 - DNA, 2012 bp, Homo sapiens
ccagtccaggctgtgaatgttgggcagttgctggccgtaaatgccgaggaggacgcctggttacgggcacaggtcatctcaacagaagagaacaaaataaaggtatgctatgttgactatggttttagtgaaaatgttgaaaaaagcaaagcatacaaattaaacccgaagttttgttcactctcatttcaagctacaaaatgtaagcttgcaggcttggaagtcctaagcgatgaccctgatctagtgaaggtggttgaatctttaacttgtggaaagatctttgcagtggaaatacttgacaaagctgacattccacttgttgttctgtacgatacctcaggagaagatgatatcaatatcaatgccacctgcttgaaggctatatgtgacaagtcactagaggttcacctgcaggttgacgccatgtacacaaatgtcaaagtaactaatatttgctctgatgggacactctactgccaggtgccttgtaagggtctgaacaagctcagtgaccttctacgtaagatagaggactacttccattgcaagcacatgacctctgagtgctttgtttcattacccttctgtgggaaaatctgcctcttccattgcaaaggaaaatggttacgagtagagatcacaaatgttcacagcagccgggctcttgatgttcagttcctggactctggcactgtgacatctgtaaaagtgtcagagctcagggaaattccacctcggtttctacaagaaatgattgcaataccacctcaggccattaagtgctgtttagcagatcttccacaatctattggcatgtggacaccagatgcagtgctgtggttaagagattctgttttgaattgctcggactgtagcattaaggttacaaaagtggatgaaaccagagggatcgcacatgtttatttatttacccctaagaacttccctgaccctcatcgcagtattaatcgccagattacaaatgcagacttgtggaagcatcagaaggatgtgtttttgagtgccatatccagtggagctgactctcccaacagcaaaaatggcaacatgcccatgtcgggcaacactggagagaatttcagaaagaacctcacagatgtcatcaaaaagtccatggtggaccatacgagcgctttctccacagaggaactgccacctcctgtccacttatcaaagccaggggaacacatggatgtgtatgtgcctgtggcctgtcacccaggctacttcgtcatccagccttggcaggagatacataagttggaagttctgatggaagagatgattctatattacagcgtgtctgaagagcgccacatagcagtggagaaagaccaagtgtatgctgcaaaagtggaaaataagtggcacagggtgcttttaaaaggaatcctgaccaatggactggtatctgtgtatgagctggattatggcaaacacgaattagtcaacataagaaaagtacagcccctagtggacatgttccgaaagctgcccttccaagcagtcacagctcaacttgcaggagtgaagtgcaaccagtggtctgaggaggcttctatggtgtttcgaaatcatgtggagaagaaacctctggtggcactggtgcagacagtcattgaaaatgctaacccttgggaccggaaagtagtggtctacttagtggacacatcgttgccagacaccgatacctggattcatgattttatgtcagagtatctgatagagctttcaaaagttaattaatgactgcctctgaaaccttgacaactaattcagattttttagcaataacaaaatgtagtaggcttaaaaaaaatcttaactctgctacatggctctgactgctgtgggggattgaaaagaatatgcttatgtttgatgaaagatatttaacaagttttgttttaacagagttgacttttcaaagaaaattgtacttgaattattactataatattagaataaaaatgtttatcaatataaaa

SEQ ID NO: 28524 - DNA, 338 bp, Homo sapiens
gggacagttattgagaataatcttgggtcggtgaaagatgtgatgtcgaaatggtgtttagtgggaggacacagatgtatccaaatcctaaactagaccagctgtgagacacaagttgggttaaacggagaagctgatagatttttattttgatgggggtacagtggggagagagggcagccagtggcgggacacaggatgctgagcactgtgcttgcctgggctcacccctcctcccaggtaggtctccagagaggtggatgaccaagaagatgctatgatatggaggctcttcctaggccaggtaacatcgagtgcccagagtgaaagagggccag

SEQ ID NO: 28525 - DNA, 596 bp, Homo sapiens
agtcaataattttccctccagttaatcactattctgacttacatcactgtgtctcacatttgcctattcttgaacttcatttaaatggaactataccttatgtctcatttgtgtctggcttctttaattcaacattatgttgacctgaaagttttaaagggtgaaattgttgaatatgtcacctgtctgcaaatagcaacttggtagaggactggcaaactgcctttcatccataaattcatccataaatccattatggaaaatctatccataaagataaatgaccatctttatgtggggttcttcaggaaaccttaagaaattcagcctagtaaaacctatttgtgtgcctggcaggctgctgagattcagtggtaaactgtcaggcaatatagttgtttttcaaaagaaatcaatctgactaaactaatgagagttctttcaaggaactaagtaaaagaaagcttctatttttttaacacatttttagaaaacttttctcaaaataaaaataactgttacagaatcaatacgtattactgtaagaaaaaattttcagaatatacttctgagtcctgagaggcataaaaaaaaaa

SEQ ID NO: 28526 - DNA, 354 bp, Homo sapiens
gtgaatatctggaactgttccctcaccacgaggattcctcatgctaccttttaataaccacactcctggccaggcgcggtggctcacgcctgtaatcccagcactttgggaggccgaggagggcagatcacgaggtcaggagatcgagaccatcctggctaacacggtgaaaccctgtctctattaaaaatacaaaaaattagccaggcgtggtggcggacgcctgtagtcctagttactcgggaggctgaggcaggagaatggcgtgaacccgggaggtggagcttgcagtgagccgagatcacgccactgccctccagcctgcacgacagagcgagacttcatctcaaaaaa

SEQ ID NO: 28527 - DNA, 329 bp, Homo sapiens
taaatttcaacaaatatctaatatgtaaaaaaagactacttggggagtataaaaacatagtggaacaagggtactggtcataatagtagatgagatgggcagagttcgggcatttgggcattttagggcaaagggtggcaatattaattaactctagaatttattaaatcgagtatgcttatgaaaaattataaaaagttaatcacataagaagagaaatagtatgcatgacttccaaaccagtagagagaacaccacagaatatatatttctatttttattttattttttgagaccaagtctggctctgttgcccaggctggagtgca

SEQ ID NO: 28528 - DNA, 387 bp, Homo sapiens
atgtctgggcgtggtaagcagggaggcaaagctcgcgccaaggccaagacccgctcttctcgggccgggcttcagtttcccgtaggccgagtgcatcgcctgctccgcaaaggcaactatgcggagcgggtcggtgctggagcgccggtgtacctggcggcggtgctggagtacctgaccgccgagatcctggagctggctggcaacgcggcccgcgacaacaagaagactcgcatcatcccgcgtcacctccagctggccatccgcaacgatgaggagctcaacaagcttctgggcaaagtcaccatcgcacagggtggcgtcctgcccaacatccaggccgtgctgctgccaaagaaaactgagagccaccacaagactaagtaa

SEQ ID NO: 28529 - DNA, 352 bp, Homo sapiens
gcactctctcacacacacacacacacacacacacacacacacacacacaccagccccagccactctaacttcccttccccctccactttggcctttttgtcccagtaccacttcaccctaggcccttcgctgcctagtatggtcttctctaagagctgcatggcttactcccttgcctccatggatgtgttgctcaaatgttatcttctctatgaggcctaccctggccaccctattcaaaattgtaactcctcttcccttaagctctgattcccccttatcctacgtcatttctccctagagcagttatcaccttctaacttactatatactttatttattatatttattg

SEQ ID NO: 28530 - DNA, 1025 bp, Homo sapiens
gaagagaagagcttatattctgtgagagcttcactggagagcacattttctgaacacttcctaataacgtgacttctcatcagtacaagaaaaaccaccccctggtgtttcagaacagttgttgagagggaaaacagaagtggagtatttttgtcttcagctgttcatgcatattcttactttctctctagatgtctattactgcatacacagagaataaagtgtgccaatctgacttcctaactctaattgcaatcaggttgaaatgatgagtgattcttggtccccgttcttcagaggaggtacatatggcaggttgatcaatgtttaaatggaaacgtgatctgttatatagtgagcccagcagtgaaactctcttgttagcacattcatttgtgtgtgtgtgggtcggtgggggccggattctaccttatatttttcccatactgtatttatcttctcattataaatatttctaaaataaaaatagaacaatatttctttgatttcttttgcatgattattgataagactggcattatcaaagaagaaagcacatcagtgttaacaagggagaatcggatttaaattatggcaaatttgagaagaaatgtgtaagttttagtagaaagagttagtaaaaaacatacagaaatacaaaaggattgacattattttcaccacaataatggagagtcagggtgttccatcttaggatcatggaattgtaattgaaaaaaaacatgtaaacaaaatggtcattagaggtagtgtccttagtgtgctctatattgggaggtctgaaggaggaatgagaatgaggtttgcgcctcatacaaaatatgagatcatagagggagaatttgagttatttataaaagttaattttaatctctgtgctagatggtggctctgaaaaatgcagacacattgcttctattctggttaaactaagataggtaataactgttacacttatacatcatgtttctcattcgtcattgttgcttggggaaaaaaaagca

SEQ ID NO: 28531 - DNA, 341 bp, Homo sapiens
ttgggtgtaaccttactgtctcggttcagttctgaaatctctgtgcggctccttctgtcttggtcttcgctgagacgcccaccctgtgcctcttcacttgtttcaagcgtgcctgtcattggtcactggcgcatctttgtggcggctgccctaagtctgtggcgggattccaatgtccaggccatctcagtgttgacattatggcttgtttttcttcattcaggttgagctattcttggttcttagtataaaaagtgatttccttgaaaccaggacgctctgagtgtttcatcgcgagactctgactcttgctcaatcctgtgttgtggcaggcctccttt

SEQ ID NO: 28532 - DNA, 398 bp, Homo sapiens
gtgatggttgccttcatgtcactttgctaatacagttgtttggaggagagaaagcagcttttatatattgtttattgaaaaaaaaaaatccatcttaagcactaaggaactctgggaaaaatggttacaaaatgtgtttacttaaatattgtgaaacgaggatggaaattcgcagtgcagggtatttgtcatctgctcatgactagcagatggccgcctcctcctcatcctcctttgcgagccgagtgactcacatcttacagggtgtgcaaaatgaaatttcgaaactctccagagtagaggtggcagtgccataactccatgcaggaggagtgtgccagccagattactttgccagccagcatgctgccaaaacttcacaaaatgtctctcattgg

SEQ ID NO: 28533 - DNA, 633 bp, Homo sapiens
  misc_feature (371)..(371): n is a, c, g, or t
cggcaaccttctcccagctttgtgaggtggagcccaacctccagaccaagagaggccttcctgaccttcaaccccatctccagagctccccagagctggtctagcccctcatctgacacacagagaaacggagaccaggaacctgacgctggtttccctagcccatgtgaggaccctgtagaccagctacatgcacacccagtccagccgccggacagcgttcagtggggaagagagcagaccatcgtccacccacattccagactccaactggcagaggggaggggacgttggggctgcagggccactaatgtggacggggacagagccccaggggacagcctgtgctgggggacgtatgggggcaggantcagaccccacagtgcctgcgggccacaaggccaagacaggatctggtaagtgacgatttggaggctggtcctgaggtgcaagagggagtgcccagggacagagagggcaccggggtgactacagtccctccagactcacatctacccgcacctgtgggtggggccttatttgcatacagggtctttgcacacgtggttggttacaatgaggatgctggagggggtggtctgtgtccctgttaacaactcatgtccttaaga

SEQ ID NO: 28534 - DNA, 250 bp, Homo sapiens
tgggatttcaggtgtgagccaccacacctggcctttactatatttttgagggttgttccttttttttctttttagtggttgctctaaggtttacaccttatcagaatcaactgataagttcctatttatactagtttaattccagtgatacaggtatagaaaagttattcttatgtcattctattcccttttccatctttgtgtggtatatttgttgtacatattacatctaataatgttacaaaccatt

SEQ ID NO: 28535 - DNA, 485 bp, Homo sapiens
tgtaagatgagattagtgcctaccttatcatgctattgcttggattaaagctatctggcatatcccaaatttttagtaggtggagatggtggtactggtatatgtagtataccttccaagcacacattcaggcagtgggcaggtagggaaggtgggcaacttgccgcagcagagaggaggaagaagttcagaccgttgggtaggataagtggatccaacccctttgtagggcaggtggtggagtgggcagataaagagccaagccctagtttgagtgacactgtggggattcaagaagacttttgtcacgtgtgtagtgcagtgactagctcttacctctggttcagtactaaccatgctaacagacctgcagagtaccagcttgtgggtgattatgtaccaaacacttgtatcacgtttattgaacagtatgctctaagtcactttgaaatgaataggatgaataaaggtaagggaatttataa

SEQ ID NO: 28536 - DNA, 381 bp, Homo sapiens
tttgtcattacctaaagatggcttttaagcatgtaggttggtgacatcaagttctttggaaaggtatatattttttgcctttttaacttatgtatactttcctttttaactctgtgtcagtcaggataaattttttagcctgggcaacatagtaagatcccatctttacaaaaaaatgaaaaaattagcaaggtgtgatggcatgttcctgtgcgctcagctacttgggagtcctcagactcccaaggactcttgggaggatcacttgagcctgggaggtcaaggctgcgatgagctgtggttatgccactgcactacagcctgggcaatagaatgagaccctgtctcaacaacaacgacaacgacaacaacaacaacaac

SEQ ID NO: 28537 - DNA, 533 bp, Homo sapiens
ttttcaaacactttggaagcggggggggggagattcccttaattccggagggttagggttaaaataacccttttttttccccccccccttaagcttaaggccaaaaatgggccccttttcccaaaaaaaaaaaaaaaaaaaaaaaaaaggaatcagtttggtcaaatattgctgaatcagcttggtcaaatactgctgacaggtgaagtaagacaaaggtagaattggtcattacatatcatgtggcagttattggtgaccttaatgaacaatttcagtgaaatgctgagtgtagaagcctaattggagtggatttgaagagaccaggtctctagacgttgagcatcagtggttgctgatatcacagagatactcagatatattgtgctccatgatgaaaaaacgttatcctctatgaagtgatcttaccagagaagaggagaatcgcttgaacccaggaggtggaggttgcagcgagccaaaatcgcgccattgcactccatcctgggcaacaggatgagactctgaaaaaa

SEQ ID NO: 28538 - DNA, 338 bp, Homo sapiens
tgaaaccctatctctactaaaaatacaaaaattagctggactcagtggcacgtacctataatcccagctacttgggaggctgaggcaggagaattgcttgaacctggggggcggagcttgcagtgagccaagatcgcgccagtgcactcctgcctgggtgacagagtgagactccatctcaaaaaacaaacaaacaaacaaacaaacaaacaaaaagagattctgcttgagtctttccattcttaaacatgattaatgtacgaaatatacaaaaaatgtacaaaatgcacataaatgtacagacaataaaaaattaaaaataaaaaatgataatccat

SEQ ID NO: 28539 - DNA, 793 bp, Homo sapiens
ggagctctttgaataattatttaaaagaaacgtaaccttgataatctctgaatcacacaaaggacttgaaaaattaaagcattaaaaaacaagtaatagccactactacatagtggtgtcagtcctagtagcagtaactcctgtcttagatgttgattttctgtggggattttttgttattttttttaaacattattaattttaattagttaatttttatttataattgacacataataattgtacatatttataccctaagggtgattatacattgtataatcaaatcagggtaattaccatatctatctctttaaacattcatcatttctttctggtaacaacattcaaaatctggcaacattgttatttgctatagccaccctgctacgtaatgtgaatcaagggctttttgttcatgctatttgacccttgtttttattactgtatttcctaaagatataaatatggacacataattatatacagaattgtttagtgcaaaaaaaaaaaaaaaaaaaaaaaaaaaaaatttggggggggcttgggccccggaaaaccttcataaaccacttgcggtggggcggcgggggccccacggggtacgcgcgacactgggcacacacggccccaaaaggaaaccccgggacaaggacaaggggcgggggttctctcaccaaataaaaaagcgcccggggggaccaccgagcgcgccggaaccaaccccaagaagggggcccggacggccaaaggggaccccacacccgaggtccaaggagaggcgaaataactc

SEQ ID NO: 28540 - DNA, 664 bp, Homo sapiens
agtagctgagaaaggatttcaattcgaacatactaattcctaagtttacgtattctagaccacagtactaaggtgatttcctagccagagtgtgcaatagaatcatctgtagaacacatctcattgctttgtgcacctcattctgacaaattccccttgaagacaaatcagaattgggaaaggcccacaggttactttcctttccttgagaaccactaggtgagaagacttctgtggtgatgtcaaattacatttcatattacagatatgaacatagcgtgatcctgatgtgtgatagttacagatagatcactagctagtagatcagaataaccccataatattttcatttgagtaacattttaacatgtactaagttgtgttacctacactacagctgtatcagtggagagagggattgtagtgtaactttttccaaatgagtgaattaagactgaaattcatgagtctactaagaatgaatttatgaaaacataagtctgctgatctttttgaccacttctttctggaatggcatgggttttagcttatgcaccaacttcagtggcttggaaggcaggattgggtagtacagttgaccgttggacaacacaggtttgaactgcagaggtctacttacatgcagattttcttctgcttctgc

SEQ ID NO: 28541 - DNA, 1366 bp, Homo sapiens
  misc_feature (1)..(1): n is a, c, g, or t
  misc_feature (6)..(7): n is a, c, g, or t
  misc_feature (10)..(10): n is a, c, g, or t
  misc_feature (113)..(113): n is a, c, g, or t
  misc_feature (243)..(243): n is a, c, g, or t
  misc_feature (1017)..(1017): n is a, c, g, or t
  misc_feature (1147)..(1148): n is a, c, g, or t
  misc_feature (1184)..(1184): n is a, c, g, or t
ngatgnnacncgactccagttctggctgcccgcgggcctctttccaaccagccaggcctcacagagcaaggcatccccactggagagaattcgatctgatgtttcataaagcnctttatttaaggagaaggggcatggtctgtctccagtctgtctgcagatcagattgtagcggcaaagaaaacaaaggagataacaattgtaatcataatgaccctctttatgaaaactcatcttgatgtnctccaaatcaaaacaacaattcaggcaatattcaagcaatggccaaaatcatccaggccattaaatcatccaggccattgttttacaaaattcctaaggtctgatcaggcttcggacttgggcctagctgggtcaagagaacctgaaatgctgttgtcaagagactctgaaatcaccagtttaatcaggacagctaatctctacatccttgacctctcttttgggagagactttcttgagagaggacactacaggactcagctacagagctctgctatacatgggtgggagtggaggccgccaccccacctggaactgtgagtgaaaactctagtaatgatcttgaggggtgaagggaggtaggtggggtgtgggtgatgagggaggccaaaccccaatctggaaggatctgtcactgaaacaattgcttggtcgagacctctaatttttcttcctctccagccagtctcctgtggctccctggtgctgggtttctggcctttggtgacatcctaacagaagggtctggaagcagggaccccagacaccttgctccctctcccaaatcacacccaaaacatactggggtgaacactgtctccgaagagtttaattgagtcgttgacaaatctccgtttctttctcttccgttgatcgtttgactcgtgaatgtcacacggtccggaacacgactattgtactaatagtgtacttataaattaaattaggactgttattgtaatagcttagtgttacactcccggtgccggaatnctgaccccagggccgatcgtgtagagcctatggtgtatcttaatcgaaacccgtggcccaaacatctcagccaggaacctgggactttaggtgtcattaactcttcacacctgttaactacacctatctnnataggggctccacatcagtcaggcaacttttcttcntgggcattctctaatgagagaagtctgagattagaaatttgcggattaatgtctcgaagggctaatggagtgaaaagatacattgattgctggcttttcttcttagaaaaaaatttcaattgtggatgtaatagaaataccattaaaataatatttctgggtagcagtcgacagatgaattc

SEQ ID NO: 28542 - DNA, 316 bp, Homo sapiens
acaccattttcaatgtagatcatgagaagttaacaataatattagaaaccctacagtcaccctgcccagtgtggtagcaggtatccccaagtggctatttatatttaaattatttaaaattaaacgtaattgcatacccagttccttcagttgcccgagtcacatgtcaagtgctcaacagctacaggtggccagtgcctgccatactggacagtgtggatacagcgcattccatcatttctggaatttctaacaaaaagtactgtactaaacaaactacttaaaaaaaggtagcactaataacgcaatagtaatt

SEQ ID NO: 28543 - DNA, 2432 bp, Homo sapiens
ctcatgggccagtttggaaaaagattactgagttggagccgtctcaaatttgcagggagggacggggtggggggtggggggaccccggttgtgcagtttgatattgagggagcccccacctactcgctggggctgcgtaatctggacgtttccaaactgaagcgaaggcgtcgggagactaggcctcagagaaccatggctactgccaagggaatcgccataggcatcgacctgggcaccacctactcctgtgtgggggtgttccagcacggcaaggtggagatcatcgccaacgaccagggcaaccgcaccacccccagctacgtggccttcacagacaccgagcggctcattggggatgcggccaagaaccaggtagcaatgaatccccagaacactgtttttgatgctaaacgtctgatcggcaggaaatttaatgatcctgttgtacaagcagatatgaaactttggccttttcaagtgattaatgaaggaggcaagcccaaagtccttgtgtcctacaaaggggagaataaagctttctaccctgaggaaatctcttcgatggtattgactaagttgaaggagactgctgaggcctttttgggccaccctgtcaccaatgcagtgattaccgtgccagcctatttcaatgactctcaacgtcaggctactaaggatgcaggtgtgattgctggacttaatgtgctaagaatcatcaatgagcccacggctgctgccattgcctatggtttagataaaggaggtcaaggagaacgacatgtcctgatttttgatctgggtggaggcacatttgatgtgtcaattctgaccatagatgatgggatttttgaggtaaaggccactgctggggacactcacctgggtggggaggactttgacaacaggcttgtgagccacttcgtggaggagttcaagaggaaacacaaaaaggacatcagccagaacaagcgagccgtgaggcggctgcgcaccgcctgcgagagggccaagaggaccctgtcgtccagcacccaggccaacctagaaattgattcactttatgaaggcattgacttctatacatccatcaccagagctcgatttgaagagttgtgtgcagacctgtttaggggtaccctggagcctgtagaaaaagcgcttcgggatgccaagatggataaggctaaaatccatgacattgttttagtagggggctccacccgcatccccaaggtgcagcggctgcttcaggactacttcaatggacgtgatctcaacaagagcatcaaccctgatgaggccgtagcatatggggctgcggtacaagcagccatcctgatgggggacaagtctgagaaggtacaggacctgctgctgctggacgtggctcccctgtccctggggctggagacggctgggggcgtgatgactgccctgataaagcgcaactccaccatccccaccaagcagacacagattttcaccacctactctgacaaccaacccggggtgctgatccaggtgtatgagggcgagagggccatgacaaaggacaacaacctgctggggcggtttgacctgactggaatccctccagcacccaggggagttcctcagatcgaggtgacgtttgacattgatgccaatggtattctcaatgtcacagccatggacaagagcaccggcaaggtgaacaagatcaccatcaccaatgacaagggccgcctgagcaaggaggagattgagcgcatggttctggatgctgagaaatataaagctgaagatgaggtccagagggagaaaattgctgcaaagaatgccttagaatcctatgcttttaacatgaagagtgttgtgagtgatgaaggtttgaagggcaagattagtgagtctgataaaaataaaatattggataaatgcaacgagctcctttcgtggctggaggtcaatcaactggcagagaaagatgagtttgatcataagagaaaggaattggagcagatgtgtaaccctatcatcacaaaactctaccaaggaggatgcactgggcctgcctgcggaacagggtatgtgcctggaaggcctgccacaggccccacaattgaagaagtagattaattctttttagaactgaagcatcctaggatgcctctacatgtatttcattcccctcatcttcaaacatcattattattcttgaccagacctgaatctaagttaccatcccttggaaattctggagaaggagtctcatgcaccacctatcacactccctcacatcctgtttctgactttggaatggactcaggaaaactaggcccctctttaaaccgtgtgatgtatttgaatgtctgttatttccagccaccctaacattcttcttcctgtgtggatgcttatttgtcaatcagtaaatttgttcgtaaaga

SEQ ID NO: 28544 - DNA, 2557 bp, Homo sapiens
ctcatgggccagtttggaaaaagattactgagttggagccgtctcaaatttgcagggagggacggggtggggggtggggggaccccggttgtgcagtttgatattgagggagcccccacctactcgctggggctgcgtaatctggacgtttccaaactgaagcgaaggcgtcgggagactaggcctcagagaaccatggctactgccaagggaatcgccataggcatcgacctgggcaccacctactcctgtgtgggggtgttccagcacggcaaggtggagatcatcgccaacgaccagggcaaccgcaccacccccagctacgtggccttcacagacaccgagcggctcattggggatgcggccaagaaccaggtagcaatgaatccccagaacactgtttttgatgctaaacgtctgatcggcaggaaatttaatgatcctgttgtacaagcagatatgaaactttggccttttcaagtgattaatgaaggaggcaagcccaaagtccttgtgtcctacaaaggggagaataaagctttctaccctgaggaaatctcttcgatggtattgactaagttgaaggagactgctgaggcctttttgggccaccctgtcaccaatgcagtgattaccgtgccagcctatttcaatgactctcaacgtcaggctactaaggatgcaggtgtgattgctggacttaatgtgctaagaatcatcaatgagcccacggctgctgccattgcctatggtttagataaaggaggtcaaggagaacgacatgtcctgatttttgatctgggtggaggcacatttgatgtgtcaattctgaccatagatgatgggatttttgaggtaaaggccactgctggggacactcacctgggtggggaggactttgacaacaggcttgtgagccacttcgtggaggagttcaagaggaaacacaaaaaggacatcagccagaacaagcgagccgtgaggcggctgcgcaccgcctgcgagagggccaagaggaccctgtcgtccagcacccaggccaacctagaaattgattcactttatgaaggcattgacttctatacatccatcaccagagctcgatttgaagagttgtgtgcagacctgtttaggggtaccctggagcctgtagaaaaagcgcttcgggatgccaagatggataaggctaaaatccatgacattgttttagtagggggctccacccgcatccccaaggtgcagcggctgcttcaggactacttcaatggacgtgatctcaacaagagcatcaaccctgatgaggccgtagcatatggggctgcggtacaagcagccatcctgatgggggacaagtctgagaaggtacaggacctgctgctgctggacgtggctcccctgtccctggggctggagacggctgggggcgtgatgactgccctgataaagcgcaactccaccatccccaccaagcagacacagattttcaccacctactctgacaaccaacccggggtgctgatccaggtgtatgagggcgagagggccatgacaaaggacaacaacctgctggggcggtttgacctgactggaatccctccagcacccaggggagttcctcagatcgaggtgacgtttgacattgatgccaatggtattctcaatgtcacagccatggacaagagcaccggcaaggtgaacaagatcaccatcaccaatgacaagggccgcctgagcaaggaggagattgagcgcatggttctggatgctgagaaatataaagctgaagatgaggtccagagggagaaaattgctgcaaagaatgccttagaatcctatgcttttaacatgaagagtgttgtgagtgatgaaggtttgaagggcaagattagtgagtctgataaaaataaaatattggataaatgcaacgagctcctttcgtggctggaggtcaatcaactggcagagaaagatgagtttgatcataagagaaaggaattggagcagatgtgtaaccctatcatcacaaaactctaccaaggaggatgcactgggcctgcctgcggaacagggtatgtgcctggaaggcctgccacaggccccacaattgaagaagtagattaattctttttagaactgaagcatcctaggatgcctctacatgtatttcattcccctcatcttcaaacatcattattattcttgaccagacctgaatctaagttaccatcccttggaaattctggagaaggagtctcatgcaccacctatcacactccctcacatcctgtttctgactttggaatggactcaggaaaactaggcccctctttaaaccgtgtgatgtatttgaatgtctgttatttccagccaccctaacattcttcttcctgtgtggatgcttatttgtcaatcagtaaatttgttcgtaaagaaaattacttctggtatttaggctgtgaatgtaccttgaaggggagagttcatggagagagcatgtgttctctgattgtgaggtcactgtgaatgattaaattggtaagggtaaagtaaaaaaaaa

SEQ ID NO: 28545 - DNA, 447 bp, Homo sapiens
ctaggccccccttagaaaaaataactgttgcccaaagttggtgcagggaaagtacccagatgggtgtaggcccatccttggctatgcccagaaagtaaggaagggatggaagaaaaatagggacgtccttgaagaatacaggatcaggagtggaggtttggggcataaaacaatgatagaaatgaatgatcatccatagaataaaataagaattcatgagtccatactgataaaaatcaataaatggaaaatgaaactgtcttaccttagtgtaatataaagtgataaatgtagaatcgtgaaattagaagatcaccaccaagaaaaccatcaggcaagagtcaccactagaggctacaaaactagtgggtgaaattctgaggaaaagcataatttttttttaaagtatctccctacaagatacttaaaactacaaaggaaaaaaaa

SEQ ID NO: 28546 - DNA, 1101 bp, Homo sapiens
atggatttcttaaattcatctgatcaaaacttgacctcagaggaactgttaaacagaatgccatccaaaattctggtgtccctcactctgtctgggctggcactgatgacaacaactatcaactcccttgtgatcgctgcaattattgtgacccggaagctgcaccatccagccaattatttaatttgttcccttgcagtcacagattttcttgtggctgtcctggtgatgcccttcagcattgtgtatattgtgagagagagctggattatggggcaagtggtctgtgacatttggctgagtgttgacattacctgctgcacgtgctccatcttgcatctctcagctatagctttggatcggtatcgagcaatcacagatgctgttgagtatgccaggaaaaggactccaaagcatgctggcattatgattacaatagtttggattatatctgtttttatctctatgcctcctctattctggaggcaccaaggaactagcagagatgatgaatgcatcatcaagcacgaccacattgtttccaccatttactcaacatttggagctttctacatcccactggcattgattttgatcctttactacaaaatatatagagcagcaaagacattataccacaagagacaagcaagtaggattgcaaaggaggaggtgaatggccaagtccttttggagagtggtgagaaaagcactaaatcagtttccacatcctatgtactagaaaagtctttatctgacccatcaacagactttgataaaattcatagcacagtgagaagtctcaggtctgaattcaagcatgagaaatcttggagaaggcaaaagatctcaggtacaagagaacggaaagcagccactaccctgggattaatcttgggtgcatttgtaatatgttggcttcctttttttgtaaaagaattagttgttaatgtctgtgacaaatgtaaaatttctgaagaaatgtccaattttttggcatggcttgggtatctcaattcccttataaatccactgatttacacaatctttaatgaagacttcaagaaagcattccaaaagcttgtgcgatgtcgatgttag

SEQ ID NO: 28547 - DNA, 430 bp, Homo sapiens
  misc_feature (48)..(48): n is a, c, g, or t
  misc_feature (56)..(56): n is a, c, g, or t
aaatggaaaaccccctggccttaaccggcatccctccccggggccttnaccggccntcccaggagggttcccccctcaacccataaccgtataccccatagctcccttcctgtcattccatgtaaatatttgtaagctttttcctcccttcaaaggaaactaacatttctcttccctctgcattgtgtgagagagttttagacagtcttcatttaaaaacatgaaaaatgatgttagccttgttttcatttctagcagccttacattgtgtatattttctttctcattcccaaaattctaatctgcattactacccattcaatgccatttacctcaaaatgttgaatgctcctttatctttgttatctggtttctaatccttatcacaactgaaatttctgttttaggtgttattactgacttttctctg

SEQ ID NO: 28548 - DNA, 177 bp, Homo sapiens
atctgacctctgtttatcagggtcaggcgcgccctttgcacttttacgtttcctttaattatttcggacttgatcgtggcagggagcaagggggaaaaacaataccccagccctcaccagctaccctcgaagggttaaattttaaaccgcggtttctggaactagtccggaaacgca

SEQ ID NO: 28549 - DNA, 566 bp, Homo sapiens
cgtgtctgtttctctttctctctccctctcttgcgctgtccctcattcatgcactcttccatctttttgccattgtgccagctcaatttaaatgtatctgctctgtatctgttcaagtggagataatccatgcaaatcaggagccgtggctctcaatgcctggttcacagagaggactcagcttgaggaggtcactcgttcacagccgctcctcccattatatttttccccttattgcagaactgctgtatgtatacagtgactgaaaggactcaatttactgcaactgctgcctggctttacttacaacttttttttttttataaaggaacttacctccatctgtcttttcaagtttcagggtagaaagggtccctttaactcctgaagacagtaaatcacagtctgtgtggtggttctcagaagacacttaaaggactgaactggatgctctacatagcacccttgccaaaagggttcggaaatgacttccagcttcccacagtaataaaatggcactgtttggcatcttcgaggtaataaaagtgaattttttccattctagt

SEQ ID NO: 28550 - DNA, 843 bp, Homo sapiens
cgtgtctgtttctctttctctctccctctcttgcgctgtccctcattcatgcactcttccatctttttgccattgtgccagctcaatttaaatgtatctgctctgtatctgttcaagtggagataatccatgcaaatcaggagccgtggctctcaatgcctggttcacagagaggactcagcttgaggaggtcactcgttcacagccgctcctcccattatatttttccccttattgcagaactgctgtatgtatacagtgactgaaaggactcaatttactgcaactgctgcctggctttacttacaacttttttttttttataaaggaacttacctccatctgtcttttcaaggttacagaccacttactctaaacttcacaaatggttctgaagagtatggagcctacgtagattcataagagcccaatgtttccaaaggacattaattttgatttctccaatgaaggcttgtggctgtccttatgctttacaaaacattaccaaatcagagccgaaaagaaaactttggaatttgaagagagcttgataactgtgttctatgtggatccagcattacaactgataagtgaaagaaaagaaagaaaacatggaggggaaggtgataggaagatggaggcagagattggagtgatgcgtctacaagtcaagggaaaccaaggattgctaacagctgtacaaacttaggagagagacatggaacagattttccatcgaagcctcctgaagaaacaaaacttacaacttgattttggatttcttgcctccatgactgtgagagaataaatttctgttgttttaagccacccagtttgtagtca

SEQ ID NO: 28551 - DNA, 5706 bp, Homo sapiens
cggcgaacagacgttctttctcctccatgcagttacacaaaaggagggctacggaaactaaaagtttcggggcctctggctcggtgtgtggagaaaagagaaaacctggagacgggatatgaagatcaatgatgcagactgatggtcttgatgaagctgggcatttataactagattcattaaggaatacaaagaaaatacttaaagggatcaataatggtgtcttctggttgcagaatgcgaagtctgtggtttatcattgtaatcagcttcttaccaaatacagaaggtttcagcagagcagctttaccatttgggctggtgaggcgagaattatcctgtgaaggttattctatagatctgcgatgcccgggcagtgatgtcatcatgattgagagcgctaactatggtcggacggatgacaagatttgtgatgctgacccatttcagatggagaatacagactgctacctccccgatgccttcaaaattatgactcaaaggtgcaacaatcgaacacagtgtatagtagttactgggtcagatgtgtttcctgatccatgtcctggaacatacaaataccttgaagtccaatatgaatgtgtcccttacatttttgtgtgtcctgggaccttgaaagcaattgtggactcaccatgtatatatgaagctgaacaaaaggcgggtgcttggtgcaaggaccctcttcaggctgcagataaaatttatttcatgccctggactccctatcgtaccgatactttaatagaatatgcttctttagaagatttccaaaatagtcgccaaacaacaacatataaacttccaaatcgagtagatggtactggatttgtggtgtatgatggtgctgtcttctttaacaaagaaagaacgaggaatattgtgaaatttgacttgaggactagaattaagagtggcgaggccataattaactatgccaactaccatgatacctcaccatacagatggggaggaaagactgatatcgacctagcagttgatgaaaatggtttatgggtcatttacgccactgaacagaacaatggaatgatagttattagccagctgaatccatacactcttcgatttgaagcaacgtgggagactgtatacgacaaacgtgccgcatcaaatgcttttatgatatgcggagtcctctatgtggttaggtcagtttatcaagacaatgaaagtgaaacaggcaagaactcaattgattacatttataatacccgattaaaccgaggagaatatgtagacgttcccttccccaaccagtatcagtatattgctgcagtggattacaatccaagagataaccaactttacgtgtggaacaataacttcattttacgatattctctggagtttggtccacctgatcctgcccaagtgcctaccacagctgtgacaataacttcttcagctgagctgttcaaaaccataatatcaaccacaagcactacttcacagaaaggccccatgagcacaactgtagctggatcacaggaaggaagcaaagggacaaaaccacctccagcagtttctacaaccaaaattccacctataacaaatatttttcccctgccagagagattctgtgaagcattagactccaaggggataaagtggcctcagacacaaaggggaatgatggttgaacgaccatgccctaagggaacaagaggaactgcctcatatctctgcatgatttccactggaacatggaaccctaagggccccgatcttagcaactgtacctcacactgggtgaatcagctggctcagaagatcagaagcggagaaaatgctgctagtcttgccaatgaactggctaaacataccaaagggccagtgtttgctggggatgtaagttcttcagtgagattgatggagcagttggtggacatccttgatgcacagctgcaggaactgaaacctagtgaaaaagattcagctggacggagttataacaaggcaattgttgacacagtggacaaccttctgagacctgaagctttggaatcatggaaacatatgaattcttctgaacaagcacatactgcaacaatgttactcgatacattggaagaaggagcttttgtcctagctgacaatcttttagaaccaacaagggtctcaatgcccacagaaaatattgtcctggaagttgccgtactcagtacagaaggacagatccaagactttaaatttcctctgggcatcaaaggagcaggcagctcaatccaactgtccgcaaataccgtcaaacagaacagcaggaatgggcttgcaaagttggtgttcatcatttaccggagcctgggacagttccttagtacagaaaatgcaaccattaaactgggtgctgattttattggtcgtaatagcaccattgcagtgaactctcacgtcatttcagtttcaatcaataaagagtccagccgagtatacctgactgatcctgtgctttttaccctgccacacattgatcctgacaattatttcaatgcaaactgctccttctggaactactcagagagaactatgatgggatattggtctacccagggctgcaagctggttgacactaataaaactcgaacaacgtgtgcatgcagccacctaaccaattttgcaattctcatggcccacagggaaattgcatataaagatggcgttcatgaattacttcttacagtcatcacctgggtgggaattgtcatttcccttgtttgcctggctatctgcatcttcaccttctgctttttccgtggcctacagagtgaccgaaatactattcacaagaacctttgtatcaaccttttcattgctgaatttattttcctaataggcattgataagacaaaatatgcgattgcatgcccaatatttgcaggacttctacactttttctttttggcagcttttgcttggatgtgcctagaaggtgtgcagctctacctaatgttagttgaagtttttgaaagtgaatattcaaggaaaaaatattactatgttgctggttacttgtttcctgccacagtggttggagtttcagctgctattgactataagagctatggaacagaaaaagcttgctggcttcatgttgataactactttatatggagcttcattggacctgttaccttcattattctgctaaatattatcttcttggtgatcacattgtgcaaaatggtgaagcattcaaacactttgaaaccagattctagcaggttggaaaacattaagtcttgggtgcttggcgctttcgctcttctgtgtcttcttggcctcacctggtcctttgggttgctttttattaatgaggagactattgtgatggcatatctcttcactatatttaatgctttccagggagtgttcattttcatctttcactgtgctctccaaaagaaagtacgaaaagaatatggcaagtgcttcagacactcatactgctgtggaggcctcccaactgagagtccccacagttcagtgaaggcatcaaccaccagaaccagtgctcgctattcctctggcacacagagtcgtataagaagaatgtggaatgatactgtgagaaaacaatcagaatcttcttttatctcaggtgacatcaatagcacttcaacacttaatcaaggacattcactgaacaatgccagggatacaagtgccatggatactctaccgctaaatggtaattttaacaacagctactcgctgcacaagggtgactataatgacagcgtgcaagttgtggactgtggactaagtctgaatgatactgcttttgagaaaatgatcatttcagaattagtgcacaacaacttacggggcagcagcaagactcacaacctcgagctcacgctaccagtcaaacctgtgattggaggtagcagcagtgaagatgatgctattgtggcagatgcttcatctttaatgcacagcgacaacccagggctggagctccatcacaaagaactcgaggcaccacttattcctcagcggactcactcccttctgtaccaaccccagaagaaagtgaagtccgagggaactgacagctatgtctcccaactgacagcagaggctgaagatcacctacagtcccccaacagagactctctttatacaagcatgcccaatcttagagactctccctatccggagagcagccctgacatggaagaagacctctctccctccaggaggagtgagaatgaggacatttactataaaagcatgccaaatcttggagctggccatcagcttcagatgtgctaccagatcagcaggggcaatagtgatggttatataatccccattaacaaagaagggtgtattccagaaggagatgttagagaaggacaaatgcagctggttacaagtctttaatcatacagctaaggaattccaagggccacatgcgagtattaataaataaagacaccattggcctgacgcagctccctcaaactctgcttgaagagatgactcttgacctgtggttctctggtgtaaaaaagatgactgaaccttgcagttctgtgaatttttataaaacatacaaaaactttgtatatacacagagtatactaaagtgaattatttgttacaaagaaaagagatgccagccaggtattttaagattctgctgctgtttagagaaattgtgaaacaagcaaaacaaaactttccagccattttactgcagcagtctgtgaactaaatttgtaaatatggctgcaccatttttgtaggcctgcattgtattatatacaagacgtaggctttaaaatcctgtgggacaaatttactgtaccttactattcctgacaagacttggaaaagcaggagagatattctgcatcagtttgcagttcactgcaaatcttttacattaaggcaaagattgaaaacatgcttaaccactagcaatcaagccacaggccttatttcatatgtttcctcaactgtacaatgaactattctcatgaaaaatggctaaagaaattatattttgttctattgctagggtaaaataaatacatttgtgtccaactgaaatataattgtcattaaaataattttaaagagtgaagaaaatattgtgaaaagctcttggttgcacatgttatgaaatgttttttcttacactttgtcatggtaagttctactcattttcacttcttttccactgtatacagtgttctgctttgacaaagttagtctttattacttacatttaaatttcttattgccaaaagaacgtgttttatggggagaaacaaactctttgaagccagttatgtcatgccttgcacaaaagtgatgaaatctagaaaagattgtgtgtcacccctgtttattcttgaacagagggcaaagagggcactgggcacttctcacaaactttctagtgaacaaaaggtgcctattcttttttaaaaaaataaaataaaacataaatattactcttccatattccttctgcctatatttagtaattaatttattttatgataaagttctaatgaaatgtaaattgtttcagcaaaattctgcttttttttcatccctttgtgtaaacctgttaataatgagcccatcactaatatccagtgtaaagtttaacacggtttgacagtaaataaatgtgaattttttcaagta

SEQ ID NO: 28552 - DNA, 6361 bp, Homo sapiens
  misc_feature (6361)..(6361): n is a, c, g, or t
cggcgaacagacgttctttctcctccatgcagttacacaaaaggagggctacggaaactaaaagtttcggggcctctggctcggtgtgtggagaaaagagaaaacctggagacgggatatgaagatcaatgatgcagactgatggtcttgatgaagctgggcatttataactagattcattaaggaatacaaagaaaatacttaaagggatcaataatggtgtcttctggttgcagaatgcgaagtctgtggtttatcattgtaatcagcttcttaccaaatacagaaggtttcagcagagcagctttaccatttgggctggtgaggcgagaattatcctgtgaaggttattctatagatctgcgatgcccgggcagtgatgtcatcatgattgagagcgctaactatggtcggacggatgacaagatttgtgatgctgacccatttcagatggagaatacagactgctacctccccgatgccttcaaaattatgactcaaaggtgcaacaatcgaacacagtgtatagtagttactgggtcagatgtgtttcctgatccatgtcctggaacatacaaataccttgaagtccaatatgaatgtgtcccttacatttttgtgtgtcctgggaccttgaaagcaattgtggactcaccatgtatatatgaagctgaacaaaaggcgggtgcttggtgcaaggaccctcttcaggctgcagataaaatttatttcatgccctggactccctatcgtaccgatactttaatagaatatgcttctttagaagatttccaaaatagtcgccaaacaacaacatataaacttccaaatcgagtagatggtactggatttgtggtgtatgatggtgctgtcttctttaacaaagaaagaacgaggaatattgtgaaatttgacttgaggactagaattaagagtggcgaggccataattaactatgccaactaccatgatacctcaccatacagatggggaggaaagactgatatcgacctagcagttgatgaaaatggtttatgggtcatttacgccactgaacagaacaatggaatgatagttattagccagctgaatccatacactcttcgatttgaagcaacgtgggagactgtatacgacaaacgtgccgcatcaaatgcttttatgatatgcggagtcctctatgtggttaggtcagtttatcaagacaatgaaagtgaaacaggcaagaactcaattgattacatttataatacccgattaaaccgaggagaatatgtagacgttcccttccccaaccagtatcagtatattgctgcagtggattacaatccaagagataaccaactttacgtgtggaacaataacttcattttacgatattctctggagtttggtccacctgatcctgcccaagtgcctaccacagctgtgacaataacttcttcagctgagctgttcaaaaccataatatcaaccacaagcactacttcacagaaaggccccatgagcacaactgtagctggatcacaggaaggaagcaaagggacaaaaccacctccagcagtttctacaaccaaaattccacctataacaaatatttttcccctgccagagagattctgtgaagcattagactccaaggggataaagtggcctcagacacaaaggggaatgatggttgaacgaccatgccctaagggaacaagaggaactgcctcatatctctgcatgatttccactggaacatggaaccctaagggccccgatcttagcaactgtacctcacactgggtgaatcagctggctcagaagatcagaagcggagaaaatgctgctagtcttgccaatgaactggctaaacataccaaagggccagtgtttgctggggatgtaagttcttcagtgagattgatggagcagttggtggacatccttgatgcacagctgcaggaactgaaacctagtgaaaaagattcagctggacggagttataacaaggcaattgttgacacagtggacaaccttctgagacctgaagctttggaatcatggaaacatatgaattcttctgaacaagcacatactgcaacaatgttactcgatacattggaagaaggagcttttgtcctagctgacaatcttttagaaccaacaagggtctcaatgcccacagaaaatattgtcctggaagttgccgtactcagtacagaaggacagatccaagactttaaatttcctctgggcatcaaaggagcaggcagctcaatccaactgtccgcaaataccgtcaaacagaacagcaggaatgggcttgcaaagttggtgttcatcatttaccggagcctgggacagttccttagtacagaaaatgcaaccattaaactgggtgctgattttattggtcgtaatagcaccattgcagtgaactctcacgtcatttcagtttcaatcaataaagagtccagccgagtatacctgactgatcctgtgctttttaccctgccacacattgatcctgacaattatttcaatgcaaactgctccttctggaactactcagagagaactatgatgggatattggtctacccagggctgcaagctggttgacactaataaaactcgaacaacgtgtgcatgcagccacctaaccaattttgcaattctcatggcccacagggaaattgcatataaagatggcgttcatgaattacttcttacagtcatcacctgggtgggaattgtcatttcccttgtttgcctggctatctgcatcttcaccttctgctttttccgtggcctacagagtgaccgaaatactattcacaagaacctttgtatcaaccttttcattgctgaatttattttcctaataggcattgataagacaaaatatgcgattgcatgcccaatatttgcaggacttctacactttttctttttggcagcttttgcttggatgtgcctagaaggtgtgcagctctacctaatgttagttgaagtttttgaaagtgaatattcaaggaaaaaatattactatgttgctggttacttgtttcctgccacagtggttggagtttcagctgctattgactataagagctatggaacagaaaaagcttgctggcttcatgttgataactactttatatggagcttcattggacctgttaccttcattattctgctaaatattatcttcttggtgatcacattgtgcaaaatggtgaagcattcaaacactttgaaaccagattctagcaggttggaaaacattaagtcttgggtgcttggcgctttcgctcttctgtgtcttcttggcctcacctggtcctttgggttgctttttattaatgaggagactattgtgatggcatatctcttcactatatttaatgctttccagggagtgttcattttcatctttcactgtgctctccaaaagaaagtacgaaaagaatatggcaagtgcttcagacactcatactgctgtggaggcctcccaactgagagtccccacagttcagtgaaggcatcaaccaccagaaccagtgctcgctattcctctggcacacagagtcgtataagaagaatgtggaatgatactgtgagaaaacaatcagaatcttcttttatctcaggtgacatcaatagcacttcaacacttaatcaaggacattcactgaacaatgccagggatacaagtgccatggatactctaccgctaaatggtaattttaacaacagctactcgctgcacaagggtgactataatgacagcgtgcaagttgtggactgtggactaagtctgaatgatactgcttttgagaaaatgatcatttcagaattagtgcacaacaacttacggggcagcagcaagactcacaacctcgagctcacgctaccagtcaaacctgtgattggaggtagcagcagtgaagatgatgctattgtggcagatgcttcatctttaatgcacagcgacaacccagggctggagctccatcacaaagaactcgaggcaccacttattcctcagcggactcactcccttctgtaccaaccccagaagaaagtgaagtccgagggaactgacagctatgtctcccaactgacagcagaggctgaagatcacctacagtcccccaacagagactctctttatacaagcatgcccaatcttagagactctccctatccggagagcagccctgacatggaagaagacctctctccctccaggaggagtgagaatgaggacatttactataaaagcatgccaaatcttggagctggccatcagcttcagatgtgctaccagatcagcaggggcaatagtgatggttatataatccccattaacaaagaagggtgtattccagaaggagatgttagagaaggacaaatgcagctggttacaagtctttaatcatacagctaaggaattccaagggccacatgcgagtattaataaataaagacaccattggcctgacgcagctccctcaaactctgcttgaagagatgactcttgacctgtggttctctggtgtaaaaaagatgactgaaccttgcagttctgtgaatttttataaaacatacaaaaactttgtatatacacagagtatactaaagtgaattatttgttacaaagaaaagagatgccagccaggtattttaagattctgctgctgtttagagaaattgtgaaacaagcaaaacaaaactttccagccattttactgcagcagtctgtgaactaaatttgtaaatatggctgcaccatttttgtaggcctgcattgtattatatacaagacgtaggctttaaaatcctgtgggacaaatttactgtaccttactattcctgacaagacttggaaaagcaggagagatattctgcatcagtttgcagttcactgcaaatcttttacattaaggcaaagattgaaaacatgcttaaccactagcaatcaagccacaggccttatttcatatgtttcctcaactgtacaatgaactattctcatgaaaaatggctaaagaaattatattttgttctattgctagggtaaaataaatacatttgtgtccaactgaaatataattgtcattaaaataattttaaagagtgaagaaaatattgtgaaaagctcttggttgcacatgttatgaaatgttttttcttacactttgtcatggtaagttctactcattttcacttcttttccactgtatacagtgttctgctttgacaaagttagtctttattacttacatttaaatttcttattgccaaaagaacgtgttttatggggagaaacaaactctttgaagccagttatgtcatgccttgcacaaaagtgatgaaatctagaaaagattgtgtgtcacccctgtttattcttgaacagagggcaaagagggcactgggcacttctcacaaactttctagtgaacaaaaggtgcctattcttttttaaaaaaataaaataaaacataaatattactcttccatattccttctgcctatatttagtaattaatttattttatgataaagttctaatgaaatgtaaattgtttcagcaaaattctgcttttttttcatccctttgtgtaaacctgttaataatgagcccatcactaatatccagtgtaaagtttaacacggtttgacagtaaataaatgtgaattttttcaagtaaaaaaaaacaaaaaaaaaaaaaaaaaaaaaaaaagagacaccacacaaaaaaaacaattcacccagagaggcgacaaccgaaagtcagcaatgcaaccaaaatgtagtataaacaagaggtcccccgaaagggagagccagatcataataaagagacagagacctagcgacacatatcaacaaccagcgcagcgggacacccaacggcgtcaggcatactagtgcagacacacacatatattaggagcatggaacaagaatgggacagacacacacaaacggaaacccgcgcaggaggaaaaacaacaagacccagcgctagatcacgggcaccagaacggaagcacaccgccgcgacaaaccccggcccacaagcggaaaagagcaaacagaataaagcagagcgaggaagacagtagaggaggcagagcggaaccaacaacgagacgagggagagcagcacgccgagaggacgcgagaggatagcaacgcagacggcaagagcgcgcaagacgcaagagaaaccaccagaggagggaccgaaggagcgcggcagcagacagaaagcagagcaaacgccagcaagagaggacaggcgagacgacgcagggcgagagtggcaagagaggcacgcaccgcagaccacccaaagagn

SEQ ID NO: 28553 - DNA, 6021 bp, Homo sapiens
cggcgaacagacgttctttctcctccatgcagttacacaaaaggagggctacggaaactaaaagtttcggggcctctggctcggtgtgtggagaaaagagaaaacctggagacgggatatgaagatcaatgatgcagactgatggtcttgatgaagctgggcatttataactagattcattaaggaatacaaagaaaatacttaaagggatcaataatggtgtcttctggttgcagaatgcgaagtctgtggtttatcattgtaatcagcttcttaccaaatacagaaggtttcagcagagcagctttaccatttgggctggtgaggcgagaattatcctgtgaaggttattctatagatctgcgatgcccgggcagtgatgtcatcatgattgagagcgctaactatggtcggacggatgacaagatttgtgatgctgacccatttcagatggagaatacagactgctacctccccgatgccttcaaaattatgactcaaaggtgcaacaatcgaacacagtgtatagtagttactgggtcagatgtgtttcctgatccatgtcctggaacatacaaataccttgaagtccaatatgaatgtgtcccttacatttttgtgtgtcctgggaccttgaaagcaattgtggactcaccatgtatatatgaagctgaacaaaaggcgggtgcttggtgcaaggaccctcttcaggctgcagataaaatttatttcatgccctggactccctatcgtaccgatactttaatagaatatgcttctttagaagatttccaaaatagtcgccaaacaacaacatataaacttccaaatcgagtagatggtactggatttgtggtgtatgatggtgctgtcttctttaacaaagaaagaacgaggaatattgtgaaatttgacttgaggactagaattaagagtggcgaggccataattaactatgccaactaccatgatacctcaccatacagatggggaggaaagactgatatcgacctagcagttgatgaaaatggtttatgggtcatttacgccactgaacagaacaatggaatgatagttattagccagctgaatccatacactcttcgatttgaagcaacgtgggagactgtatacgacaaacgtgccgcatcaaatgcttttatgatatgcggagtcctctatgtggttaggtcagtttatcaagacaatgaaagtgaaacaggcaagaactcaattgattacatttataatacccgattaaaccgaggagaatatgtagacgttcccttccccaaccagtatcagtatattgctgcagtggattacaatccaagagataaccaactttacgtgtggaacaataacttcattttacgatattctctggagtttggtccacctgatcctgcccaagtgcctaccacagctgtgacaataacttcttcagctgagctgttcaaaaccataatatcaaccacaagcactacttcacagaaaggccccatgagcacaactgtagctggatcacaggaaggaagcaaagggacaaaaccacctccagcagtttctacaaccaaaattccacctataacaaatatttttcccctgccagagagattctgtgaagcattagactccaaggggataaagtggcctcagacacaaaggggaatgatggttgaacgaccatgccctaagggaacaagaggaactgcctcatatctctgcatgatttccactggaacatggaaccctaagggccccgatcttagcaactgtacctcacactgggtgaatcagctggctcagaagatcagaagcggagaaaatgctgctagtcttgccaatgaactggctaaacataccaaagggccagtgtttgctggggatgtaagttcttcagtgagattgatggagcagttggtggacatccttgatgcacagctgcaggaactgaaacctagtgaaaaagattcagctggacggagttataacaaggcaattgttgacacagtggacaaccttctgagacctgaagctttggaatcatggaaacatatgaattcttctgaacaagcacatactgcaacaatgttactcgatacattggaagaaggagcttttgtcctagctgacaatcttttagaaccaacaagggtctcaatgcccacagaaaatattgtcctggaagttgccgtactcagtacagaaggacagatccaagactttaaatttcctctgggcatcaaaggagcaggcagctcaatccaactgtccgcaaataccgtcaaacagaacagcaggaatgggcttgcaaagttggtgttcatcatttaccggagcctgggacagttccttagtacagaaaatgcaaccattaaactgggtgctgattttattggtcgtaatagcaccattgcagtgaactctcacgtcatttcagtttcaatcaataaagagtccagccgagtatacctgactgatcctgtgctttttaccctgccacacattgatcctgacaattatttcaatgcaaactgctccttctggaactactcagagagaactatgatgggatattggtctacccagggctgcaagctggttgacactaataaaactcgaacaacgtgtgcatgcagccacctaaccaattttgcaattctcatggcccacagggaaattgcatataaagatggcgttcatgaattacttcttacagtcatcacctgggtgggaattgtcatttcccttgtttgcctggctatctgcatcttcaccttctgctttttccgtggcctacagagtgaccgaaatactattcacaagaacctttgtatcaaccttttcattgctgaatttattttcctaataggcattgataagacaaaatatgcgattgcatgcccaatatttgcaggacttctacactttttctttttggcagcttttgcttggatgtgcctagaaggtgtgcagctctacctaatgttagttgaagtttttgaaagtgaatattcaaggaaaaaatattactatgttgctggttacttgtttcctgccacagtggttggagtttcagctgctattgactataagagctatggaacagaaaaagcttgctggcttcatgttgataactactttatatggagcttcattggacctgttaccttcattattctgctaaatattatcttcttggtgatcacattgtgcaaaatggtgaagcattcaaacactttgaaaccagattctagcaggttggaaaacattaagtcttgggtgcttggcgctttcgctcttctgtgtcttcttggcctcacctggtcctttgggttgctttttattaatgaggagactattgtgatggcatatctcttcactatatttaatgctttccagggagtgttcattttcatctttcactgtgctctccaaaagaaagtacgaaaagaatatggcaagtgcttcagacactcatactgctgtggaggcctcccaactgagagtccccacagttcagtgaaggcatcaaccaccagaaccagtgctcgctattcctctggcacacagagtcgtataagaagaatgtggaatgatactgtgagaaaacaatcagaatcttcttttatctcaggtgacatcaatagcacttcaacacttaatcaaggacattcactgaacaatgccagggatacaagtgccatggatactctaccgctaaatggtaattttaacaacagctactcgctgcacaagggtgactataatgacagcgtgcaagttgtggactgtggactaagtctgaatgatactgcttttgagaaaatgatcatttcagaattagtgcacaacaacttacggggcagcagcaagactcacaacctcgagctcacgctaccagtcaaacctgtgattggaggtagcagcagtgaagatgatgctattgtggcagatgcttcatctttaatgcacagcgacaacccagggctggagctccatcacaaagaactcgaggcaccacttattcctcagcggactcactcccttctgtaccaaccccagaagaaagtgaagtccgagggaactgacagctatgtctcccaactgacagcagaggctgaagatcacctacagtcccccaacagagactctctttatacaagcatgcccaatcttagagactctccctatccggagagcagccctgacatggaagaagacctctctccctccaggaggagtgagaatgaggacatttactataaaagcatgccaaatcttggagctggccatcagcttcagatgtgctaccagatcagcaggggcaatagtgatggttatataatccccattaacaaagaagggtgtattccagaaggagatgttagagaaggacaaatgcagctggttacaagtctttaatcatacagctaaggaattccaagggccacatgcgagtattaataaataaagacaccattggcctgacgcagctccctcaaactctgcttgaagagatgactcttgacctgtggttctctggtgtaaaaaagatgactgaaccttgcagttctgtgaatttttataaaacatacaaaaactttgtatatacacagagtatactaaagtgaattatttgttacaaagaaaagagatgccagccaggtattttaagattctgctgctgtttagagaaattgtgaaacaagcaaaacaaaactttccagccattttactgcagcagtctgtgaactaaatttgtaaatatggctgcaccatttttgtaggcctgcattgtattatatacaagacgtaggctttaaaatcctgtgggacaaatttactgtaccttactattcctgacaagacttggaaaagcaggagagatattctgcatcagtttgcagttcactgcaaatcttttacattaaggcaaagattgaaaacatgcttaaccactagcaatcaagccacaggccttatttcatatgtttcctcaactgtacaatgaactattctcatgaaaaatggctaaagaaattatattttgttctattgctagggtaaaataaatacatttgtgtccaactgaaatataattgtcattaaaataattttaaagagtgaagaaaatattgtgaaaagctcttggttgcacatgttatgaaatgttttttcttacactttgtcatggtaagttctactcattttcacttcttttccactgtatacagtgttctgctttgacaaagttagtctttattacttacatttaaatttcttattgccaaaagaacgtgttttatggggagaaacaaactctttgaagccagttatgtcatgccttgcacaaaagtgatgaaatctagaaaagattgtgtgtcacccctgtttattcttgaacagagggcaaagagggcactgggcacttctcacaaactttctagtgaacaaaaggtgcctattcttttttaaaaaaataaaataaaacataaatattactcttccatattccttctgcctatatttagtaattaatttattttatgataaagttctaatgaaatgtaaattgtttcagcaaaattctgcttttttttcatccctttgtgtaaacctgttaataatgagcccatcactaatatccagtgtaaagtttaacacggtttgacagtaaataaatgtgaattttttcaagtagttaacatgtgaacttttatgtatgatacataattggctttaacatgttggtccattcccaccttggtttaagtaacgtcataccaaagtccatggatatatgaaaggatacaattaagttgcctgtttgttctttatgctgaaaggaatatatgtcttccaattgcccactacatatgcacaaaatctgctggataagttttaagagggatatattctgaaagcatttttgtttgttgcattgtaccaggactaaaaaaagaaggattggaagttctgccatcaaatttgggtatcataaaaagtttttaactg

SEQ ID NO: 28554 - DNA, 5805 bp, Homo sapiens
cggcgaacagacgttctttctcctccatgcagttacacaaaaggagggctacggaaactaaaagtttcggggcctctggctcggtgtgtggagaaaagagaaaacctggagacgggatatgaagatcaatgatgcagactgatggtcttgatgaagctgggcatttataactagattcattaaggaatacaaagaaaatacttaaagggatcaataatggtgtcttctggttgcagaatgcgaagtctgtggtttatcattgtaatcagcttcttaccaaatacagaaggtttcagcagagcagctttaccatttgggctggtgaggcgagaattatcctgtgaaggttattctatagatctgcgatgcccgggcagtgatgtcatcatgattgagagcgctaactatggtcggacggatgacaagatttgtgatgctgacccatttcagatggagaatacagactgctacctccccgatgccttcaaaattatgactcaaaggtgcaacaatcgaacacagtgtatagtagttactgggtcagatgtgtttcctgatccatgtcctggaacatacaaataccttgaagtccaatatgaatgtgtcccttacatttttgtgtgtcctgggaccttgaaagcaattgtggactcaccatgtatatatgaagctgaacaaaaggcgggtgcttggtgcaaggaccctcttcaggctgcagataaaatttatttcatgccctggactccctatcgtaccgatactttaatagaatatgcttctttagaagatttccaaaatagtcgccaaacaacaacatataaacttccaaatcgagtagatggtactggatttgtggtgtatgatggtgctgtcttctttaacaaagaaagaacgaggaatattgtgaaatttgacttgaggactagaattaagagtggcgaggccataattaactatgccaactaccatgatacctcaccatacagatggggaggaaagactgatatcgacctagcagttgatgaaaatggtttatgggtcatttacgccactgaacagaacaatggaatgatagttattagccagctgaatccatacactcttcgatttgaagcaacgtgggagactgtatacgacaaacgtgccgcatcaaatgcttttatgatatgcggagtcctctatgtggttaggtcagtttatcaagacaatgaaagtgaaacaggcaagaactcaattgattacatttataatacccgattaaaccgaggagaatatgtagacgttcccttccccaaccagtatcagtatattgctgcagtggattacaatccaagagataaccaactttacgtgtggaacaataacttcattttacgatattctctggagtttggtccacctgatcctgcccaagtgcctaccacagctgtgacaataacttcttcagctgagctgttcaaaaccataatatcaaccacaagcactacttcacagaaaggccccatgagcacaactgtagctggatcacaggaaggaagcaaagggacaaaaccacctccagcagtttctacaaccaaaattccacctataacaaatatttttcccctgccagagagattctgtgaagcattagactccaaggggataaagtggcctcagacacaaaggggaatgatggttgaacgaccatgccctaagggaacaagaggaactgcctcatatctctgcatgatttccactggaacatggaaccctaagggccccgatcttagcaactgtacctcacactgggtgaatcagctggctcagaagatcagaagcggagaaaatgctgctagtcttgccaatgaactggctaaacataccaaagggccagtgtttgctggggatgtaagttcttcagtgagattgatggagcagttggtggacatccttgatgcacagctgcaggaactgaaacctagtgaaaaagattcagctggacggagttataacaaggcaattgttgacacagtggacaaccttctgagacctgaagctttggaatcatggaaacatatgaattcttctgaacaagcacatactgcaacaatgttactcgatacattggaagaaggagcttttgtcctagctgacaatcttttagaaccaacaagggtctcaatgcccacagaaaatattgtcctggaagttgccgtactcagtacagaaggacagatccaagactttaaatttcctctgggcatcaaaggagcaggcagctcaatccaactgtccgcaaataccgtcaaacagaacagcaggaatgggcttgcaaagttggtgttcatcatttaccggagcctgggacagttccttagtacagaaaatgcaaccattaaactgggtgctgattttattggtcgtaatagcaccattgcagtgaactctcacgtcatttcagtttcaatcaataaagagtccagccgagtatacctgactgatcctgtgctttttaccctgccacacattgatcctgacaattatttcaatgcaaactgctccttctggaactactcagagagaactatgatgggatattggtctacccagggctgcaagctggttgacactaataaaactcgaacaacgtgtgcatgcagccacctaaccaattttgcaattctcatggcccacagggaaattgcatataaagatggcgttcatgaattacttcttacagtcatcacctgggtgggaattgtcatttcccttgtttgcctggctatctgcatcttcaccttctgctttttccgtggcctacagagtgaccgaaatactattcacaagaacctttgtatcaaccttttcattgctgaatttattttcctaataggcattgataagacaaaatatgcgattgcatgcccaatatttgcaggacttctacactttttctttttggcagcttttgcttggatgtgcctagaaggtgtgcagctctacctaatgttagttgaagtttttgaaagtgaatattcaaggaaaaaatattactatgttgctggttacttgtttcctgccacagtggttggagtttcagctgctattgactataagagctatggaacagaaaaagcttgctggcttcatgttgataactactttatatggagcttcattggacctgttaccttcattattctgctaaatattatcttcttggtgatcacattgtgcaaaatggtgaagcattcaaacactttgaaaccagattctagcaggttggaaaacattaagtcttgggtgcttggcgctttcgctcttctgtgtcttcttggcctcacctggtcctttgggttgctttttattaatgaggagactattgtgatggcatatctcttcactatatttaatgctttccagggagtgttcattttcatctttcactgtgctctccaaaagaaagtacgaaaagaatatggcaagtgcttcagacactcatactgctgtggaggcctcccaactgagagtccccacagttcagtgaaggcatcaaccaccagaaccagtgctcgctattcctctggcacacagagtcgtataagaagaatgtggaatgatactgtgagaaaacaatcagaatcttcttttatctcaggtgacatcaatagcacttcaacacttaatcaaggactgacatcacatggtctgagagcccatcttcaagatttatatcatttagagctactcttaggccagatagcctgagcagacagacatgatgtgagttgacattcactgaacaatgccagggatacaagtgccatggatactctaccgctaaatggtaattttaacaacagctactcgctgcacaagggtgactataatgacagcgtgcaagttgtggactgtggactaagtctgaatgatactgcttttgagaaaatgatcatttcagaattagtgcacaacaacttacggggcagcagcaagactcacaacctcgagctcacgctaccagtcaaacctgtgattggaggtagcagcagtgaagatgatgctattgtggcagatgcttcatctttaatgcacagcgacaacccagggctggagctccatcacaaagaactcgaggcaccacttattcctcagcggactcactcccttctgtaccaaccccagaagaaagtgaagtccgagggaactgacagctatgtctcccaactgacagcagaggctgaagatcacctacagtcccccaacagagactctctttatacaagcatgcccaatcttagagactctccctatccggagagcagccctgacatggaagaagacctctctccctccaggaggagtgagaatgaggacatttactataaaagcatgccaaatcttggagctggccatcagcttcagatgtgctaccagatcagcaggggcaatagtgatggttatataatccccattaacaaagaagggtgtattccagaaggagatgttagagaaggacaaatgcagctggttacaagtctttaatcatacagctaaggaattccaagggccacatgcgagtattaataaataaagacaccattggcctgacgcagctccctcaaactctgcttgaagagatgactcttgacctgtggttctctggtgtaaaaaagatgactgaaccttgcagttctgtgaatttttataaaacatacaaaaactttgtatatacacagagtatactaaagtgaattatttgttacaaagaaaagagatgccagccaggtattttaagattctgctgctgtttagagaaattgtgaaacaagcaaaacaaaactttccagccattttactgcagcagtctgtgaactaaatttgtaaatatggctgcaccatttttgtaggcctgcattgtattatatacaagacgtaggctttaaaatcctgtgggacaaatttactgtaccttactattcctgacaagacttggaaaagcaggagagatattctgcatcagtttgcagttcactgcaaatcttttacattaaggcaaagattgaaaacatgcttaaccactagcaatcaagccacaggccttatttcatatgtttcctcaactgtacaatgaactattctcatgaaaaatggctaaagaaattatattttgttctattgctagggtaaaataaatacatttgtgtccaactgaaatataattgtcattaaaataattttaaagagtgaagaaaatattgtgaaaagctcttggttgcacatgttatgaaatgttttttcttacactttgtcatggtaagttctactcattttcacttcttttccactgtatacagtgttctgctttgacaaagttagtctttattacttacatttaaatttcttattgccaaaagaacgtgttttatggggagaaacaaactctttgaagccagttatgtcatgccttgcacaaaagtgatgaaatctagaaaagattgtgtgtcacccctgtttattcttgaacagagggcaaagagggcactgggcacttctcacaaactttctagtgaacaaaaggtgcctattcttttttaaaaaaataaaataaaacataaatattactcttccatattccttctgcctatatttagtaattaatttattttatgataaagttctaatgaaatgtaaattgtttcagcaaaattctgcttttttttcatccctttgtgtaaacctgttaataatgagcccatcactaatatccagtgtaaagtttaacacggtttgacagtaaataaatgtgaattttttcaagta
